United States Patent Application Publication US 2026/0058010 A1 - sequence listing, part 8

SEQ ID NO: 80 - DNA, 404082 bp, Homo sapiens
  source 1..404082: mol_type = genomic DNA
ttgcagtgagccaagatcgtgccactgtattcctgcctgggtgacaagagtgaaattctgtctcaaaaaaaaaaaaaaaaaaatgcctggaaaactcattacagaagtttccactgtagtaaaatttgttgaaataagttgcactcaatcatgtaaaaatgtggctccttgggactatctgaacggaatgttgtaagtgaaacaccctcaccatagtcactatcctgttatcaagaattctggatcttaaggaagtgcttgttttgtcaaaaatgtgacactaagacttttcacccctatagaaaaacctcaaccctggcctggcgtggtgtcccacccctgtgatcccagcactttgggaggccgaggccggtggattacttgaggtcaggagttcaagaccagcccgggcaacatggtgaaaccccgtctgcactaaaaacacaaaaattatctgggcttggtggcctgtggctgtaatcccagctattcgtgaggctgaggctagagaatcgcttgaacccaggaggcggaggttgcagtgagctgagatcgcgccattgcactccagcctgggcgacagagtgagactccgtctaaaacaacaacaagcaacaacaacaacaaacttcaattatgtttggaaagaagtgctaatttaatttggcaaagatgaagacagcagtcataaagcaaaacattcggtctcaggttgggtggattcccacctagttgacgaggccagctgcagattcaggtgggatcacctgatgatctttatcaatgccatttctttctctggatccttattactgacattagcaagggctttcagctgcccagaagatgttctttgcagacatttgctctcccgggctgccagcaggctttacaaatttaaaactttcagtgtaggaacccagcctccgtcgtccttcccctccaaagttaagagatctgctctaagggttcctgaggggtggtctggggccatgggaacaggatcaaggccccctgagcgccgggcctggcttctgtggcttcgcaaacttttcagcctgtgtgccacggcgacgcgcagcggctgagtcggagcccacgcggcgcgcgcctcccgcgaggaacttttcggcttgtaggctgcttgtcactctcgctttccgacgcgcctccccctggctcgcgctcccggagttccctcccctcctggcgaggacctttcccggcgcccgcggctccgatccccgccgcgctgcgcccgctctcccggccccggctgccccgctgagggctcccctctcccaggcaccgcagccgcgcccccgcgtcccgcctcccgagcggctcgcttcgcccgatgccccggccccgtcccgcgcactgagcgcctggcagcagggcgccgagtcccggggcgctgcggggcgctgcgccgagaacggccgggcctgagccctgggcggcccccagagccgatcagagcgcggggaggcgggggcgaggaggaggggacccgccgccgggggctggctgcttcgctccgagccgacttttcgccaatggtccaaagggacatgtccaagtcgcctcccacagcggcggcggcggtggcgcaggagatccagatggaactgctagagaacgtggctcccgcgggggcgctcggagccgccgcacaggtagcgagagcgcggcgccttctccttcctttgtgagccgccgggcagggcaccgacctcgggttctcccggcgcctccactgcagggatctctagcctcgcacctcctcccctcgtcgcctgcccaccctctgctcctctcctggcgccggggaccctgcccctttgcgccttttcctggctctgcctcggcttccatttttctctgcttccgaaaagccagtggggaagggcgggggagacctgccagtcctcccagacttctcccgggttgctccagctggccctcctcgccccttcccgggagaggcacatggagagacatgaatcaggggagtggactggacctgctgaagatcgtgagtccgggtgggcgggagggggcccgcttcccgcagcgctttctacgatgccgactctcctggccacgctccgagccggggtgggcgtgggtgtgaggatgatggggtgcaggtgggcaggaggggagcgaatatgggggtgccctgccggatccccccagagctgcccggaccacgctgcgcacctggggctgacagctctccagtcccctcgggcacttgccaaggtttgcctgtcccacctcatgcctttcccttaagaagcgagtgagctggggacaagaaagtttttatttttccgtctcccctgaaatgttagccatttcagggatctccaggatcccctttctctccgttgagtgtttgcggtttctggaaaaagtcagcttcgctgcaggttgttgtgaaattggagatgtcagttgtaggcgctgggcaatgacaaggtggtttttacgtttttacgtaaggcttcagcaggtacagtttgggttacagacacctccaggtctcagcgatgaggagtcgctcaacttttctcccggcagggaaatgacttcagactcctagctgcgggctggctgttggctggccagtgatgtgaagaggtcttggttacatttcaggcagcattctggagaaatgtctgtttgcttaactgtgttggcttgttgatttcaagcctacatttgccagattttaatttgcggtaagatatatatgtgtgtgtatatatacttatatattaatacgtagacacacatacacacactagagagcatgttagagtatcatttgctgtagtagtgggggcaggagtgtgacaagctaataaaggtggcaaatgttttcttgctgttgttttgataggtggaacatgagtgctctagatattttgatattgtaatcatggcagttccaagtggcatagtagtctagctttattgaactttcttttaccattgggaaattaatgtgctaacttaaaacacataattcactttgacttgagaaggggaagaatgtggacaccaaggacttgtgtaatcagaaatctatttcttttgtagtggtaaaacagctagattttggtccaccctgggctgtttgcttcacaagccgagtagggacatgtaatgaaccagctacattcccatctggcctctgccagaggatctgaattttaaccaatagagtttgcatttgttctagactcctgatttttatctagatgcttgccaggttagacagaatgaaaaatgtacccggagacctcggttattctaggatgaaggtcttgaatactatcagtattcgagtcctccatcaaaggaaaggacatttagaccctcatttgcctttgatcttccttgagggatattttagaaaagtttttattcttatgataaaaatagagttcctaaattcctggacatcaaagtcagggctcacataactgcattcagataagagatactaatttactttgtgatttatgtacaatgattaaatgtaagtcaagttattgtacagcagcaatgtggaaatgattctgatgtgaaaagacacaatttctgccttcaaagaatttatattccagtagcagcaattaggatatatgtataggggctggaagagaagttctgactagtaaatggcttcaaaggaataaggataataaacacgctatttggaggaatctgtaaggacttcattgatgaggtggcatttgcaaagagaattgaaggatgggtcagattacaccagatatttttgagagagttggtaagcagtcgtacatgaaacagagtcccagaagtaagaagtcttacaggataatttatcgtttctagttcaaaaagagcatggtaaggtcaagattggacacaggcgtaaaactgacaaagcaatttgagactacatcttggggacttggaatctttagtgtattgagcgacagggaactgtggaaggagttcaaaagaggacccacatagcagctcatttgggaatattcacttggaaatgttctgtaagatagtttcaagtcttaggagtccagaggtgaagctgccaggcagcagacagatgtaacagtttgggccgaggtaataaggcctaagcgaaaaagagatgaaaagataatggatatgacagttctatgtatcaaacatttcaaagttcaattcacaggaattagcaagtgattgcatagataaaggagagagaagagaaagggcagaatggattttaaaagcaagtttaagagatataaatattcaactgcatcaacattcatctccttgctttctctgccttccaaaaatgaaagcaatttgacttgaattgcgttcatctcacacccattatttgagggaaacattaccttgtttattttatatctgataaatcatggcatcataggattgtgtgaggcttgggaaagccatctcttccatctctctgtttgggcagaacagaccagcagtaaaaactgcctgagaaaggaggctggctctagagcatcctccttgtatgtggcaccgagtaattctactcagaattattgggcagttctacctagaaatggagtttctatttacaaatggaacctctaaagcaatgattggttttaggaatcattctacctcacctctggattatagtattatatttgtatgaagaaagcagaagatgtagatttgcaaactctgccattttccttttctgtatcaatcattctgtctagagagagggagcatcctgatacattccggtccctttgccccagtacattgccataaacaaaatgatacatttctcaaagccctggtttttgttttgttttgtttttgtttttgttctgttttgtgttttgaaacggagtctcaccctgtcacccaggctggagtgcagtggcattatctcagctcactgcaacctccacctcctggtttcaagcaattttcctgcctcagcctcctcagtagctaggactacaggcgcccgccaccatgctcagctaatttttttgtatttttagtagagacgaggtttcaccatgttggctaggcttgtatcaaactcctgacctcaggtgatctgcccgccttggcctcccaaagtgctgggattacaggcgtgcgccaccatgcccagcccaaaatggatacgtttcttacatgggaaatgaatggcaatctaactgcaaattcttgaaagtccccatttaagaaaattgcattgctttttaggtaacctgttgaacagtttcagcgtgaacctggacacagtctacttccaaagtccaggtgctcatggaggaccctttctccaagctccagatctgtctgttcattgtggtagctgctagccacctgtggcttttgagcccttgaaatgtggctggtctgaactgatatgtgctgtaaatgtgaaatacacaccagatatcaaaggcttaagatgaaataaagaatataacacatcttcattagtaaattttaaattgatgacatgttgcaatgaccatgttttggatatgctgggttaaacaaatgcattgttacaattaatttcacctgttgctgtttacctttttaatgtggctgctggaaaatttcagtgatatatttggccatatgacatttctattgggcaacattaaagtatgaaactggtaattctccagggaattgaatagctcctgcgtgaaggttgggtgaacgggaagcaggtgacagggattgataggtaacagaagaggaaacggaggagtaacaagaacagtatctcagcactctaggcctcagagagattgtcagtggcacctccagtcgcacctgaaactgaacagacagtaaccagtgggcctgtttgttttgctcctagcaacaggtcccagctggtcccagcccagccgagtctgccagatgcttttcaagcatgttgtggtaatacagcctggtgatggcaacatcctgaatggctgtagcaaggagctttatccaaaaagagtagcagctgttttctagtggctcttcaactacatcaacactgttttcctgaaatattcttaggtcccgtgtgcaaatgagttttctgcagtctccaaagttggtggttacaggtcctgtgctttatgttttgctgaaatcttcactcttaaccaccatcactttcctcttgaatggtatttttttttttctaatgtgacatgggagaaatttacagacatgccaatcagaatttctgagtatgttttagaatttgaaatatatctgagtgatttgaggttttgttgttcttacaatatcatgctcattttatttttctctctctttttatgtgaagactcaatttacctgttgctgtatttaattcctttgaattatatagccttggccctttcaagagaagctaagcaaaatatgttaacctcataggggatggtgatactctacaattttgtggcatgtctctatcctacacgtagtctaggtcaaacataacataacatggttatgttacaaactaattgtaacaatgcattatttcacaactgcagacagagaaaactacttatgacatcacttaaaggaaccgggcctgtcttactgatctttccaagcctggcaggaggtagactgtgaagaaggcatgtgttgttcctggctttctgctctccctgcctgtgctcctccttactgggcagatagatctctgcttcctggcctcctccttcctccctcctccctcctgtacctgctagacacccacccccatccccaagaactctatttatgcaggctccttgttcctttctgcttttgtgtgaactgagccatattataaaaggcaacttacttctctcttttttctaggaatgtcatttagctacttcttgcctagtaaaggatcttacccttagcttattcacactaagctattggtaaatgaggagatttgatacatgatttctctctggatagttttggctttgtttgttttaggtcataagatgaggaaagtctggaaattcaaagggataaacatcaatgaatacgaactgagagagatggagactaatttttttttttttttttttttgagatggtgtctcactcggtagcccaggttggagtgcagtggtgcaatcttggctcactgtaacctccaccttccatgttgaagcaattgtcctgcctcagcctcctgagtagctgggactacaggcacatgccaccacggccagctaattttttttttttgtttttcgagacagaatctcgctctgtcactcaggctggagtgcagtggcgtgatctcggctcactgcaacctccacctcctgggttcaggcgattctcctgcctcatcctcctgagtagctggtatcacaggtgtccgccaccacgcctggcgaatttttttgtatttttagtagagatggggtttcaccatgttggtcacattagtcttgaactcctgacctcaaatgatctgtttccctctgcctctacctcccaaagtgctgggatgacaggtgtgagccactgtgcccagcctaacttttgtattttttagtagaaacagggtttcgccatgttggccaggctagtgtcaaactcctgacctcaggtggtccacccacattgctttctcaaagtgctgggattacaagcatgagccaccgtgcccggcctaattttaagtgtcagtattttgctcatgggaagtaatctgtaggtaggagaagtgtcacaataaccataaaagcacagaagccacatcattcttcaggttgtccccaggggctgccaagacaactttgagtgcacggctaaaatctccagttaactgacaacttctgtaattaattattcctgtctccttcaatcatgcagcaattagattttcattacctgtgaaaaggtcaacatttatttgctgatttttaagactggagtccattcttaagttacttcgtgtcaaggaagatggatattcattcacactaagctgatattaacatcatgatggattttgaatgtctttttaataagtcattaatatatttttggaaatttcttaagaatttttttccctagtttctgaaatcttagcttgatgttttggaacaactaaaggaatataaatataagagttttttttttctttttactgtggtgacataatttgttttaagcttcatatagctaatagcaattagtggaaattagtgacttttgggactctttcaagaaggacacagagacctgcatgtgtcagggagaatctataggtaacaccttgtactacagccaaatcccctttcctgtctccccttttccttatacaacctgggctgcactaatgattaactgtttcagatattgggcgttcatatattttaatgctggtaaaaaatatttagaaaaactgttcacaaaagtagctgcacttgaagtagcaaattaactaaaacaattacatatattttttttttcaaatttagtcagctaaatatttgaacacttaatcttccctgtcttttccgtttgggagaggtttggccttcacttttttccccccttaattccttcagaagaagtagtctagtccttattttcaaggatttcaagtaactgaaaaccaaatctttcgagcaagatggacttaattttaaatacacattagattaaaataaatttaattttgtaatagcaggatgaattttcactaacatttttaaaggtatatgaaaatggactattagctttccaaagatgctttaaatgtttttttgttttctgatcctgactgttattataataacaaaataactggtcagtaagtaatcactctacagttttttaaaaaaaaagaaactttagaagagaaattcctgtggaaattagtaaaataacagaatagagatataatgaagcatatatatttattttgtcttttaatatgatatatgatagggatttgctctaacactcttaaggcatgagcaaatgaatactttaaataaatcatcccttatacacttaagtaattgaagaacaattttttttctcaaaactatcaccagcatgcatgcagttcagtgtgctatagttgtttggtgtataaactatcttagtacagttgaaaactgtaataatttcattacatatactttgcataggtagctaagtacgcctgaaataacatttatgaacaggattcccaggggtctggaaaaattaatgtgagtttttaaatgtgttcaacttcttgcagagaacagccacctcctctgtgactgaatgtcttcaacattgtgtggctctcacagtgcctgttgtacaattgtaagcaaccacaaaaaagcttacacattcaagaagttggataatgagacatatttatcactaaaatgctaaaattaaaggacaatagaattgcgaagatactcttttctgttcatttaaaaacggtactggaggctggacatggtagctcactcctgtagtcccaccactttgggaggctggggcgggagaattgcttaaagtcatgagttcaagaccagcctaggcaacatagtgagaccctgtctctacaaaaaacaaaaattagccaagcacggcaatgtgtgcctgtagttccagttacttgggaggctgaggtgggaggattgcttgagcccagagggtgtggggtgtagtcaaggctgcagtgagccatgatcatatcactgcactccagcctgggtgacagcacaagacactgtctcaaaaaaaaaaaaaaaaatgggatgagattatattttgtctttgttctcaaagataattcatgttcctcatgaggataaacggtgaatttaacaaagattgtcgctacacccccaaagaaacaggccttaaaaatactttctaggtaataagtatttttgcacataggttaatataaatttaaaagaaaattttaaagagattttcatactttattttagccttcttaggccttagaaaatgcatctgtccaaacctttacataataattggaaaagaaaaaaagtggttaaaagaatgttatttttcaacagtttactgaataatgtttacacaagtaaaaagaatgagctgttaaccgaggacaaccttgtatattacattatgaaagaccagcgtagctttcttgccgtttatgaagttgagagttaattaaatgtcatggaaacacatttgtattatataaatcccttagatactctgaatagaacaaacatatataagaaaattttttgctttaagatgataccaccctctcactgatagcaaattcgtctaaattactcataacgcaaatgtttgtaatagatttcagcttgcctaagtgctacatatattatggcagatattttaatgaaaagcatatgaatagagaaagcataaccaaatagcattttgagaacctgaatgtgatgattttaaaaataaatgttgtaaattttgataatctaaggaagtctctatgagcctaataattgtcaacatgttatacgctttagtccagtttgtttccacatcttccaacccctgtataggtatcactttttatgtattactttgagtccttaccatgtgttagatcttatgctaaatgctataaatacattatttcgtttcatacttaatcctatgaggtattatttcatctaatacttaaccccattttaaagatgaaaagattgatgcttgaaaaagttaagaaatttggtgaagatttgctatgtccaggattctaacctgtgtgctacatttaactctaaactcaactgttaagctattgttcatttatattttaatgtttaatatttgcccttactgcatctatgcttagaattaaacatagattgatgtgtagtttattcttagggttctgaatgtaaacataataggaaaagcaagttcatttttagatgtttctgcttggcccaatcctattatcgaaacaaatcatcttacctttaacttcctgttttaaatgcttatttttaaatgctttatcattacaggcttttgcctcttgcctgctaacacatttataagacgacatccattgttttaattcactagttattaaatgctttgccaagaaaaccctcctcagccgggtgcaacggctcatgcctgtaatcctaacactttgggaggccaaggcgggcggatcacctgaggttgggagttcgagaccaccctgaccaacatggagaaaccctgtctctactgaaaatacaaaattagccagacgtggtggcacatgcttgtaatcccagctatgcgggaggctgaggcaggagaatcacttgaacctgggaggcggaggttgcggtgagccaagatggtgccattgcactccagcctggccagcaagagcgaaactctgtctcaaaaaagaaaagaaaagaaaactctcctccccacatcatcactgattggaaatggatttgtagagtcccaccagtattaactttctaatgatgcttacatgatggcaatgtattacttgtttttggtctttgacattttctgcaactaggcctacattcctgttaaagggtctcataataatcttatttgtctttttttttttttttttttttttttagtcatatggaaaaggagccagaaggaaaaacagatttaaaggatctgatggaagcacgtcatctgatactacctcaaatagttttgttcgccaggtaagagttttaagttcatggttttgataagtaccttaaaatgactttagatttttaaaggtgggtttcactcttttccttaagatttatgtagtatgattgtacttacttttaattgaagtgaagacggtgctgtttaatgtcataattaaaatattttaatcttaagtgagactaagtaataattacactctttcctggcaagttgaggaaagagaagtgtggcattcattacagaggatttctttgaaacagtgagagaactccagcagaaatgattatggatttggggggattgttttttttttttttcagtgggacagagagctgatgtgcatctgtatccctacctgtgagatactggggttcttctagttgagctttcttcttctcacttgggcttgcattgaaaactagaaaatcattcttggtcttgaaatggttgaggctatcgaggttaaacagaacatgcagtatcactgagacataatttaaaccatttctgcctttggagacatagccttcgtctcatttaatgtgtagtatcttcctgccaagcagcctggaacagtcccctaaacagacagtgccaggctccctaacatataaacacgcttatatatggtaacagaaaggaattccattaccagaggaagagcatagaggcagctggacctctgagggttgtggttatgtgttgagaatgaagtctcatcaggaatgagtgagcttgtttcttcctctaacccctctccatggggtggaaagtaggggcagagcatgcagcagagaatctgttcttgtggcccagggatgtccagtgtctgatcagtactctcatcatctcttgtcaatgacagctcactctacggaacagtggtagtcaactggaaaagctgcctcgtgtcatttggatgccactttccccagtgccgcttgagtccatcatcatggccatagattccacccctgccccctgtttgtgtggcaggactgtttcctataaatcctatatgaccttttgggttttatttttattggggacagttacatttccctagctgtctacccttattggctccttgtggcactccccaagtgcctccctcatgtttccttcccacagttagctgcagttgaacttgaacttgtccacctgcagcatcggtggggattttgatcttggctggttgctgcttctttgcactgtccttagacgaaggatgatctgtccccagccatcagtccccgcttgcaacatttgagtatgccagtggtacttccaagtaacttggcaactggaaaaaaactggtcctggtccgtgccaattgggaattgttgtggttgcaggaagtgagaaaaagagttacttaagaaggggcaaagcttttttggttagaaacatttagaaagaaaaaagatgaagccacgtgaggctcaaccctagagctatgttctaatggtgtcagcaggagctaggaaggctgtcagaggagtggaaggtgtatgcgttggcctcatgttttcgtgggcagaatccaggcatcatggtcctgctgatgaagggagggccttgggacatagtgacttgggagagtcagttaaaggaaagttacccatcgccttttccatttcaagctatttattctgcctctgagacaaagagattgaacctggagagctagagttagaatctacaactctgagtcatcatgcaggacctgaaacagaccaaaaaaaaaaaaaaaaaaaaaaacaaaaaacaaaacactagctccttagtgtgcatagtagctgcagtaaagcaacaaataatgccaagccgcttgttgaaattgcacggaaagaaaaactgatatgtttcaaataagcaagacataatgaatagaaacgaacagtgtagaacccgttattagtcatttaatccctgtagaaacgccacgtgaaggcagtcactggactccattttcaaatggtatttttggctgtgaattcctttttcatagagttttaataacccaattcacatggcaaggagggattaccatagtgtgtataagtaaactggaatttgtttttcttcacggtaattttcttttgtgttcttagtaatgtatgtagctttaaacaccattataagtgataacaagagttgttaaatgatttaatgtaaattttagtatatattgccaaaacatacataagcgtgtaagaaggcaaaaccaaatttatcccaaagggtaaatatacaggtctgtttcctagaatatcaataggacgaggtgtttgctatggcatggcttttggggtaatgattacacaggcgtatcattgaaaaccctcaaatgctggcttgcatctgtcacaaaaggaaaactagcgtctttggcaagaattctgagttaaaagttgtatttctcctttggtaatttaatctctattctgttaaaacagcattcccattttgctgccatttgaaaataagtaaaagctgccataagatagccagatatttaatagaaatggtttcctggagtgtttgcaggaatgcatggcagatagtgacaatgggcacactagattttacttatttatttatttatttatttatttatttatttttgagacagggtctcactctgttacccaggctggggtgcagtggcgcgatctcggctcactacaacctctgcctcctgggttcaagtgagtctcctgcctcagccttgcgagtagctgggattacaggcacaagctactatgcccagctgatttttgtatttttagtaaagatggagtttcaccatgttggcgaggctggtctcgaactcctgacctcaggtgatccgcccaccttggtgtgccaaagtgctgggattacaggcatgagcaaccatgcccggcagcatactagattattaagtaattagaaaaaatacctttacatgttgttttttaaagtaagtgtatgttttttaaacaagtgacttgcatcgacacatattgcgtacttgtctgtagctagggaacatatataattggtattacaaagatatttgcccaatagaattttgttttaaaatatcttgcagttagagtctactatagccctttgattaaaaatagttcctatataattttaaaaaccttagaattttattgttataaacagtatatgatttgaaagaaatttaaaaagtaaaatattcagaaacactaggtatacttttaggtagtctttataataccaagatttaaaagttttagaggttgataatgtgaaaatttgacataaaggaaaggaattaagaactttaaaaaaaaaaaaaacaacttggagaatatcagagagtttgttaaggaataaattgtcctcctatccaaccctcaaattcatctttagaagcgcagacacccagtgtgactatatttggagatgaggcctctgggagtggggctctaattcattaggactgttatcttttttttttgtttttgttttttgttttgaggtggagtctcactctgtcgcccaggctggagtgcggtggcctgatcttggctcactgcaacctccatctcctgggtttaagtagttctcttgcctcagcctccccagtagctgggattacaggtgtgcaccaccatgtctggctaatattcgtatttttagtagagacagggtttcgccatgttggccaggctggtctcaaactcctgacctcaagtgatccacccgcctcggcctcccaaagtgctgggattacagacatgagccaccgcactgggctgttatccttttaagaagacaaaaagagaatgaggttgcatgcacacagagaaaaggtcatgtgaggacacagtgaggaggcagcagtccgcaagctaaggcgagagaggcctcaccaaaaagcaaccctgctgacaccttgaccttgggcttttagtttccaaaactgcgagaaaattaattattgttgaaaccaccctgtagtaatctgttatggcagctcaagcagaccaatagagattaatatataattaggcttgaaaatgggccttttaaaatcaaccttcttattgatcatgtaacatatatgccaaaaagtgcacaaatcatgtgttcagcctggtgagttgtcataaggtcaacccctgtggagccaccacccaggtaaagaaataagcattcagcctcacctgtccccttttggacctttctcaatcatattccctctttcctcactaaagataatcaccatccttacttccaataccatacatttgttttacctgtttttgcagttttatgtaaatggaatcattttgtatctgaattctttcactgaacattatggctgttatatttatctatgttggacattttagtaatttgtggattgtctttggttgattttggtttgttggtgtgattttacagcattccactgtgtggaaagaccacatttgatttatgtgctctactgttggtagacattgggccatttccagttgagggaactgagattgatgttcctatgcacattcttatgtgctcctttcatacacatatgtatgcatttttgttcagtgaatagagtggaatgctaggtaatatggcatgcctgtgttcagctaaagtaaacatcatgaaacagttttccaagatggttgtaccagtttgcactcccacaagcagtgggtgatggtttcagttgtcttacatctttgctaacacttagtagtgtcaatctttttcattacagtcagttttatgacagtgcagtggtagctcaatgtggtattaatacccatttttctgatatctaacccacaatttaactgtggctaggcctagggaacatctagagaacagagagagagaatgagagagagagggagagagagagagagaacatattatatatatatatatatatatatgtcaatatgccatatacataccatatatatcacattatatacatgaaaggttttatcagagcattttattactctttgtagtcaatttctcattagtcataattaattctgtagcaatttaattaaaattataaatattagaatatggtgaaacatatttgaatatattgtaacatcagcagaaaaaggctacaaagtaaaagggtaaaaagcatttaccagtggttttatctttccagacttttagttgtatagtttagttaggtaacgaaccttatctttaagaagaatcactggtcttaaggaaagttttcttcttgatatgtttctgtgttaggctctaaagcagaacagcagctaccttgaaagaatttttgcagttatatatagatgaaggttccattttgttaataaaccagttcaccattagttagtcaattaactagtcttctggcccttgacattatcaacttatttgaagtcagtgatatgttacaagaggattggggaaatgacatgccccatgaagttagttaattttcccccggaaactggattcatgttagcctttggggtaagggctgagtcttgatccagtagtacaggaaggggtctgtccataggggtcattggctgtgcgtggcagatgttagtgggatttcccatgaactgtgaaatatgaggttgctgttggttctattccatataaacttgttgtaaagtgataaactagctcatcttatacagtacatcaaatatttcaaagacagaatctgttcttccttgcagtttcctaaaacattaattggaacaaaagttaactgtgggctgggcgtggtggctcacacctgtaatctcagcactttgggaggctgaagcaggagggtcacctgaggtcaggagatcgagaccagcctgaccaacatggagaaaccctgtctctactaaaagtagaaaaaaaaaaaaaaattggctgggtgtggtggcgcatgcctgtaatcccagctacttgggaggctggggcaggcaggagaattgcttgaacccaggaggcagagactgcggtgagccgagattgcgccattgcactcagattgcgccattgcactcctgcctgggcaacaagaacgaaactttgtctcaaaaaaaaaaaaaaaagtgaactgtggtttatctgattgctttttaaatgtcattcttttaggttgcagacaaaaatgttacctaggtgcaatacatgatcacttatatactgaacgtataatttctatatttatcttttatgtaaattatgatgttataagatttatttaaacagttttcttcaagaagctggttagtggcgaacgcctggacttggaagccaggctacatgagtctgaattctggctttgctatttattagttggcctttggacaagtaactgaatctttctgtacagcagctttttcctctggaaaaaaaatgcttacctcaaaattaggtgtaaggattacatgagttatcacttgtaatttgtttagaaccatacgtaatatgcattatttaagggtttattactattatttgtaaatattactgcctatttgtaacattagttaaaacccgaataagaaatagactatggagagggaaataatagtgttcattaaatgcttactttaagttctgtctccccgtttcacagatgagaaatggaggctcagaggtgaagtgacttttccacagtcacgtcaaatgtaaggttggagtcaaaatctgagtctaagtgattgactccagattcttgtccttattggttatgctatacttccttgtagctaaaggaaatgaataaattataataacaatttcattctttcatctaaggaagacatgcagaaaaattcctacgacaaatacatagaaagataaaagttagtcttctacttttaacttccttctgtaccggaaagtgagaatgtcttcagcgttgtaaattttcactaggcatcatgatttttttttagatcggcataattcccttctctcatgaaaagttcctcagattcctagtttgtgatactgtttggcatcctccagcactcttgctggtcatgaaaagtggaactggaattggaggagcatttatttttttcctttctcccacaaaagtcataggaacataaactttttggaattctgaaagtcctttttgaaaagaaaaataaacagaaatgaaatcaagtatgaatcacctgttttgaggtttggcggaggctgatgtgggcccatgaatcactcctgttgtgaatctgggtaaagttaggcatatttatggcacctagttttacagtaacctcatttagaaattgctttccagttcataagggcttttgctttgtaaattgtcataattttaatttattacggagaacaaagtgttaaacataacctctaggcactgttattagaatgaatgaatattattttcaaattgtttatgtgctataagagattcaatacataaagctatagttatcttggacttgttattaagattattgcagctattgaggttgtcttcaattcccgtagaaactctttggctatgggttgagaacagatacatgaatgaaaaaatttcatttatcattgtaataaacctggaaaagctataattcttaatcttttgtatttagtactttgcacaaatttatagcctattaagtgaattagtttttcatatcacttcttttctcctaacttcatcaaaagaaaggaaaaaaaaatctctaagtttagttgtcttagaagtttattttagagccaaaatctaaacagataaattaacttactggaagaaaaataggtggggaagagtaacaagtcctgcttggcatggatgggtagaacatttgtgctgttcttttcaagagattgtgcaagaattgctaagtgtataaattctttgatgctgccaaggtcagggaaaaatatgtacatctgcaaataagtactggttatcaaagttaaagcagctttgatgaggggggaggtagaggaggcagtgttagtaactgccactgcttatttagtgtagttctgttctctctcattctctctcttcctccctccctccctgttttgtcttctttttcttttttgaaaatgtcttcattttcttaaagacatgtgttctccttggctacatttatgtacctggcagcattccaaagttgaacaccaaatgctaagaggatgactgccagctttgctttatttttatgattccacagcatggccattttcattgaaagtacattgtcatctgagctttctactctatgctcctgccgcgtatagcccggactcgcgaactgtttacactgatttttttccataggttgctgcgttgcacacttgtgtcctttgtgcagaaagttgagctttaggaatccacaactgtttttgggattttcaagcgccattgttctttggggttaacggggaagaactttgcaactgatcagggattttgctcaccaacatatgctgtggttgtaacgaaattatcctgtagcttctaacagcttctagaatacaaatcaggatgacaaaatggaatgaaccaaatatttaacagaaggttgcatgacactttcagaacatggtattctaaacaaattccgtcgtctctcagtaccttgttcttggtgctgcatttttggatcttttatattagttcaaattggctttaaatgcaaatgattaatcacagaggcacacagtctattttttagttttgttttgcaaagacagattaaactgcgataatgattacagactccaggcctgcgtagactgatatgtttaaggttggataaatctttcagcccttaaatactggcctgttgccttgttatgctgtatgcgtcacaaacacactataaataataattcagtagatttattgccactgtgatttcctgtaaatttctttttatcttattatggagtcacttagattttgtgaatggcagagtctgtttggtgtcctaagaactcatcttaaagatatcagtataaaaatattgacctttttaaataaagaagtcccttgttttttctgtaggataagcctgtatactattaaaacattttacttttttctttttaggagatataggtactttagaaagtattaaaacaaaatttagattttgcacttcaacatataattaattttaacatgtctcgttgaacataattttggggagaacaagggtttgattatagaaaaaatcttcctcattcatatattatttttaggtatttggaacactttataaactaggcttgattaagtgctccagttattaaaataattttgtggattgagatttttttatgtttgcgtatatacttttctatgaagatacatcattttaaaaccaagaattctttctgtagttacttttattttcttcaactctcagatatgctttgaattacactttccaccgatacctcattttcttccatttttattcatcttctgtttggttaaaccatataaagtcttagaagtcacgcaaactgaattaaccttactagattggttgaaagtttatcttgattatctaatataaagtaactagcataactaggaaaatagaatttccttaaattctgaatttataaaaagcatgtgtttcagatgaatcataaacttttaggagtactactgaagattacttacttagcttaaagttagttattcttgtgtctcaggtcttcccaggcatggcatctaaggtggtggtctggtatgatcaaagaatacttccctcttccctattctgtcacttatagatgtaaatatagtcagttcctttctctcttgttttgtttctggaatcttcacatttgatgattatcacatgctggagaagtcatttttgagggttcagtattgagacataatctcaaaaatatttgctatggcttagttcattaagtaagttttccaatttttgtctcatctttagtccgcaattgtgaccaagcatgtgtgtctgttacaaagacctgagttggtgaaaaaggaatggtgtctccccctacccgcctcagagctgatcatgctcccattcaccatgtatttattgcagttggaggataaagaagaggggaaaacaggaagataatccaagaaggatggaagaagctctgtagagtcttccattaattcatatttaggaaaatgtagtaaaagttcttcaggaagtccctgtcccctgccattgccttggccatctgtgttatccttccaaaactgtcatcaggttctagaaaattattttggcttcaagcctgacatctccattaatattttcttatatccttagtatctgtagaaaagtgccagcctccatttcttcttttgcatagagtatggggatcgtgtgattgtttagacttctgtcaaggttactttgccctgaccatactttctcctcttcctgtctcagagtctgaacactatgaccctaccagcttttccttcttggaaagcacatctctgagccaggggtcttctttctcttgtaggtgtaaccttaaagtttagtcctattcatgacccccattctcattgccatggaaagatttgttgatttcttggtggtccaggtgccgcatctgaaagttggaacatggcaaatctctttttttttttttataacaactgccccttcccaccaaaacaaacaagcaaatttgaggcccaggcaggtgaatcacctgtggtcagtaattcaagaccagcctggccaacatgctgaaaccctgtctctactaaaaatattttttaaaaattagccgggcatggtggtgggcacctgtaatcccagctactggggagggtgaggcatgagaatcacttgaacctggaaggcaaacattccagtgagccaagatcacaccactgcactccagcctgggtgacggagtgagactccttctcagaaataaaataataaaataaaatgtaaaaaataatacaatagatgaattgtattaatttcatgacagccatgaatagacacatgcatttgtacatatatgtgtgtcagtacgtgttctgtaacttttaggttttccttttattcttttctctctcatatttaaaaacaaggctatattttacaatgtaattatatacctaagtcagtatccttcacagtatgctaagattatttagaagtaattttatacttccatttctcatagcacattacctcatctattgagttcttgaagttattactttaagcttatagaaatttaacacctaaaagcatgagaaataaagagcctcacttaatgtttctctctgataattataaggagagctgaagcaaggagaaaacccacatggtaagccagaatgccctgctgtggaattattacttgtcaggaaaaaaaaaaatcgaggatctgatgtcatctctggctgatttgttcaatgacgcgtactcgttcaccaatgtgtggatcgtactgaagaacattgtttactcttttcaaggtctgatttccagtcatgctgctttctgaacagaatgtgtttaaggagtaaagtctagaaatctctaggaaatatttctctgtcaattagattattattaacatcagggatctgaacacgtgcattttgaaaccaattcccagtggattctctatgacctggaagagctcaaggggtcagactgggtcataaaaaccttaggtaagaaccagctcctagggaattagtaaaccaaggcatgacttacttacataacatcagccattcgtgaacctggaggaagtatgtgttcatagaggtgcaaaagaaagccctgtgtgagccgagaggaagtgatgtgttactctgaatagtgagcatagatagtttttgcacactgatcgcaacattgatgtaaaacagtggggatgcacaatgtgtttctgggatggtaaataccggtaggctcagattctgggttcatggagaaatggatagaagagatcgatggatgggtgcatggagtttggaagcttacaagggcaccaggccatgaaggacctccaagacaggatatatatgaagcagtgtgccggaggggatgaaaggcttacagcatacacagaggtcgaagagttggaaaatcaagcatcgtaaaggaatcatttgataaaaggtggtaaaatagtggacgcatgctgaccatgtgctagctactctagtgagtactttatttgatcatttgcacaactcagtgagatggatgatgttagtatccccgtttaacagatgatgaatgaagaccttgacagattaattaattggcctgagtatatatccttataaatatgtagtatttattatatcaaattggtattactcttgggaatgtttacgtgtttgttgggcaacaagagacttttcaacaacagtgatacctgagatctggtagaaaagggggtggtgattctagacccttagtgcaaagccactgaccatgaccatgggcatgaggcactaagtcttcgcccctgagccaggactttggcaataccttggaagagggttgcatcccaagagctgagttggcctcaggcagggccgcaacactgacatcaagaaatcagggggtcatctgtttcgtattgagcatatatcaagaaacagaggtgttcagttagtgaacctacagaaaggttatataggtgttcattggaccattcttttgctttttctaccggtttggaacttttcaaaattaatagtgtggtgcaggaggaagtggtagagtgggtgggaatggacaggggctaggtcaaataaagggcaggagttctgtgagagagaccaggaccccagagcagggttattaaggttatgaggttggtgcttggttgactgtgtaatctactgtggcacgtggagaagcagtgctttcactcatcctaaggcagagtggaattgtgggaaggggaagggagttgttggaagattccttagatgatgtcctgcctatctgcctcttcagagatgttttgagggccaaagggcaggactaaatcagagttgggaggtagaggttgatgctttctattggcaaggttattacagagttttgcagttttaaaaagatctttgtaaacttttacgacagataaaataccaccatgtgcaatcacaatgtaaacaggttttctactagatgtcaattgaaggtcacagggtttagagctgcagacagctgtttatcttaagtccctgttgtggctttttctgtgaacttatgtaaagccctttgaaccagtgccactgactaatagacgttttcccttgcgcagaagtggtcattagtggtcatataagttgaaaatcagccattctctctctgcctcaggccatttgtttgtgggagagcaatcgttgaaagaaactaggttatttggttaccaagagacactgccctttaccatgagtaattaccctcttttggaagaagaattggttagtgtgtgttagacaattctgcaggcaatgggtctttggggagatgtttacaatattcctagaaaagaggccaaaacaattttactaacatttttcattgtttctggctcttgcaattaatacaagaagcatgaacatcctgaagctgtgatctataaggcaaacgagataaactgtataataatgatggtagattacacgtagcctgatttcaaacccagatgtttcagcccggacatctgtgtttagtcttttttactcaaagcagaagaataactctggatttaggacttggaggtgtctacattttattatgaaactatttctctgaccgttttgtgtgcgtgtgtatgtgaaaactgcgtgggaaacaggccaaaaatacacggacttcctgactctgctagactttatttgtactaagttcttgtcatgggttcttactgactcattcattcatttattcattcattttttttcaccaacatatggagtgcctttgccaggcagtgggccaaatgtagaacaaaataacatggttcctagattaaaatattaaagtattgatgtactcatgatgtgaagtccagcattacgagttctgcaaaagagctgaatacaaaaatgtggtgggtacacggggaggcgactgattaattctactgttgggaagaagagggagcattgccaagaaagtcatatttgagctggatattgaagaatgagttgaaatgttctaggagaagaaattgggaaggaatgcgtcatccgagagctcatcctgtggaagggcagagaggagggatggaaagcgatgagttccatctgctgcggctggtggctggctgagtccagataggtacagtgcagccaactcctgaaggtgtcgatgtcaaaacagagagaaacgatgtcactgcacctgtgccctcttttggaagaaggcacaggttgaggtgcaaaggcacgatctatcgcccaggctgaagtgcaaaggcacgatctcggctccctgtgacctccgcctcccaggttcaggcgactgttgagcctcagcctcctgagtaactgggactccaggcgtatgtcaccatgcccagctaatttttgttttctaatagagacagtgtctcaccatgttggccaggtacaggtagtatacctgcaatatcgtgttgcttttctcaagaccactattatgccagggaagttgtttatacatcttttgaaacaccttatttacatataccaattctgaataacctgtacaggaagtagtctatcccagtaaacatcaaataagagtgtatttttatagcttgctctattagtgtggaacattttaaagggcagtatgtttattaacaaatgccacatgtcttttcatttcctttgcaactgacgttagattgaccatagatgtttacatttctatggtttgaagagttgtaagtttctgggtccaaaatattgtgttcatgttagattttagatcgaaagtagtctattaagaaagttatttagcttaaaaatcaggctgtaaatatcaattgatcttatattcgtaatatatatgactgtatatgtacaagtatacatctgtttccttctatggatgtctttaggtttacatttagaatgaatctagattacttatgtaaactaacgttattattaaggtcataagtatttctaggataaatgaacagtgacaaatcttaaaaattaagacacttcaatcctgattcaattaataataattcaattaataatacagatatttatgaggattttttttttgagacagactgtagttctatcccaggctgaagtgcagtggcacaatcttggcacactgtgacctctgcctcccaggttcaagcgactttcatgcctcagcctcccgagtaactgggactacaggcgtgtgtcaccatgtccagctaatttttgttggccaggctggcctcaaacccctgacctcaggtgatctgcccacctcagcctcccaaagtgctgggattacaggcgtgagccaccgcacctggccaagtttttgttttaatcgctaaactcataaatattcctagatatgcttaagagattagataccctttattattttgtggatagttacttgaccaccagttctattggcttgtgaagtctagtccaggacagaggagaggagagtaaaaaccactgagggccccaggtggctctagaatggagacaggagaaaagaacatcacactctggggactgttgtcgggtagggggagcggggagggatagcattaggagatatacctaatgctaaatgacgagttaatgggtgcagcacaccaacatggcacatgtatacatatgtaacaatcctgcacgttgtgcacgtgtaccctaaaacttaaagtataataataaaaaataaataaaataaaaaagaaatgcacagaggagggaggtgctttcaggcccctaaatcccctgaatctccaagtcttcccgtttcctctcccgctcattgagaataagactggaaatcctggaaagccctgggctggccctccagcctcccttgctactccacctgcaccctgttcttcaaggtgaaggtacctagaataattattagctgcttaaaaaagaatgaaatcatgtctttcacagcgacatgagtggaactggagggtattatcctgagtgaactaactgagaatcagaaaatcaaacactgcatgttctcacttataagtgggtgggagctaaacaatgggtacatatgggcataaagatggaaacagtagacactggggcctccaaaagggggaagggtgagaggggaggggagggtcgacaaattactcattgggtactgtgttcactattggggtgatgagttcagtagaaacccaaaccttaccatcatgcaatattcccatgtaagatacctgcacagatattccctgagtctaaaataagataaaaaacaataaaggataaaggcacaatgatacagcctcggggaggagggccagtgaggggaaaatgttcaccagtttccctcttactgggctattcaaccttgcatctcatctcagaaatgctcgcatcgactgtgaaaaattgtctttattttattcgaggccctgcaactcagtacctgcatgatcgggggaagttttatcaactccaaatctcagctcctctggaaagtgaggataataatacagaatggcgcagggggtagccgttggggggagaagtagttcagcttgctcataatctctatcatcacaaacaaatctatagtttaaggaaaaccagaacattctccaggtaagtgtaaatgcagctttaagacacgtgtcatatattcaagcaattttacagccccagtgaaaaccctgtgtttactacaccagtgaagcttctcagtaagttccccgaggtcacccccgaccccaaccccattgcaagcagtttgttgccttgaaacccctttggtgtggaaattctggtgaagccacttaggatagaaacctctctatcttaatgagtaatcatgcagacattctatattccctattgctgggttttaaaaaaattgttgtttgtttgcattttttgttccctttttacttctcctgcaaaagcaaacactgctggacatgatggctcatgcctgtaatcatagcaacttgggaggttgaggcaggaggatcccttgagcccaggagttcaaggctgcagtgagctatgatcaaacctgggcaacagagcaagaccctgtctctaaaaatataactaaaagaaagcaagcttgggaggctgttaatgaggctggaaggactgctgctgaataaaccaactagtaggagaagaattcttaatcaccagataactaagtaattttccccccaaaattgattgagccagtatcttacttaaagagccttcattctgcaaaaacagatgatttcttgatatcttcatctagatttacatctttcttccttctttgtgtgtgtgtgtgtgtgtgtgagtgtgtgtgttttgttgctgttgttgttttatggagtaaggagctaaattttgaatatatgaagcacctcacactgccacttttttgttctctgctctcaggagctaaacatccattttgtccattaaattttccacattttactgaaacatttgaaaaccaagctctaggctctttttatcaatggttatttttcttctgatgccgtgtgatcctggaagatggatttagggcatgtaatggaaaattagctagattatagaactctgttttgaaaagcaaatgtattattttcccaaatacaagctccttgtgaatgatttttaactgtggttccttgacataggccaatgatgttgatttgattaaggcttgtgtttccctgcaaagaccttataaaatctacttgatcttggaactttttaatacagtctaacagccaagaaatttttaaaacaactgttttcttctgtttagttcatttataatcctcatcttattaagtatacataataaatggtggctagctactagcctaaataaccttattatactaataatagctgtaatagcatacaattacaaagaaaatcgagcatgatcatactgttgcattggtggtaatttaaaaagaaactgattcttcttttttattatatttttggcatatatatttttaaaaaaaataagtttaatttaaagatgatcagaagtcaatggtatagctgtggtttggtagggctagaaaagtcttgtgtacaatgagtaattcttttgttcaggaaagaatttacatgtttaccagatgatttaacttaaaatatatgctactctcattcttgttttatgtttacaaataggtttcttctgattacaaaaggcatataatactcccttgaaaataacccagaaaataaagattgcccattacctcacaacccagatctatttacattttaaaataaaatgtagaaaattagtgataacaggcataattgtacgggaaaaatattgctctctgaataaagtcatctgagttcaacctcaatttagagtactttgcccattcacttttaggcttttgaccaaatgcttatattttgtaaggtaggtgtttcatactaggtagcggagattaacactttattgggaactcatacttcttgggtcacagtgtcttcttgcttgtcacttgtagttacagaaccaatcttcccactttttcacatccttcccccagaatttccctatgctgatcgtctaaaagagggaaaacagggtacatcagttagaattctctgttgcaggagaccacaaacatgactcaggctggctttaaagcaacaaggacatttatggactcatgtaactgcagagcccagttgtcaatagctcattgatgtcattgggcagctgatgtctttccatctctggcctctactgtcttccatgttggtttcattctcagctctaggtgatgacaagatggctcccaacagctttaggcccactttcttcctggttcatactgcagtgcacctcattggctctggttggatgatggcatgtccatgaactaatcactgaggctggggatctgtgacccactgatgggcctggcccaagccataagttcactttagaggtgggagaaaaatcaactccacacaaggctaagaatgaggaggggtgttccttctcagagggctatttctggaggaggaatgaatggatgtaggatggtaacaaaaagaactgaggtccactttacagaatgaatgaatgaagttgacctgagagctctcagattcctacagatggcttaagaaaatgccagactccagggaaaggtgaaagaataagtccttgccatccctccagcctttttcaaactatagtgcacccttttctatttagtagaagtggattcctgatggcattgagagtgagtctgtgaaaatatatcttcctgggaatatacgtgtaaatatactggcatcagaacatgcattcagagtcatgtgtactgcctctatatttttaaaattttcaattcttagtcttcgtgataaaaccacgccccactgccattaaaaattagaatgttggtgggttgtgtgtttgtgtgttgaaaaacccttgtgaggacaagaagactaactaaatcaaatttttatagtcttaatgacatttgagcagcactgacgtgctagagggaaaacagttatgttggttttagaaaccaatacgttgtattcttgacaatgctcttttaagcttgattatagtattgtcacattttaccacaatactagacatcttagagaaatttaataacatgtttgggaatcttactaattgggggaaattaacatattaagattttccatatattttttaaagtaatgataattcttgcatggaatcttaattcaatggaagagaagattcatttaccgccttgcaaggtgctcaagaccgtgtgtgctctatttggtaccgctggctgcatcattaaacgcacactctgcctacctgcagagaaaatcgctgttcttgttgtttttagatctttgtagtcataattgtccattatgtttaacagcactggagattttgcaagtggaattgggtagatctgttaaggacattcagtcctgtcttctgccaggcattagggtctcttctagcatgtttcactcaatttctccagccaagaaatgtagggttattctttggaaaggggattgtgataagttaggatattttggttgtaagcttcagaatcccatttcaaagttgcataggcaacaagagatatgttgccacccataactgtaacagtcaggggtattcctgggctgggggcaggatgctgcctggactgtgtctcccccgcatgggtatttgattctctataacccaaaccagatttccccatgcaggcagcaacatggcagttggaagctccaggctcccttcttcccggctttgatagcagaaaaaaaaaaaaaaaaaaaaaaaaaaaaggctatttgttcttcttcatccttcttaattccagtttaaaaaaaaaaaaaaaaggaaggactcttatttgactcacttagtttacacaccaccgttcacacaccaccgtttggactcatctgtttggacaaggatgaagcactctgatgaaccagttgggatcaagtaccatcagagttggcagcagggcacaattctgagtttaatgcagaaaggagggtgggaattgttacccggagaagtcaaatacaataaataaagatgttgggcaagcagattattagtggcaataacacacttctgttattacatcaatgcttacatcagtgtctgcccctcacctcccaccccactatgtgcagagcaaaagctgacatttcataaatactctgtttcttctctgtggagctaactgatcctcctttaggcatatatctagatgaatagtagaggaaactaagaaggtagaaagtctaggaccgtgcgggattacaaaaccaggatcttggcatgtttcaagggcaaaaagtggtggggcacagtgtcccaggcctgtaatcccagcactttgggagactgaggtgggagaatcacttgaggtcaggagttcgagaccagcctggccaacatggcaaaaccccgtctctactgaaaatacaaaaaattagccgagtgtagtggcaagtgcctgtagtcccagctactcaggaggctgaggtgggaggatcacttggactggggaagtggaggttgcagtgagccaagatcatgccactgcactccagcctgggcgacacagcaagactccttctcaaaagaggcaaaaagctagcacttccatctggagagttgattggaaatgtttttctcttctcttgaatcttcactgtttccctgagatgccatttgattgtgttttctagttttccacgcattgtttttttgtaattttttttcaaactgtacaatatccctgagagtagggaagaaagagatgttcagagttgaaggtgtcagagctaggaagtggcagagactggatgtgaaacccttgtcctgtgcccattagcccactccaggctgcccttgctatccaggttttattaattttagtgtcatcagccttcactgcgaaaagcctacacctattttactttattttcagtggatggtgtagctaatggacaagtataagactagcatgtctgtgtttgtcctgcatgtaatgaccagaattccctagtcattatgaacaccaactccaagcctgaattcttatccacgctcctgaactctttagtcatcacacattgggcaagttacttaacccttgcgagtttcaattcatcttcaaatagggaaaataataaggcctttttttttttttttaaatggagttttactctgacacccaggctggagtgcagtggcacgatctcagcgcactgcaacctacacctcccaggttcaagtgattctcctgcctcagcctaccgagtagctgggattacaggagtgcacaaccatgactggctaattttgtgtttttagtagagatggggtttcaccatgttggccagactgatctagacctcctgatttcaagagatccacctgcctcagcctgccaaagtgctgggattataggcatgagccattgcacctggccataaggcctatcttataaagctattttgagaaatgaaagagatgatggagatgaaataaggataacttattaaatactctttaatgggattctgacacttacaaccaaaatgtcttaacttgtcataattgcctttccaaaggccatttgtacattacctagtgcatggtaaactctatacatgttggctcaaatggtactaataaaacatccaggccggtggcttatgttaggatggtgtatatacttccaggaaaaccacaggtgagagatgtattcctggttgagagattttggaaccttttaggaatgaggttcctgagagctgaggctgtaagaactttgagtatagttttgacttgtttgagggtgggtttagggttccttacaatatcaagtttgtggtttaattttttttgctcttggaattagcattatataatgaatcactgtgggttctgaatatagagagacatttctacttcttctaaccttttagtatgatatgttttctaagcctaaaaggcccaggacattgtatgttttgttgatattaagtttgtatctggtggtagggctgtgtctgttatatttttgcaggtttttaaaatgcttggccatttagaaacttttaaatgtttagattttacgtttctataaaagtgccacaaatactcctgcaaattagtaagttcagggaaactggtggtaaaatgttggtgagtctcagatggcctttattaaattagtactttattggtacaactctagtaacaaaaacttatagagagtgaaaaagaggattcattctgtaagaggtaatagaaacagactgttctctaatatttccttttaaataatttgtaaaaattttcttgtctttgcttaatcttaccattgtttgaaagaagtgaaaacttagcacctttgaagatgggagtttgagacatttccttctttccttacctccctccctccctccttctttcccttcctttctccttccccttccccttccttctcccctccccttcccttccctccctccctctccctctctctctttctctcttttccttccttccttccctccctccctcccccctcttttcttttctttctttctttttttccttccttcctttttctttctttctctttttcttttctttctttctctctttctttccttctttccttctttcttgagttttgctcttgccgcccaggctggagtgcaatgacacaatcttggctcactgcaacttctgccttcagggttcaagcaattctcctccctcagcctcctgagtagctgggattacaggtgcctgcccccatgcccagctaatttttgtatttttagtagagacggggtttcaccatgttggccctgctggtctcgaactcctgacctcaagtgatccacccgccttggcctcccaaagtgctgagattacaggcgtaagccaccatgccgggccaagacattttatttctgacttgagatttgttctgttctgcttgattcaagtattacagacaagtatgtgtgccagatgtctgttctaacatgagttcaaatttaaatacaattcagatttctagagtattacctttacagttttccctcaactaaaaaaaatgtttaaaatactaattcattggaaagaattgaaacttaacttttcactttggttttcagacagaaaaatttagaaacacaaaattgaagaggattatagcagcactaacataacaatcatttataaatagataaataaaataacacttaaatctgttctgttagccactttcaaccagagattaacaagactatttcatgtggctgacgagaattgacctctctatggtcttgtttaaaagtcttcttaaatagacgtatagaatcttaggatattccaggtttcttaatgttagaaacaatataattatgttggttactgtcaaaacttgcagtgttgtttgaaatatgtatttacagcaacagatagtcattgcgtctttcgttgtccacactggtaccagtttggtactgaggcatctgactaaagacctcagagaagcaccagaaaatggaaaagaaagatctgcccccaaatacgcagctggccacctttttgctactagtttactttgtcgcatataaaataacgaagacagatgcatgtcaaaggatgtgcgtattgggtcagaataaaaacatgcacaattttttttatgaggaacactcgttttatgaaagttcacaggctcttattcacttaagtctttagaaatttgtgtctctttgtctttcacacacacacccactgccagggatacagggctccagtcttccggcttcttgatgaattttttttaagtacttctttgagatggagtctcactctgccgcccaggctggagagcaatggtgcaatctcggctcactgtaacctctgtttcccaggttcaagctattctcctgcctcagcctcctgaatagctgggattacacgtgcctgccaccatgccctgctaatttttgtatttttcgtagagatggggtttcaccacattggtcaggctggtctcaaactcctgacctcaagtgatctgcccgcttcagcctcccaaagtgctgggattacaggcatgagccgctgcacccggcctctggctttttaggttcagaacattttcccctagaattactgtggtggtcaatagaaagaaagcccattatacgtatttatggtaggaacctgagagcagtgagtacttgttcgtgtgtgaaagacacctacagcatgttgtaactagactgaattctgaatgcagcctgttatacatgagaatatttcattcctagtatcatttctagtatgccaaagacagtggtgcgcttccattcatgaccacatagtgctcaccacacaattgtaccagtgcatatttggctttgtacaaacaggattaggacaagaaaattaccagttattgcgggggtcagtaacccaccaatataaaatagaagacactgatgatggtgaacagtattatgaaagagagacagtctctgattccaggaagtttactgttttaatgaggaggtaaaatgtgcacatgatgtatttaaaagaagaaaatgggaaggctttaaatagggaaatagagaaagtgctctaggagtttagtgtaggaacatattgttcttactagggaatcacaaaagcattgcagaagaaattaaatgtgaacctccaacagtggggatgggaaagatgggtgttctaggagtggagaccagggtaagtgaagctacagaagagggaaagtcacaattcctatagttgagcaatatttttcctggcattgaaggaacattgaaagtgattggaaggtaagtctgtgaaggtgggttgtagcaaatggtggagatctagaatgccaaatggaggttagcatttacagggtgcaagtcaaatggtctccacgtaccagcttccatgtgaggaccaccatagaggtgctagcctatgggcagccatgtttcagagaatgctgggtgggcaggcatggttcagttgaagaggtgaaggatgtggggatagtagttcactgcagttcggtgtttcaggggacattgagaaggtatgcggggaatgagtgaagataaggaagagatgagtgggacttttggttaggggtacagaattccagaacttgttagtgatggcagtgagaaagcgtatagaggtgagggagggaggtaccctccacattttaggtagtgactgagggaaagtgttgttttcactgtgtagcctcaaccctaaaccctaaggctggggtttaggttgcaaagacatttagcaaggagaacatacagaagcagaagtgcctgttagagtcctacagatcacccatcaaatcatgtgcatatacatgtagtaaaccaaaaagtgactgaagcagatctcaatccatcagaagtgtattttaccatagttgaagatgcacctgagaaaaacaaacacgtgcctcagtaggatctgcaacctatgctttatccacagagggttttgggatgttcagtatttaaccaagaaagaggctgggcacagtggctcatgcctataatcccagcactttgggaggccaaagtgggtggatcacttgaggtgaggggtttgagaccagcctggccaacgtggtgaaaccccgtctctattaaaaatgcaaaaaaaaaaaaaaaaatagctgggtgtggtggcaggcacctgtaatcccagctcttgagctgagatcacgccacggcactccagcctggaagacacagcaagactccatctcaaaaaaaaaaagaagaagaagaagaaagaaagaaagagcaagcatttggggaagaaaaagaaaaggaggacaggcaggcagtgaggcaagcggctccatcttggtaggctctgattagcactcagtgaatctacatgttacatgtgcaaagaagagtacaggaaaagccaattttgcattcttctcttgcttggttaatctacattttaacatgttacataagataaagtaagcatgtggaattacagctatttgggaacaaaaaggaaggcagtttttgtgtgactcagtttctaagcttaactttccatttggcatagtgagtttggggtgccaagattctattttcctttcacagtatatacgtaggtattcaagaggcatatcatatgcattttgcagctagactcccatccactggcacagtgaccatcctgggagaagatacaggcatgaagctgattgcagaatagtggtgtctcctctcatatctcggttttgcattgggatgcatacttcctgaagttctccttttcttggcggttgctactgaggatatagagttgaattcgggtaatgtagactggagtatgatgcgactttatcattatctccttaagtcataagcctgtagggattggggactttaccgttgaaatgagccttttctttttctgtgttttagtgatgtttgctgccagagatcttcagagagatttaaaagtcattttaaatggcacttttagcattaactctacctattaggctttgttagagcctaatcttctcagattccttctcattcaagaaatgttgattaaatatctgaattgtgcatgtatatcataatttaaatacatggtaaatactgaaaatcatacagagattaatcagatagaggtcctgttctcaaggatccagttgacccacagatttcttcttttttgattccttttatttttattattttttttagcttagagaaaggtcacacaaagatagtgatttgggagaaggttcttttccctatttgcttgtttcatttagcatgggtgatagaaacatctttgggtaaaagcaaacatctggcaagggtgcctcttagatggaaggttgagcagatattcggtgaaatatgaatcagtgttcctgcttttgctacgttcaattctgaagtttgtgttgccatggggatggagactgccaggagagctgccattagcaagtttgtttgaaactctgtgaacccttgagccccagggaagagaggttggataggtctggtaatagacccctgggagatgcttgggcatttctgctgccaaaccttgtagggacagggtggaggttgaggatagctgaaacatagagcagaagttgggtctatagaaagcacttgagactctttttttaaagaggcagaaaccttccagcaggtctgtgctctgggtgagatattcacataaacaaattagaattttctaggccttactgcggaacaggcttttaccagttgagtaaccacaaacgcttttattgcaatgtaaactaaacactataaaataaatgtcaataactttaatttttttctactttttttagcaaaaggaataaccctttagcagaagactagtaaacatatatgaggaagtctggacagaaaaagaaagggtttataaatagcagacatagcagcccttgctatctgagaaattgttgtagggaggtgatagctttcctaagaccactaataaaggtcttccgtgcctctgggtaaaagggacagtgagtcagttaccctgctcttgttcctgtttttctccctgcatcccaccccaaccattatgttctttccatttagtctgtaacttacctggtcattgctgaataaaactttgatttttgtggtcaggttcagttttttggaaccaaatgattctgaaagtgctatagtaatacatgcatgtttatcttttcattaaattttttaggatcttcgggtaaagataagctcaaatcagcagattttttttttttttaattcagggatttcttccaagtgcttaatttagcactgtgtgctttagtttggtgtttaactttttgtatgatgcctgattgcataccggttctttccttttgcttgtgagtaaacacgtgcatgccaatatttaaaatctgctttaaacagaaagaataatattaaaactctttcagttcagacaagtcactcaaactaaatttcctctccagtagtctaagttgtgaattttacctttcccttactagcagaattccacttgtagctcactggtgacagaggggcgtgttatttttcatagtattctccttggtatagatgaggcttgcaaaaaggacgtgtcctgaagattccattcctgtgcttatatgcactagttggcatgactacaggtctgcttcctctgctggctggagctggggctatttatagtttctcttcttggcttctgatttagcgtatcagcgtgtatttatgcaagggagaactccgaggccatataagactgtagtttagaaacctactagcctcatttgccttttgctctctggagggagaggaatgatcttatattttgccaacatagaactgtagcaggctggaggggaatgacataccgcacatcactctggcttctctgcaacagacagaggggtggtctaagagcctgtgatggggccatcttcccagatggaaagactattcgatccattgcactagatgaaatgtttaactcctttaataagtaggcagtacttcaaatctccttgtctttttcttttacgtcaggcaggatgatataatgggagaatgtggactgggtaaggctgcctttttttttttttaaggctgccttttaaccttgggtcttacggtcacaaatcctgttgcgtcgcagaggtcaacctccctgatcttcactgtcttcatctgcaaaatgggaaaattgtatccctccctcatggggcagttacgaggattagggacagtgtaaaccacacatcaatgtctggcacagagcagatgctgagaaaatcctgaaaactcagtcaaagaaatagaagaggccaggcgcggtggctcactcctgtaatcctagcactttgggaggcacgggccggcggatcacgaggtcaggagatcgagaccatcctggctaacatagtgaaaccccatctctactaaaaatacaaaaaattagctgtgcatggtggcacatgcctgtaatcccagctactcaggaggctgagacaggaacatcgcttgaacccgggagatggaggttgcagtgagccgagatcacaccactgcactccagcctgggcaacagagcgagactccatctcaaaaaacaaaacaaaacaaaacaaaaaaagaaatataagaaaatggagcagaggctattttcccctcaaggatttacattgaggcttttagccaaaatagaaaaaaaaaaaaaaaaagaggtcaagcatatcttgagagggtccatttctccttcccttttcttctgtctctgtccttggtatccattgacccagggtcaccttgccctctagaactgtgcatctgagtacatgcaagcactggaatgaccttacctagatccctactttctcccatgaaacttccctcttagcaaaagctagtccaccctcacactgcaaattttaagacattctcacaaatcaataagctgaatcttatttttctttctttcttcccattgacttaagtttttcacaagaagctcaatcttaatagtgagaagatgcaagactgtagccctggttaaacctctctgcccgtaaggaacttggtacccttccttatagaagtctgctaaagttagccctttgagaaaattacctatttgcagtactcttttgccattttttgaaaaaatggccggtagtcagagttttgaaatttgaggataacttttttattttattttattttattttattttattttattttattttattttattttattttattttatttttgagacagggtctcactctgtcacccaggatggagtgcagtggttcagtcatagttcactgcagcctggaactcctgggctcaggcgatcctcccacgtcagtctcccatgcagctgtaactatgggcgcatgcaactatatcctgctaatttttgtatttttttttttttacagagatggagtcttgacatgttatccaggctaaccttgaattcctggcctccagcaattctcccatgttggcctcccaaagttctgagattacaggcgtgatccactgtgcccggccttgaggtcaactttaaacagcttccaaacaaatcctcagaaaaattagtgaccctgtggggttctcctagtacgtggcttgtctgtgttgtgtgggctgattttggtaccaaagaataggtctgcagggcagtgaaagactatgaatctgaggaggaccttcctgggtcactggcagaaacagcctcccttgagcataccctaagccaccttccctttggcccaattatgtctggggtgtttatcaattttgaagtaagggccgggtacagtcgctcatgcctgtaatagcagcactttgggaggttgaggcgggcatccacctgaggtcaagagtttgagaccagtgagccgagattgcaccattgtactccagcctgggcaacagagcaagactccacctcaaaaaaaaatttttttttgaaataaggtagaaggggtaaaaatgtaaaatataaaaacgtaggtaacattttatagcaatccgaaaactttgagttcaataataattcattatgttgcaatttttgtaagcacaaaagtaacacatgcctgtaatagaaaatttgaaaaaggaaaagcatttcaggaagaagattaaaaaaaaaaaaatcacccaggcaggaggtggtggctcacacctgtaatcccagcactttgggaggcagaggtgggcagattgcctgagctcaggagtttgagaccagcctgggcaacgtggtaaaaccccgtctctactaaaatacaaaagattagccaggcgtggtggcgtgcacctgtaatccctgctactcgggaggctgaggcaggagaattgctggaaccagggagccagaggttgcagtgagccaagatcgcaccactgtactccagcctaggtgacagaatgagactctgtctcaaaaaaaaaaaaaacaaaaacccataatttccttcacctgaagcgttaacattattaatatcttggggtctttttacccaaatccttttatctcaatctcttacactcatgcatatgtaattattacatacatatacaatagctgagaaaatagtatacaaattgaattgtaacatctttttttttttaattaggagaagcagaggggcattgtggttgagagattatttgtgcagctgggcagacctgttggaatcctcattttgcagccaagtattatttgatagtggtggtaacttttcaaggctcttctttctcatctgtaaaacgcagatcccagtatcaacccacacaccaggattaaatgagatattatatgtgaagtgcttaggaccatgtctgccatatagtctgagttctctaaattatagctgaagcagacagctatcatcaggcttttctgcctctgtaacatttgttttctgtcctctccttctgcctgttcttttttattattttttttcattaaaaaactcctgctggtcatttaaagtctgcttcacattttgccactgtattagtccatcctcacactgcaaataaagacatactcgagactgggtaatttataaaggaaagaggtttaattgactcccagttccacatggctggggaggcctcacaatcatggtggaagggcaagtcacgtcttacatggcagcaggcaagagagagcttgtacaggggaacccctctttataaaaccatcagatctggtgagacttattcagtgtcatgagaacagcatgggaaaaacccacccccatgattcagtcatctcccactgggtccctcccatgacatgcaggaattatgggagctacaactcaagaggagatttgggtagggacaaagccaaaccgtatcagccacatatatggaagtgcagggattctcctagatgtgaacctatgggtgccctaggaggccgagtggtacaatggtgtagtggtgcatagtacaggtagttcaccgaatgccctaactttaatgccacatgccacctctgttattcactagctctgcaagcccaggagagttactgaattgttctagagctccgttgctcctctgtgcagatgaaacaattatagtacctatctaattgagttgttgaaaggattaaaagtgttaatccaagaaaaatgctaaaacagtgcccagccaaggttagctcttattaacagaacttgctgcactggggcattcatcttttaggaaagtatggatttaattttaatcatctttgtattcactctaaacttaccccaatgccagacctatggtagatgatcagtttatactcattgaactttgttgcatgggattaaaacctgcaagagaaagacaggacttcttgagatgatgacaaacctacagttctatttctgaggcatcatggttataggaagtattaagcacctaagtttaaaacagaaaaggaaatgaaaaatgctttttgtaatttactttttactttatgacaagtttagatttatcaaattattgtgaagatggtacagaaatctcataagccctagactcagtttcccctattattaacatcttgtataagtatggtacctttgttataattaatgaactaatactgatatactaaccaactaaagtccatactttattcaaattttctcagtttttccttaagttacttttactgttccaggaccctatcctaaatgtcacattacatttaggatacagtctttttaggcttcacttgcctgggacagtttctcagactttgttttttttttttttttttttttttttcagtgttgtgtatttgcttgtttttaatttcattcgattcaattcaattcaattcaattttaagttctaggatacaggtgcaggacatgcaggtttgttacctaggtaaacacctgccatgatgattcgctgcacatgtcgacccatcacctcggtattaagcccagcatgcattagctgtttttcctgatgctctctctgttgcccaggctggagtgcagtggcctgatgatggctcattgcagcttcaacctcccaggctcaggcaatcctgccacttcagcctcctgagtagctgggactacaggcatgcaccaccacgcctggccaatttttcattttttgtagcaacagaatcccactatgtttcccaagctggtctcaaactcctgggctcaagcaatcctcccaccttggcccatcccaaagtactgggattatagcgtgagccaccacacgcacttgactttgtttttggtgaccttgacggttttgaagattaccagttagatattttgtagaatttctttccattagtactttttaaaaattgagatatcattcataaaccttaaaattcacctttttaaagtatacagcaaacaaaatttaaaaagtttgttggtagcttgattctgttcaacctaaaatttattaacagaatcagatgagttaaattgtatacagagtatttccagataggaaatgtgttatttaaattccatttatctggtgagctcagatgcttctggtgaacatttatttgagcagggttataatgcattttggcaaaagcaaacttgaaggtcatcttggatttgctgttgccctggaaatgttgaaaggaatgaatttgttctggcatcttggactgttttggacacagtttctagcagggtacttgtttttatatactaactgaaatagtactgaggtcaatagcttgcatttggaaaacagaaatgaaaatacatcttttaccttgacaaaaggttggcaactgatggcagagatgatcagaaagtagaaatagggtgtgtgagtgggattcccatttgcgtagctttctttgcatacccagcacattcattcatttaataaatatttattctgtgcctaccatgtgccagaaactgttctcggtgcttgggatatggtagagaacaaagcaaacaaaatcatgttgtcatggagatgacatgctgatggtgccaacagagagtgaacaggtaagtgtgagtcaggggtgattggtggtttgaggaagtcatcgtaaggtgataaagaatggctggtgggaggtgttactcaaagaaagcttcttttagttgacatgtgaacagagacacaaatgtatatttgaataaatgtgtgtctgccacatggaagttatctttggaatgaagggaatataatttttctttattagaccattctcacattactataaagaaatacctgaggccaggcatggtagcgcacacctgtaatcccagcacttcgggaggtgaaggtgggcggatcacctgaggtcaggagttcgagaccagcctgaccaacatggagaaaccccatctctactaaaaatacaaaattagctgggcgtggtggtgcatgcctgtaatcccagctacttgggaggctgaggcaagagaattgcttgaacctgggaggcggaggctgcggtgagctgagatcatgctgttgcactccagcctgggcaacaagagtgaaactccgtctgaaaaaaaaaaagaaagaaagaaatacctgagactgggtaatttctaaagaaaagaagtttaattggctcacagttccacaggctgtacaggaagcatgatgctggcatctcctcagcttccggggaggcctcaggaaacttacagtcatggtggaaggcaaagggggagaaggcatgtcttacatgtccagagcaggagcaagcaagagagggtggagggaggtattacacttttaaagaccagatttcatgagaactcactcaggatcatgaggacaataccaagagagatggtgctaagccattcatgagaaatccacccccatgatccagtcatgtcccaccatgccccacttctaacactgaggattacaattcaacatgagatttgggcagggacacagatccaaaccatatcacttactatcatgtgttcaaataaaatcagtcaataaaacgaatggggcagcttttgtacaactgtcactatgtagcgccctaggggtttaatagtaagatacacattatctgcttccatggagcttatggccttgagcaggaacaggatgttaatgaattaaaataagcccatgggtgacgaaccatggaaagtgctaagaagggagggtatagggagctatgagccatgagaggggaatcagtctaggctgggtggtcagggaaggcttcctggtagaagtgatgcttgagctgagaggcaacacaggaggtagagttcacagccatcaagatgggtcaggaggaaggccagtgagtctgggcagcaggagtggggttaactgagaagaacctaccgtggggatggcagctaggagaacctcacttaacactgggcacattctgttattggaatttgatattcttcttgtaaatggtagtaagtgagcatacattaatctgaaaaagcccatccaattgacctgccttaacattttcagaatgtgcactatgcattagattttgctaagataagctaaaatatgctgttatgtatcaaatttctaacactttgtttgaatcaccaaaatgagaagaaatagatttacggcaatattttaaaagtgactgtgttagtaagaaaaagaaaggattctttttaggaaaacagattttaagtcaaaacatagagggttcttatatttttctttttttttaactatcatctagtgaaattttagagaaggcatttaactgtattatacaccatggtcctgagaggaaaaacagtctttggggaatgctttttaatctaataaaatgaattatctttgtttcaagctgttcttctagtacattcagttacttaacgtggtgcatcatcttttaagagtgttttcgatatgacacgctcagagtcaaatgactttataaagaccgaacgatgctcttgtgaaggatgcaaaaatgcctaatctctggccttcaaaatgtttctgcctttttaggaaaatccacatgtaattgtggagaagtcttaaatgaagggctgacaacagtggtggtggcgaacaaggctgagagtgatggcggcagtgtgggtttcttgagctgctgaaatattgtttggattaaggtagagagtaggatctgcttggtgacatttgtatactgttttgtatttctgttaattgacatcaacaacaaatgtaccaccagaaattctatttattattttaaatcttttaaaatagctctttcagagcttcagaatttttagcaaactttacagggccattttgcttgcttatctccttccttcctgccttcctgccttccttccgtcttgcctgcctgcctgcctgcctacctgccttctttccttcttgcctcctttccttcttgcctcctttccttcctgcccacctgccttcctgccttcttgccttccttcccagagtcccactctgttgtgcagggatgcagtggtgcaatcatagctcactgcagcctccaactcctgggttcaagcaatcttcccgcctcagcttcccaagtgcctaggactagaggtacacacaaatgccaacatgcctggctatttttttatagagacagggtcttactgtgttgcccaggctgctctggaactcctgggctcaagagatcctcctgccttggcctcccaaagtgatgggattataggtatgagcccctgtgcccggccttctttgtgtatttctgataattttttaaattatgaaaatagtatatgcttattttggaaaatttgggaaatacaggcaagtataaggagaaaaattttcaatcttataatgaaatcatctcgttatagcacatggaagggatattttgaatgaaaataggttttctctgattataaaaataatgtctacttagtatagaaaaaaaagacaattatatagtgagatcaccactgttaagactggggactagttctatgcgtgtgtgtggatcatactatgaaacttgaactcacattagtaccagaatagactctgagaagggataagaaccgcacttgagaggattgtctattgttatttatttatatttttgagacagggtctcactctgtcacccaagttggagtgcagtgtactgatcatatagctcactgcagcctccaactcctgggctcaagccatcctcttgcctccgcctcccaagtagctggtactacaggtgtgtactactgtgtccaactacagattgtttgtttttttaaaaaaaaattcctcaaagtagtttcttcttgaaaatcttgggcttttacagacttctaatttcataatttcagttgtggctttcagggctcttaaacgagaatttaatgctcatgaacgtgtcattaaaaatagctactaatctatttaatgagtaattcatatcaattgatgagaaattcaaaaataatatagcagaaagtgataaatgcacaatccacaatctcccagatattgtaagtttacattcttccagagttttttggatgcatgtatttaaattggggatatatgtatatattttatgcaaaatgacttcatattatttgcattgttcagtagcttattttcctgattaagttgaatactgtgaacccttttctattttgttcaacagaattttttctcctagcgtttgctatggcaggatactatttgattttgtagtagtaccatagtttaaatacttttttattataaaaattgtgttgttttaattttttcattattaaaagtagtgcaatggtgagcattggtgtcagattattgcctgaagatatctttttagaatttgaatttttcagcattaacagtgtgaatacttttcaagcttttgttacatattgccaacttttcctcctagaacactggaccagtttagatcaccactgcgttttccatcacatcttgatcaacactggatgttattccttgagatctttgcatgtttactaggcaaagaaaagtgattgttggttttaagttgtttcccgacaccctgggcaccttgaagatactgtgtttttagacagttgagttcataagtatgtacggaaagcccgtaagcaaatgctgttaatcttcagcacttgaatgatgatctcacagagtttggacaggcactggggatgtgctatggacaaagaagcaaggagctgattctcttacccccgaagcccttcatgggtggagctccttgagacccctggctaaatttagctcatgtccgcatcctctgcgtgctctcaataaacactatcagaaagggacatgctctctgggatttgcacctatgacccacaggcaaggagattcatccagtaatacagatacaataacgtaggttttctcagatacagagggttcaagaacatgatggcacaggggtcgcttccagtccctcagtgtattcccttcagttactattccaagaggagaggacccagtcccccacctgtcatgtattctccacccaccctgccccgagagtgacccttctgtgtaagaagacttggagggaatggtcatgggagacgtcctggaagaggcaaacaattgcttcaaacaagaattgaatgctcatagcatgctgttaaaaatagttactaatttatttaatgagtaattcctattcattgaggagaaactaaaaaataaatatagcaaaaagtagcaaatgcccaatccacaacctcccagatattgtactttgatgttcttccagacttttgggatgcatatattgatttatgtcctactgaaacctcatgatggaatttgatcgaatttattcaggccaagggtttgagaaggtggtagcagtaggagtgatgggaagtggagagatggggaaactatttcaagcagcatgaagagttcaagaaactccaggttaggtgttgacaagggaagggcaggaaagataagatgagtctgtatcagcaaaggtcttgaagccatattaggagtttgctccaagggcaatgggaaactagaaaagggttttaagcagaggtgtgatatcattagatttggttttgaaagatcatctcctgacagagcagagaatgcatgggaaacgcgcaagctgtgaataggctgccttagaaggttacagtaaaccaggtgcgggacaatgatgacgtcaggaactgggagagtgaaaatggaggagaaggaaaataaatggattcaaacaatattaggaggaagaaacagacaggactcagtagctggatatttactaagtgcttttatgtttcttttctcctttgacaattggaataaccctgtagataaatagggtagccattcctatctatattttatgaatgaaaatactgagattcagagaagctaaaggatttgtcccatgacacagagctggggaaggaactagaacttgacaccagctgccccccgtgtattgctgcttttgcagccctgtgcttcttgtttcagtgattgatgaaggtgggaagaagatcaaaacacctgtacatctagtttttttttctttcttatttttttccataagttattggggtacaggtggtatttggttacatgagtaagttgtttagtggtgatttgtgaaattttggtacaccatcacctgagcattatatactgtaccctatttgtagtcttttatccctcaccgcttcccacccttctccacaagtccccaaagtccactgtagcattcttatgcctttttgtcctcatagcttagctcccacatatcagtgagaacatacaatgtttgagtttccattcctgagttacttcgctgagaataatagtctctaatctcatccaggtcactgcaaatgctgttaattcattcctttttatggctgagtagtattcagttgtataaatataccacagtttttttatgcactcattgattcatggacatttgtgttggttccatatttttgcagttacaaattgtgctgctataaacatgcgtgtgcaagtgtctttttaatataatgtcttcttttcctctgggtagatacccattagtgggattgctgggtcaaatggtgatgtccacagtggtaaaaaggactaaagtgtgccctcatatcaatataaggtacaagtgaaatggaaagacttgaggcaggaatctaggatgctagataagtgaatcctgaaaaaatcgtctcctctgatctccagcaaatgcagaggcaacaagaacaaggccagacaaaggtacagtctgttgtttggtatagctttggatcaaagcaccagtggatttcatcacctgaaccttcaaggattctttgtctgtaccaggcaggcctgagtggcatcagacttacgttcattcattcattcattcatgtattataattcattgaagtgaaatttatgtaacatacaattaatcattttatttttattttaattaattattttagagacagggtctccctttgtcacccaggctggggtccagtggtgtgatcatggctgactgtagccgccaactcctgggctcaagtgatcctcctgccttagcctcacaaagcactggtattacaggtatgagccaccacctgtaaccattttaaagtggacaattcagtggcattaaatacattcacgatgttgtgtaactactctctctttctagttccaacacatttccgccacacctaagtaaaattccttacccattaagcaatttcttcctatccttcccatcccccaggccctggcaaccaccaatctgtgttctgtctctatggatttatttatcctgggtatttcatataaatgaaattagacaacatgtaaccttttgtgtctggcttcttttatgtagcgtaattttttaaaggaccacccacattgcagccatacttcattcttctttatgactgaatgatattttatagtattatcatcataatatttgtgtgccacaaattatccattcatccactgatggacatgggctgtttttgccttttggctattgtgaattgagctgctatgaacatttatgtatctgtacttgtttgagtccctgttttcaatccttttggatatatacgtagaaatagaattgcagggtcatgtgataattctttatttacaattcatatataattgtacatatttatggggtacatgtgatgttttgatacatttgaatacaatgtataatgatcaaatcagggtaattagcatatccatcacctcaaacatttgtcatttgtttgtgttgggaacatttcaaatcttctcttctagctattttgaaatatataataaattatataataatcctgtgtgtaactttttgagaaagtgtcaagcttttttttttttacagtgattgaatcattatacattttccccagcaataaacaagcattccaatttctccacatttttgccaacacttattattttctagtttttcgattatagccatcctgtgggtgtgaagtgcaggtggcttctttttattaggccattcctggtttccactcaaggaaaaggcccttttaatgtagaaggaaaaccaggcccaccttattatgctagctattagaaaagaaatctccaaggagatagattccagaagggcctctgcagggcagtactcccttctggaacccaaggctttactctcttggccagcatctgagctccccactctagtgtggtgggttgatgtgtgttttacctctgaggggctcactacagccctctctccttgaagatggagtgagctggtgggctatggaggagtgcttgtagaaaggaaactaaagctttctggacaaacagataaactcctagattcattcatttattcagtaaatatgtatgcatcctgattatatgctgggtactcctctgggtgctcatgaagcatcagtcactcaaacacatgaagcttgttgcttttgtgagcttccattctgcaggggaagatagacattgagcaataagcttaataaatacatcctatggtatgttaggaggtgataagtgctacagaaaaaaataaaaagaaaaagtagaccaggatagaaagcttctggagtattgggttggggaaagtggggtagaccttttggagaagctgtggtgtgagcacagtctggaaggagttgagtatgaaggattctctcaatcagagtttatccagacagagatgccccatgcctctgagctcactgctgtggttcctttcctgtcatctgagtccctgctcttccaggttttcacagtcatctcttgatgttcatctgtctccttcactttgctcaatacactaagatgtctttgcagttgcaactggttaatgaatgacggtgaaaattaggcccctagggctgtcagcaactccaggccccccagctgaaggaagccaggtgggagtgaaccaaatcttcccaatttacctgacaatgagactcaaagttgtaaagactgtaggctatagctcagtttgtcagggattctagaatcttctagaaggggcttctagaagattctggacatctttatagctcagacaatttgtaattatcaggtaccccatgggcttctggtgttgtgccctgagggcaaccaacaaaggctttaagtttatcaggttcctctctgtgatgtcctcttttaaatcagacctgttcattctgggacaggcaatcacagctgaggcaatagatgggtgtgggggagatatattttgtttagtgtctcctattagaagattttcacttgaaagatgagaattggagtctttttgtccctgagaaaatatccagattcaaccttatctttgcaggccttttacaaaattctgtgctgaagtctgtgttttatgaaacgaacattcctacaattatgtttttagcagttccagtcatgtgacatggaatacagtttcgacatcatgatgtccattcactttatagtgatgttgatttccagtttctcagaagattcatttcagaaataagaattgctctggtttcaaacttttagctctaaattcagcatttggagaccttcaatgaggctgattcttaggatgtgtatggtctcaaattttttttccttagagtttaaaaatatatgaccaagtataatgaagatatggcatttctttaaatatccagctactgcaaaggagagtttaagatgacctcaggaatgctttcccaaaatgtaatgggctttgctctttttcactccagctattttaggcagtcattaaacagttgttagcagtttagtaagtttatataaaagtgcatattttgaggctttacatgccacaggagaagttccaatgtaaacagaggaagacagaatcagtgcttcaaacggaagcgcccagcactatattctcataccagttgaggaaatgcttacacatacaagcccatcaacacacattgacccaccccagctatcagagaggttctgggataattgatctctcagggggtatcaagtgggaccaatcaggcgagatcccagttctagttctgggtgggtcaacgagattcactttgtgctggggttacagattgtgtctcagcttttggtaaatgtctcataaatgcattccactcatcaagagagcgtggattatgagctcctggctctcggccagagagatgcgcagcaatgctgggatgcacgtgccaagaatgttctctgttctttagactgttcagactgtcggtgcctgaccaggcagagatggctctttgtcactgtgatacctgcattcgttgataagtggtggggctcacccctcaatctgtggactggttctgacactggtccatttctccttgagttgttgcagaagaagaaaaaaagcagtaaaagctgtcgctttctgtgtaatgtctatgaacttgcatttgtcatcagagtcaactctttggtacagagcatactcttctttgtttcattaattaaaatgcatctgtagtcttcaaaacaagcttttatctggatctctgtgattcctttttaaaattctttatttctctctctgtgaatctcagcagcaatagtaaccctagtgatggccagcactgagcacttactatgtccccaggctctgttttgcatgagctttacacatattaactcatttgatccacaacgtatccctgccaaaaggaagctaatattattattactattcttattttacagatgtgacacagagattaagtaaattgcttataattacatggcttgtaactgtggggtttgtacccactatgtggcttcaaagttgactttaaccgacactactaagctgtttaacaatacaatggcagcaccaccaccaacaaaactttttttttttttttttgagacagggtcttgctctgttgcccaggctggagtgcagtggcctgatcatggctcattgcagcagcctggtcatggctcattgcagcctccacctcctggactcaagtgatcctcttacctcagcctcccgagtagctgggactacaggggtgctccagcatgcctggctaaatttttgaattttttgtagagaaggggctttgccatgttccccaggctagtctcgaagtcctggactccagtgatctgtccacctcaacctcccgaagtgatgggattacaggtatgagccactgcactggccaaagaaacatttttgactgctccctgtgtgccaatcacttactgatgcaagacttaacttttatcacatctattcatttcactggtgtctaaaacaaactcatcttccttccaaagggggttatctttttctttaatgccatcactgtgactgaaatgccttttgtgtgtgtgaaccactttctcctaaaagtaatttagggagactttagaacaattgttttccaggtaactggccttcaattactagtcaatttccttgtcttcctggatttttcagtgtcttttgatccagcccatcctgagtttttcttgctattgttgaattcaggatgccctgttgggcttctttctcctctcccctcctctcctcccctctcctccccctcttctcttctctccttttctcttcttctctctgcctctcattctctctcttcactccccatagggaacctcattatgcctcttagccccctgggcagtgcttccctataatgatcatgacattggttgatagttatcagatacagagctctttgatggcaggcctgtgtttcgttcctcgtcttgttcttctagcacctagcatttgggcctggcccacagggaacactcagtaaatgcttcctgaatgagcaaatcccttccttctcatcctctctagctcttggcctataacctactccagacactcattattatttcatgcctaagttatatcagctagaatgtttttgcctgcaaggaacagaaaatacaactcaacctggcttaagcaataaagaattttattggctgacagaactgaaagtccagagataaagcaggccccaacacaggcttaatccaagcaccccagtgtgtttctttgtgattctcctggctctgtcctccttcagccaacagtgtgatggttataggatttcagatcctcatattaggccacgatgacatccaaagtgcatcttaagagggcgcttttcctggaagtttctaggaaacctctctttgtatttcattgttagaattgggccacatgccggttcctgaaccaattcccatagtcagagcattgccatgttctgagtaacttacagctggatttgtggaccagacaagtgacagggagaatgggattcctttgagccaaaaaaacagtcagatcaacgtctcctggggcgtgaggcctcttatgaaggatgggtggacacctgaaagaaatgtggagtactgctggaaatatatgagctttgcatatattaacatgttatttatatattttataaattatatatgaatatatattaatggttaatatatagtcaattaattgtattataatcaatatacttaattataattaacattatatattttgtatattatatattagtaacaatataaatttacataatatacagaaaatatacataaataataaatgttaatgtatgtaacatattaacttacataattaacatgtaatatattcatatgacatatatgtaatatattaatatatattacatatcacacatattacatgtatgtaatatattaacatcacatatattacatataagtaatatattaacatatattaactcaaatgaattaatatttgagttaatatatgcaataatatatgttaatagtataatatatatttaaagctcatatgttcccaacagtaccccatatttcatatagtagttgatatatgtaaagctcataccgggggcacctgggggtatatgtaaatctcataggaagattcttggggctagtagccatcaatcttcaccacgctgcactctgcaaagcttcctagttggtgctacttttttgggcatgccttgttctgttcctttccatggtgtgtcactggagtcattgctctgaagcatgacatttatgatatgacattgatgaaaaatgttaaatgactccccattgtctactggaaaatagcctgacattcagacctctgttcaagcaatcccattttgttcttgcagattcatcttccaaccctcttggaaagtaaagctgggttttggccaaattggttttctactcatgctctgataatgtatgcccacacttttacttccacgctttcatttcctccacccagcatgactgctttccttccctgtatgtgtcaaagttctaagcttgctttcaagatccaccttccattctccctgacgcattgcatgaccactctagtttgaatcaatttacttctattccaaatataaatgtaaatattccgaatgttaaaattcactcattaatatagcatggcattcaacttagattgttttgcaatgttggataatgtctcatttaaatttatctttttttcagtctccctagaagtaaaattagatgcattcgtgattctcctaatgcctgagttagcaccttgcaactcataggtgctaataagtatgttgatatgtgtccgctgagaaaagtactagcaaaaaagcatgataggcacattgaaactgtgaaggtaccatccagctctttgaaaattagtctaaagtaaataattagtacaaacatttactgagaaactactatgcacaggcatggttcaaggttctagaaattgcaacaaagaatataccaagtcccttccatcagtgagcttatatttctagtggagagacatacaataaacaaattaatatttaataaaatgtcatgtaatgccaacttctaggaagaaaagcagagaagggtgagaggacattgggctgatattttgaaggtagggtgaccagagaaggcttctgagcaaagttctgagtaaacctccccgagatgacatggggcagatggaaccccatgagaaaaagccctggagagaagtcttgcttagtaggcttgagagagagccagaaggctagcatggttggagtgcactgatggagaaggagtaataggagacaggattgtcaagggataagggtttggataatgtcagatcttataaggtataccagatgttcagtttaattctaagtgaaatgaatgcctttgatggactttgattagggtaatcatctgacgtgatatatactgtaagataattactttgtcttctgtatggagaagagattttgagggagcaagactggaaggaggaaaaccagagaagaagctattacagtactaatagttcaggcgaagtgtgatggtagcttggtctagaacattggtggagaattgggaagaagcggttgggatctgtatacattttaaggtagaagcaacctgtagagtttgcaatgcattgtatatgaaactgtgtgtgtgtgtgtgtgtgtgtgtgtgtgtgtgtgtgtgtgtctgtattgttgtaaacaaagatgagcaaaaaagaatcaagtaagataatagtggcttctcaaatcaaacacttcatttagtttttgtttttaaaaatcaaacagacatccttgaacagtggacattttaaaacattgttcctaaaaattactaaaaagttccaacattgtttaaaaatactaaatacgtgacaacaattgaaaagcacttagggtgatcatttgcatttgtgccattaatttagacatctttttgtaggtattacattaattatactcaaaaaaaaagtttttttgtgttgaagatcttcattattgcaattgtgaaagaattgaggatattttgacttctgtaatccatatattgtactaatttaaaactcattctgcttggtgtaatctttggtatatcttatgacttacatgaattggaatatggctcctttccattcatgaaaggaaggggaaatctgattgaattagtgcataagaatgagcataaatataaataataaattttttataaaagtaaatattttaaaataataaaatttaaaacttccagtaaaaatgatccattgtgttcattactattaggtatgttttctgtacaattgcattgtttattattttatctgcttagaggaattagtctacctttttccccgcggtagaagtactgcttaaaaaattgatgcatttagtcttcttataccagatttttctaagaaacttgtaacttcatcaaatttattcacttttacaataattttatagttgccaagtagcagtcacttgcccccatttcttaagtaagaaaaatttaagagatagggaaatgagtaattgccatttagaagttgttttctaatgcccacatatctgaaggaagctccatctggaatgccttagcttctagaaacagatctttgcactacatttattttttgtgttgaaatttacctccatgacatctataccaactctgtgcagtaagaatttggtttcaatagtataatagggctaacgttcactggcttccattttatggccaaattaattctattgggtgatcattttaatgcccctctaggagagttatatgtttgtgtatttcttaataacttactactgggaacattttatctatgcattactattttattcattcaatggacgtatagtgagcactatcattttctagccactgtggttggttgttcattagaattttcaaaacagtagtcctgatcgatttctcacatacctgccttataatagggtccagtatctttttttttttttttttgagacatagtctcactctgtcagccaggctggagtacagcggcatgatcttgactcactgcaacctccgtctcctgggctcaagcagttctcctgcctcagcctcccaagtagctgggattacaggcatgcgccaccaggtccagctaatttttgtatttttagtagagatggggtttcaccatgttggacaagctggtcttgaactcctgacctcatgtgatcctcccaccttggcctcctaaagtggtgggattgcaggcatgggccagtatcatttctatgtgttgtttttaattgacacataataattttacatatttataaggtacatagtgatgtttcaatacataaaatatagaaatgatcagattagggcgatagcatatccgttttcttgaacactaatttcttgaacagaatattcaatatctcctcttcacagctattttaaaatgtataacatattattactaattgtaaccatcctgcagtcttctggaacaccagaatgtattcctctcatctagctgtaattttgtgtcctttaacaaatctctccctgacatttttaaaatgtcttatacaatttgagagccaaatgctacagaacaggtggaatttcagtgatccctgttctctaccttctcatctgctttaattctcataatttcttcaacaagtgacaaaatctttcattatgtagccaggaagaaaatgagtaagattctaatttttatgaaagtgccctttcaccaacattttaccagctctgtgttaatagacagttccctattttggtggtagtttgattagagagggaagagtacatgctttggacccttaaaatggaattgactttctctggtgaaggaagtcagtgaaaaagttggctgacaacacacaaaaagaggtgaatttggaagccatcacagtattgctggagataaccctattgactttcccttgggtggtgtcaagcagaactgtgaaggttatcttatgtgatttggatgatgaggatcctcggttacacagatcgaatttctagtttcttctctggctatgattgagtacatatactgatcttctctgggccttggtttctctaactctcaaatgagccaccatatattatagggaccaaaccatgggattttggggtcaaaaatatcctcggtgtaagtatcagctcatctgtttacttcaagtttttttttaactcctttaaaaacttcacattctcatctgtaaagcaaggataataatacacaatctataagggcttaagcaaattagagatgatatagtttaaggatttagtatagttcctggaacagagtaatttctcagtcattggccgcccaatggcatgaattgaaaaggttgagccagtgtctatagttccagaaccattctcaggttctattttggaatgtttatctcttctgtgttgtggctgtggagtaagatccatctggaatgtagtaacgtcaagaaatagcaagttctttgcctttctgtctttgtttcaggaagcacatactttgtaatctgtgacatttttatgctgaaattccctttcttgacatacagactgacactgtataattcagtcagtttcctattatctctgttgttaagcaagactggattttcatcactgggaaagctgttaacagagtccccattaagcgagccatcactgaacattttccttgattgatgctttaagattctgtcactcactctttgaaaatatcagactacagggtctgaagcaggtttctgcaatattctgcagtacctcatgggtacaaaagagacacaggaatatgccacagcatctagatccaattcttagtgaaaattttgttctttcatctgtattctggtcagccagcttgaagtagacacaggcagatgcttggagagtcgaaattatagccgaatgatatcacagagtagttaaataccagccaagctgtggttgcagcatggcaactttacaagccgggcaggttagcatggatgctgtgaaaagtgacccctctatctgaaaaagggttttgtaccttggctggcattagtcacttttccttgtttgatatttacagctttctcttgtcctttgtatcctttgggtaacacaccgtgagtgagagcagaaaagctttccttataaaggtagcaattttattcaagattaaaatgctctatttttccacattacatcaatgagtaccttcaaaaaaagatgacttaatgagggggaaacatgaataaataaacacccacacgtacatacatatgtatgtgtgtatatacatagagaaacataacggggcgagtgatcgttgattattttagcggaggctgtagagggaacaacacaattacatatatggtaatgaagaatgaacaagtaattgtgttgtaatttccctctgctttttgctagtggtgactgttatgaaaagcaggttgttggaataaaaaaaaagatactaaataaagaaccgtagttcttataatagcattttatagtctgtcttttgaaatatactaaaatttttcacaatccatgtttctctgcttttgccaattgtgtttgtgattgttcatttgtgcatagaagtttcagtaggaaaatacagtcgtttttgtaaaggttggatttataagcttcaataaaaacaggctcattcaaacaaaaaagcaatcagattgcaaaatggcaaataaaagaggaagcttatccttataggagaaaaaacgtttaattttaacattatgtttaaatagacaaagagacctactgcagacttttaaagtgttcattttgcttccgttgctgcagttcagcttacagatggtccctacgatagttgctatagaaaccaaacctttttcatcaatctctccctgttgctatggtgtgtttgcagccactgcatgtaaacttttgtataaagtgtcatttatgcttttcatgactgaccttataatgaaacatattgattatacattaaccaacaaagtctagcatgaaatgacacatcaccactaaacacccgttactaagtagaataggtggacctaacattatttgtagatgtgaattgtgcctttgttaaccaggctatttgaaatatcagtgggataaggaaatcttgctctaattgacaaaagcagaatcttttattttctttcttgaaagtgatagtttttcttttaaaatttagtttcttcaaagttaaacctgtcataggattcaaatttcctgctttgtaatttttgctctgacattttatgtgtggccttaggccacaaaatcatttaacctctggatttagtgagataacaaaactatggcatgatagatttggatgtgttaagctctgcgagggcaagtacactacctgttttgtttaccgttatacattcagaacttggtgatatccagacaaacagcctagaatacagtaaacattcaaaagtacttgttgagtaaatgaatatacatgttattgcttctgatcacatatgcattccatactgtactttctgtatagagtcaatttcaagagtaggcttcatttcattttaatgccacaaatatttaatgagttcctactagtggtaaaatgcttcacttcttgctggattccttaaactttaccagaaaaaaaaaaaaaaaaaggtctggctttcatgcccaagactctatattccaaactctctaatgtttatacatttgtagatgtcaagtgttttttgtttttgagggtttttaaaaaaaaattcttaagatctgtatcattgaatagaaatttcctggactttcctttcaacatatgttattaacatgacagttatctgtccagtggttagaagcatggtcctttgaatcagaaagacttgagcattaacttactacctctgcactattgggaaggttacatccctttgctagcctcagttttctcatccgtataatggggacactaatacctaactcatatagttattgtgagaattgaatgggatttataaagtactaagcgcagcaattagcccagcgagcactcgtaaatggtagctgttattgttgtctatatatgcatagaggatgcgcatgactagtttgttgaacagtcaaaaatctgtgaattttactatttttatttccattcaatgcctctaactgtgtgccatgacagctctttcttttccactgggtgagcacattttcttaatatttggtgtattgtttaatgtaccagtcattttggatttaaacaacaaaattctatgcagcttaaaattccattcacaaatatgaatgaaatctgatctccatgacctccaaaccacacttctgagtcttagaattggatggggtccttggcctgatcttcaattctttcttctattccagcttactggagtggagagaagagggtagtgtttcaatgttccctgctcctcatcaaaacctaactcctccagtgatttagatcagaagtcaaggaggcaaagagtttctacaacccatcagagacaggaaggcatctttgttcttgctccaatttgcaagggttccatctgttgatgcttacctctgtggggtgggtccagggagagagaatctacggttttcagtctccccaggccctctccatctatgagaatttttttgtttgtttgttttgagatggagtcttgctctgtcacccagggtagagtgcagtggtgcaatcttggctcactgcaatctccacctctcgggttcaagtgattctcatgcctcagcctcccaagtagctggaactacaggcatgcaccaccatggctgcccagttaatttttgcatttttagtagagacaaggtttcgctatgttggccaggcttgtctcaaactcctgacctcaggtgattcacccgcctcagcttcccaaagtgctggggactacaggcgtgagccactgcgcatggccatcatccatgaggattcttagagacacatagctgtatctcctttgtctcctgaaggcagtcctcttccctgacttcctctctccagatggggcatccactgctcgggctattgcctgggcatccctactatgtccacctcatcctcccacctgtgtattgtgtcacatggagccacagaaacagcagcattgtgcagtcacttctttctctcccattcccctcatgctgtgcatgttccttcttttccccgatgggaccaactgctccagccagccactctctggctttcagacatgtctaaggaaatgtaggagcaagacgcaggctgcgtccatgtacttccctcaaattccagaaaggggcacatgcagattctcacatgaacgtcccagtgtgctccagtcctctccaaaaagcatgctggggggcgcagtagtggtgccttctgcactgcagcttagcaagcaaagtggggagggtaatgccgggctccatttttcgctggaaggtgaagtaagacatgccagtgtaagcattaagccaaccaaagttttaagtccactgttggggagggattggtgcagtagttcccaattatccatggttttctttcaagatttcagttaatcgaggtcaacttgagtacagtacaataaaatattttgagggagagacgacattcacataacatttattacagtatattgttataattcttctatttatttatttagagacagagtctcactctgtcacccaggctggagtgctgtggcatgatctcagctcactgcaacctctacctcccgggttcaagtgattctcctgcctcagcctccctagtagctcagactacaggcgtgagccaccacacctgactaatttttgtagttttggtagagacagggtttcaccatgttggccaagctggtcttgaactcttgacctcaggtgatccgcctacctctgcctcccaaaatgctgggattacaggcatgacctcccaaaatgctgggattacaggcatgagccactgcacccagccaataattgttctattttatttttagctattgttaatctcttactgtgtctgacttagaaattaaactgtatcataggtgtgtatgtataggaagaaacagtatatcagaactatccatggtttcaggcatccaccagaggtcttggaaggcatccctcatggataaggtggggtgggggagaaactatatatcttagttaataagcattactagaatgttacaaaatatattgaagtttgtaacatatagaaatcatgtgtcacttaaatctgtaatgtaaacacctgcagtactgcaaagcttagaaaattgcacacattcatttaccttttgactaatttttgttctttcttttcaaatatatttaacatgtacatgggcatgatgtattatgttgcatgttgcatatcacatagcaaaactttagcttcatttgttacttaagaaccattattattaaaagcatcatattgtatactatatatatagtttctatttgtcaatttaaaaaatagtttacaaataagtaaaaagaatcatcgttatgaaaaaggagttatcattgtaccagcaaaaaggagagtgaattaacagttttgatgtagaattctgcatagtagaagttgacatatgtatgctttgtatgtgctgcttttaaaaaatctcaagtttctatttaaaccctgaattttagaaacctacgaatattagttgcatctttcttgtcagaggaactataaaaacactttaacacaaatgctaaaccctaaaacccaaacaggtaaatgagcccatggactgataagcctttagccatttagaaggagcttcaaaaaggctgttttagctggacacagtggctcatgcctgtaacctcagcactttgggaggctgaggctggaggatgacttgagctcaggagttcaagatcagcctgggcaacacagtgagaccctatctgtacacacacaaaaaacttttttttaattagtggaatgtagtgatatgtggctgttgtcccagctacacttggcatgctaaggtggaaggatcgcttgagcctgggagttcgagaccagactgggcaacatagtgagaccccatctatacaaaaactaaaaaattagtggggtgtggtggtgcacacctgtggtcccagctacttggcaagctgaggtgggaggattgcttgagcccaggagttggaggctgcagtgagccatgatcgtgccactgcactctagcctgtgcaacagagtgagaccctgtctcaaaaaaataaaataaaataaaaagattgttttaaaatgaatctgacgttattcctcattccttattgcttgttcaccttatttgttaaattttcagactggagcccagcctgaaaaaggactgaagtccttttctgtagtcatctcagctactggaaaggcaactcttaagcacactgttttagagaagggctgagcggtagaagatacgacgtttagagagagaaagcccctgaacacgtattaattctaaagaattctaaggaactgatgcgtatacatccacatatgaacccagggcgatgttgagttcttctggtgggattctctggagcacatcatcgttggcatttgatgactgtaaaatcgctggaagttgaatgtgcacatttaaatagaaactaaatgatgcaatgcaaaactaatataatcttttccagattagctgccattccacattacctgcagaactgcttccttcctcttttgtaggtaatgggcttgactgcatgtgaaacataatgtaaatgttatgtcttattaatgcatccaggaaatctgccttaaaaattactttttatcacagaaaaatgtggcttaattttttttaatcatatgccttaggcaaacaatggtttgacggcaacatcacctgcatggagcactgagtttattatttttatttttttgatagatggatatgtttctccaggggctttctgctttaagttacaaatggttattaaattttcaagaaaggtattctcttaactctcaaagtctgtctatttttagacttttgcagcaggaaatagaagtaaggatgtgcttttccagatgtttccagcttgctttttcgtcagctgtgtggttctacaacttgatacttatatttggaataattctgagctgtattacacaggcaatgaaggggtctgtttgaaaatttgtaaacaggttattttttcacttataattaaatatgtgttgctggtttgggaagaattgactatattagctattgatttttttttatatgtagcatacccaaacttgatgttttgaacattttcatgttttaagtagtgccgacaaatttgcttttagggcaccataatatggtcttttttgactttagaaattagtatttctaaaattattgattgtcttgagtcatttacatgttgaatatttctctggacaggtttaataggacaaaccaaacgtagtccaaaaaataaaattctttcaagacctatatattttcgtaaagataaaatactagttcagatagtttgtcattgacaaactaccaaaagctccttggtggatgtctagattttgaaatggataggagaaagaaaaggatgtatttctgaatactactgggcccttaagactaatttttcagagaatctttgctaaggttgagaagaggtctccttttgagttacaggaggagggaatgtcatatccccgtttgaaagtgaacagctcttcctagccatgccacatttccagtggttccacttgggagcgtggcaggacagagttgatacctgccaggtgagtaatgaggcttttagattgcatgaaaatacattcgtggtggtggctatagtcaatcttaagccaatctaagtgtgtggaagagaaaacgcagctccagaatggagagaaatgtatatacatgcaggtacacgtgtgtgtaggtatacatataacaattttagagtagttataaatggtatgataattcattgagattagaaactgcataccactctttatataactgtctttgaacaaaggtgaagaatggttttttttcccataggccttagaagctggtgggggttggggtgtggtatgaatctgtagaggcgataaatagaatgtcgtagttaagaacccagggattagggagaagacctggttggattgctggttctgccactctccacctgtataacgctgagttatatttatttgtctttctaagtctcagtttccttatctgaaaattggttacaataaaggactctacctcctagatttattgttagcatcaaatatagtaacattaatgtgtctttaattattacagaccccaaatctgtaagtaactcaaggaatgtttcctctcaacctgtctcatcattgagatcaaggaacttaaatgcttttaagtaaatgtaaaatatgtataatatattgcatgcacattatggaaagtggagtggtagttgataagcgtatggcttttggactcagaatatgagtacagggattatgcatttaccatttcttatctgcatgccttcagacaagtttctcagcctttgtaaattcctgcttcctcgtgtatacatggacaccattggagtagctactttgtagaattgctgtgaagattaaatgagagcatctgaagcactgagcatgaagctttgctcatgggaagacctccatgactattagctattatttttgctgttgatgttgtaaacagacttggaggcggagggctatgcagtaagttgatttgaaggagagcagtagagggtgagagaaacagaggggtagagaaagaggaagatggaaaagagaaagccgggtactcagtaagtaggttttgaagtgcagggtcaccgtgtttgtgacactaggcttggacattgccattgtctaggaaactagtctttgaaatgcataattccccattctttatttaatcatttatgagtaagtagcttgactggttctatttttaaatatttatcattcaacttttaagatatacaaaaaggctcaaagaataataaagtaaagcattacatacctatcacccagcttcatgagctgggtttgtttttattgccaatagagttgcttccctttgtgtagcactctttcctacttgcagactaccttaaatttcttaaaccagttctgtgagttttaaaatatttttattatacacgtgtatctctttaagcaatgtatagtactgagtattcttagatgttttcctgtaagatgtatttacagggttcagatttatataaatagcggaatactgtagtgtgctgctcacacctctcttgctgctaaacctgatggttgtaatttatcagtaatgttacacatggagcagttcattcattttcatgcagtagagtattccgtggcgtgaatgcgacacaattcacttatcacattttctgctgacagatatttatttacgtggtttctttttttttttctccccattaccaacaatgacattataaatatgcaggtgcattagttctggtacaaacgtgcagacgtttctctagggcagtgctttctcaatcttttctgaattatgacatatgtagaaaataatattttcagggtgttcacagctgtatcaacaggcccaaatcctccaggcctcaggtgtttgtacagctgaatagattgatatctcaggcacacctacaactcagtcaatcagtggggaagttctgcttaaggccgaccttggagtggaatggcttagttgtacggtgtgcatatttttacctttactcaatattgcacttctccaaaatcatggtgccatttttacatctcaaccagcagcatctgagttctcattcccccacattttatgaactcttggaaatattttactttcaccattttgtcagtctgatcctcttctgcttttataccttgacttgataccttttgccatatattgtgtttttttgctttttatattgatttgtagaagatatttttatatacttactgtaatcctttgtcagttttatgtgttgcaaatatctacccccagtctatgagttggttttccactgcattttcatgaatatgagtaccaagttgtgatgttgtcaacttgaaccattttttcctttgttttccatttctcatcttgtaagaaatattcttttatatttactgctaatatttttttaaatgtttgcttatttttgtttgtaatatgaaggaggaatctaattttaagttttctatttggataaggaattattccagggtcgtttataaaatgttttttaccccaccacagatctgcaagtgcaaccctgtcatatatggaacagctatttgttaagtttatttatcagaattaaacataaatcagaataaataaaaacgtaaaacctggaatccccccttctgcccataaaacaattacaaatcaccagattaaaagaagacttgggttctgagccaaactggaagtgagagccctggcaatagttaattatgatatatgacctcggatcaaatgtgttagactttttgcctttgagcactggtttaagtttctctgccttgtgggtttgtgaggaagcacataaaggatgtaagggaatagaggatcccatctctacagataatcatctggcctcatgcaaccagcatgccacttgttggagaagtgtgttcaaaactcatttctggttcgtgcacctgtggcccttggcggcaggtcctgtaacacacagcctgaccactgatacagaggaggcccctgggactgctttccttataagggtcctgcgccttggtagaatttagatttggagttgcagagactcaactcaggaaagcaagtctttaacctctttgaccttggttttctcacgtgttaagctcaggacgtggaaccggtgatttctcatgcctttgatttttaagagtatgtggaatagaattgtgcataactgtgaatcacagtcactgtagaaccacagggctggctggtagctttcggaatctgttagtggctttctctttgctctttgaaagattggtgctgttccatttcatgatgccagaaagtcatgttgggaattggtgttaatttttctgggctcaaaaaatcctgtttcttgactatttttcctacttctttccataatgtgagctattctgcaaaccaaagcactttagtaaaactctctactactagaaatgtgtttaacattattggtgtgttttcaacaatacacatcaaactttgagagccactcttgtgagtgaaattgctgtggagtatggagtgagaagttattctttgatctattttaggctacttgcaaagaaatataatagaatggctagaagagccatctctggagtcaggacagagtatctgtggccaagaattagcaggatgaccctgtagaagttattcacataactgaatttttaatgagataatgcatgtaaactactaagttttagatggtatagtatctgatcagtatacggtagctacttattatttgaatatgttctctaattcctgattgatttgtatttattaaagattattctacagattcaacttgtgctgatgtctttccactggctacagaagattcccagtttacttcacgtatctgaaaaaaagaatttcttatttaaatttacccctacacaactggaggcaggggggcagtgtgtgggaaaggtgaatttttatagaagtataagttcttctgaaagggacccaagctaaagtttccacgacagggtttcaaattcattttttaaaacgggggcagcacatcccggttctgatttggaaacaagcattgctgcctggaatggattaaaaacagaagatctctacttctgcatccatttgtaccttacacagggatgcttttaaaaatatttaacaactgtgactgggtgcagtggctcacgcctgtaatcgcagcactttgagaggccgaggcaggagtatcacttgaggtcagaagttcgagaccagcctggccaacatggtggaaccccatctttaccaaaaatataaaaaattagccgagtgtggtggcatgtgcctgtaatcccagctactcaggtggctgaggcaggagaatcgcttgaacccaggaggcagagcttgcagtgagccgagatagcaccactgcattacagcctgggcaatggagtgagactccatctcaaaaaaaaaaaaaaaaaaaaaaaaaaaaattaacaactgtatggcgtggcaacagctggtcggggaggttgcctaccattgccctgttggaacagatttgtaactcctttaattgtaggatcctggtgagagtttggggccgttgatgtaataggacacatttgggggcttgtagcagtggctgtttgtgaattagcagggaagcattttggtgtggcaacaactgggatggctgtgcctgtgtgtactggctgaatgtccctgtgtcatgtccacgccagggattttttgcccagtttgtcatagaaggaaggtagaatgtaatgcttatgctcacgataagagtaatacgaattatttacatggatttagttttttagaaaattattggctaaaaatcattgggtcttattggttgtaaagtgctgaacccactgtgcaaaaatcaagacacttagaatacaagaaatactgagactttttcccttcacggagattcccagtatggtattcatgggggcagtgacatctagcgttccctcccaagatagcaggcactctgaatgaagacagtgtgtttatttcacaagtagcctacaaactcagttatttcatccagggcctgaattttaccatttttgaaagtacgtcacattcatctaagtgagggggcctggtttgttccaaattttcatgaccatcggagcgggtctgacggtgagaccagacattttgcttgtatttctggttcagctccagctagggctgaactcagggggccccctggaaatggggcatttctgggaccaatctgaggatttgcaaagaattttaagtaagcacaaaacttttgattaaaaaggagggcacaaactgaagcccagcctttgtttctaacacactttgacaaaatggtcattttgaattagatatgattagaaacctcttaagaaataaaaatgaaaactcgccaaactcttttatggctatgcatgttctgtcctttgctgctctgtgtcagataatttttcttatacttgggatgtcctgaatatgtattttatttgtgctttttgatgagcacagcactaaggaaataagcgaggtgaagaatttaagaaagcagacggatctttttaggaggctataaattttccgcgtccctccactgcccactcccaaggccatgttgatgtttaagagaagcctgtggtctggtttttcagtctcgtgttggtgccaagtcagtgctttcattgtttcttactgagatcgggtctagatgctctgtgaacaattgtgcttatggttatgtagacttttagaatccttggtgattgtcattctataattctctcctgttattttaatttaaagtaagtcttgaggccaggtgtggtggctcatgcctgtaatcccagcactttgagaggccgaggcgggtggatcacctaaggtcaggagtttgagaccagcctgaccaacatggtgaaaccccgtctcaactaaaaaaaaaaaaaaatagccaaatgtgttggtgcatacctgtaatcctagctacttgggaggccaaggcaggagaattgcttgaacctgggaggtggtggttgcagtgagccaagattacaccattgcattccagcctgggcaaaaagagcaaaactccatctcaaaaatagcaataataaataataaaaaataaactaagtcttgaatgcttctctgagattcttgagtataagcactatctggtaaagtccatcaaaagaagagcatctctgtggatcccttgagcccctttagtcttaagcaaaccaaaaagctacatggtgattattatgagtggacatatcccacgtaagcatgtacaacagtcttaacacctgatttcattagatatggcagtaatacagctctagaatgactctatttcggtggtttatagacacttagtttttgtaaaacacttgtttttctttctttgtttttcagtgatagcttgtgcagaagaacataaatgcaaagcttgttcattgagactggagagaggaaggccagagtgccatctgctggctccttcccattctctcataacccctcatggcttttaaaaaatccattatgtgaaattcagctattccttaatctctccaaattccaaaacagaggtctcatgaaaaattccttaaaagcaagcataaataaatacattgagttatacatttctgcccaggtcataggaccaatgacaacctacatgtgagaccaggtcagaatggaagtgctataagtatcttatttaaccagttcatttatttgggtcaagttgaactattttctagcaataacccagagatcctttctaggatataaatagaacctttttattcatttatcttttcatacgtttattgaataaatatttacttcacctctgctctaggcaggcatatgagatgcattggtgagcaaatatttcttgggaccctgtgtgcaccccaggaaatccccttcccacatggggcttccattttggttggtagataaagctataaacaaatactataaataagtcggctgtgcaagctggctcacacctgtaatcccagcactttgggaggccgaggctggtggatcacctgaggtcaggagttcgagaccagtctggccaacatggtaaaaccccatctctcctgaaaatacaaaaattaaccaggcagagtggtgtgcgcctatagacccagtaactcggtaggctgaggcaggagaatcacttgaatccaggaggcagaggttgcagtgagccaagatcgtgccgctgtactccagcctgggcgacagagtgagactccatctcaaaataaagaaaggaaaataaaataaacaagtcaattgtttagtatggcaaaattgtataaatgttatagaaaaaaagaaaatggagatgagcataagggaagtcagagtgtgtatttccatcttaagcagggaggtcaagatggtcctcactgacagagtgacatttgagcaaaacttgatgtgagaaaataatcacatgcttatctaggagaacattccaagcagagagaacagccattgcgaaggcctaaagaccatgtgactggtgtgttcagatataccaaggccagtgtagctggagcagaaagagggaaggaggagaggtgggaaggggaaccaggccagttcatgcactaaaatatgtcttgtgaccctgtctccaccccaggaaatgcttgcccctgcgttacccttggtagccttttcttggttgagatggtggtgcatgctttagtttctcagtaagaatttcacactactaggaagagccccttgtgtcttcggtataatactgggtcatgactgatatgctcttcattccctgtattatattttgcaggacattctaaaggtttgggggagaactgaattctaacagatggtgcacactgctgttgtgatcacaaaggcctgaggcagaccacttcagtctaacatgtcattaccaatttaatagaaatatttcttgttggactagtctctaacaaatgtacattgtttgtgagaattggtcttactgaattctgaaggtatttttgtccttactggagtgacagcataatattttgacaaatcaattcaattaaacaacctactgattaagtcagacagacgaactgatttgttttccagattattgattgccatcactgaattccatacaatttatttgacatagtaagagtatagattgttcacaatctagatcccaagagacattaaatgttcttggttataacatttttattctgtagataagaaaatggaggcccagagatctgtatgaatgtgtatgtgtagcactgccattcaattagctgtgtgtgtgcatgtgtgtgcatgtaggtaccttatgtgtctgtctgaaatttatctgctattcaaaatacttctgggcagggcacagtggctcatgcctgtaaccccagtacttttgggtggatcatgaggtcaggagattgagaccatcctggctaacacagtgaaaccccgtctctactaaaagtacaaaaacttagccaggcatggtggcacgtgcctgtagtcccagctacttgggaggctgaggcaggatcacttgaactctggaggcacaagctgcagtgagccaagatcataccactgcaccccagcctgggtgacagaatgagactccatctcaaaaaaaagtacttctggccaagcacagtggctcacgcctgtaatcccaacactttggtaggctgaagcagaaggatctcttgagcccaggagtttaagaccggcctgggcaacatggagaaaccctgtctctacaaaaaaatttaaaaattagccaggtgtaatggtgtgcacctgtggtcctggctgcttcagaggctgaagtaggaggattgcttgagcctgggaggtcgaggctccagtgaaccatgatcatgccattgcattccaacctgggcaacagagcaagaccctgtctcaaagacacaaaaaatacttctacctccagaattcggaatggtatttttccattcttgtcacaagtgaatttcaaagatttgctggttataacatgttcctttttttgcctcaaatattaaatgactcagcagtcattgttctctgagggtggggaatgaagtgatttgagctggtgatgaaaaataggagagaaccagatgacctgataattcagtttccatgtgctgctggcaaagacatttgaccttctgagaaaagtcagcctccaaagactaaatattgttaatttttaaatatagttctagagaattcttttcctaatccttttactgtagtcctgttaatgcctatagccctgggacaagttgtccagcaccagaagtggacttgcacagaggaacatattagtaatttccatctggctctgtacatgacttgtagattaaacagccaattggggcctcctttagaatacaaaaacttggggaaattcaactgttatatattctagtcattttttacacttataattccctcaacttcaatagcttccaactgttattcatcttatctctggctttctggcttttctctggcaaatctttcatttttttttttttttgagacagagtctcactctgtcacccaggctcaagtgctgaggcacagtctcagctcactgcagcctccacctcccgagttgaagcagttctccgcctcaagcttcccgagtagctgggacagatgcccgccaccatgcctggctaatttttgtatttttaatagagatggggtttcttcctgttggccaggctggtcacgaactcctgacctcaactgatctgccctcctaagcctcccaaaatgctgggattacaggtatgagccaccacccctggccaaatctttccatcttaattcctcttctcctttttttattttttaatatatatatatatatatatatatatatatatatatatatatatacacacacacacacacacatacatatatatacatatatatgtgtgtgtatatatatatatatatatatatatatatatagagagagagagagagagagagagagagagagagagagagagaaagagagagaatcttattctgtcacccagactggagtgcagtggtgtgatctcagctcattgcaaccctcccctcctgcattcaagtgattctcctgtctcagcctcccaagtagctacgactacaggcacctgccaccatgcccagctaattttttttaatatatatttttaacagggtttcaccatgttggccaggctgggctcataatcctgacctcaagtcatctgcctgcctcagtctcccaaagttctgggcttacaggtgtgagccaccgcacccagccttatctgtgtttatttctttagactagagcagaggcccccaaaccccaggcagcagactagtactggcttgtggtctgttaggaaccaggccgcccagcagtaggtgagcgcctggcaagcaagcattgcagcctgagctccacctcctgttagatcagcagcagcatcagattctcataggagcgtgcaaaccctactgtgaactgcacgtgtcagggatccaggttgcgcgttccttatgggaatctaatgtctgatgatctgaggtggaacagtttcatcccaaaaccattccctacaatcccccctagtccgtgggaaacttatcttccatgaaaccggcctctggtgccaaaaagtttggggaccactaatgtagagggccctaaatggatgaagtttgaatggttcccttttatagaaaaatacaaatactcatgcttgtgatctaaagaaatcaacctggatgggggctgggcagttctgcctgcctggctcttttctgtagttagagaggctcagagaagagggaggagagaagggcagggggcagccaggccactttatgcctttggtaagaggttcttttgaaaggtattcatctttttcctcgaatcttaagaattttcaaaacttgacacctgcttccattctagcgtgactatataaattcgttccaaaggcaatagcagtactgttgattgtgtcatggaacaatatgggagttcagaattgactgttactcatacaaacactcacatctgctaattcctggacctattactgttctttcagaattcattacatagttcacaagtctcagtttaaaaaaagcaccaggcatggtggctcatgctggtcatgccagcactttgggaggctgaagcaagaggatcacttgaggccaggagttcgagaccagcctggccaacatggtgaagccctgtctctactaagaatacaaaagttagctggatgtggtgcctcttgcttgtagtcccagctccttgggaggctggggtgggaggactgcttaaacctgggaggtgaaggttgcagtgagctgagattgcgccactgcactccagcctgggcaacagagcgagactgtctcaaaaaataaaagtaaaaaatgaaaacctttgtgttcatgagcactgaaaaccattttaaaagacctttataaattcattgcaaaagaagtaaaatgtttgaaaatcatatctttctctcctctagtatagttttctttttatccatggaaaccaatccagaattttggaaggcattttgtgttctgtctttatcaaaagcttgcagtgtttccttttggaaagtagcattggcccaattggtattgaggtagtttctctttatagaagtatttcatctactacacaaaggagggaccagagaattaggatttcaccattatgcagtcctagagattggctggcaaacttgccaaagaaaggcagtgatatcagtagttgctaacgttacaaggaaaggaagaacctggcagtgtgtatccctggcaggagtacacaatacacctgtgacgtgtcctgccacattcacatcacaatccgatccaacctctagattgaaacagcagcctacactggaatatgttaaatgaccacatgccgaggcagaacccagattgtgtgaaattctgtaggacaaatgaccagttttcttttatgaccccattgctaaggggacaatgggaagaaatggggaatctgcagaggaaagaaacataagacccagcaaccagttgcaatgtttagaccttatttggatcctgatttaaacaaatgattgaaaacacacacacatacacacacacacacacacacacaaattctgtgagaccctctgcgaaataagaacacagactggatgtttgctgatattaaagagttactattttttgtttgtttgtttgcttgtgataatggcttttgttattaggttctatttaagtagtaccgatcatttagagatgcctgctgagatattcatggatgacatgcaaaaactggcattggattcaaaagcacattgagcataaaagatgtgaaatggccaggcacagtggctaatgcctgtaatcccagcactttgggaggccgaggtgagtggatcgtctgagttcaggagttcaagaccagcctggccaacatggtaaaaccctgtctctactaaaaatacaaaaagcagttgggcgtggtggtggacgcctgtaatcccagctacttgggaggctgaggcaggagaatttcttgaacccaggaggcggaggttgcagtgagctgagattgcgccattgcactccagcctgggcgacagagtgagactccatctcaaaaagaaaaataaaagatgtgaaacttgcctcaaaagtaagctttcattcctttgttaactttgttgctttgagtgttctgtgtgttacataaatgactcaaaaatcccatctgacacaactccagaaggctttctggtttgctgtcagtcatgggcatatttatgggcatgacacacacacagatgagccatttaaataggattttgagcattgctaattttgcttcagaaagatttgtttgattttgatgccttttgcttaatccctacatatctggtcttcaaatatgaactattaaatcatatatccaacaccttctatatatgtaatactgaatattaataattggcataaataattacaactccacagcactgcagaagagaatgtcattaaagaggctagtcagtaatatacatccagccaatgtttgttgaatgaataaatgaaatttcatttagcatatttaatttttgtgaaagcaaaagagtattacactactaatacattcctcttgttccatgaataattattgattatttaatgtattttacacgattttcaggagcaatcgttatagtaaaaatgtagtagtttttaatacttatgcagaaaagcacataaaacagaatgctcctatgttcccttctttttacattaggaaacatttttttctttatttaaaaatgaaatttttcagtataaactattatatggtaactaacaaaacatttaaaagtactacagtctttttctttcatcaccagatacaaccactattaatattttaatttcctttttagtttttaaaaataaagctgtaataatattaaggagaatttttgtcttcaatttcagagacagaatcctattgcagaaattttatttttaaattttccctttgtgttgcttttccccccaataaaacagaaactgctaggctcttagaaaatgggaactcttccatctagtgaaatatgtacagaaaaatagataataggcagcctaccccttctactaacatatcactgcatcttaaactaaggggtctattttttttttttgtcctgggaaaagtggactcattttcatatctagaattaatgaggtttagtttgataaggactgcttttaggtggccctagagatgagtaataaggacaaattagatataaaataaaatattactcttttgcaatgtttgcttttcctaaacctcttagcgaaagtctctgctgtttcttgtcttttttggctagaatggtttctaggactatgaacaactgctttaaacacagcaaactttctaactcctttttatcaggcttaaatatgattaagacctaccttccgtgtgccttctccctcctcttccctccctctttcaacttctcccttcaaaaaaaaaaaaattccaatttctttgtagtctcaaagctcagctgatatgaaatcgattttgggaagtgagtttcatacaaaattaaaggaaatccattttattgaagaaaattacccggctccttaaagttcctcattttgtagctactttatactttccaaagaatttctttctctaacccacgaagggttgggacagatgctcatattctcattttaccccaagttagttagcaacttggatcaggttaagaagctcgttctgatagaacctggatgagaacctgggccccctagtctcctgtgtcagagagtaggaggttatgcttgggaacagaaggcctacgtcccacaaccatgaccagcccagcgtttgtgggagttcagtccaatatagaatcactctttcaaggtaataactttactgcgggcttttacggcctgccgagccaaatcgaagtcatgccatctccagattgcaggagcagaaacaggttaaagggcctcagtcctcccttaaggtggcctaagctccgcctcctccctgctacatcctgacaggcacattcatctatacctcagcctgtcaatttccactccctttttcaggatgagcctagtgtggacaccaaggtgtccgcgtgtttcgctctctatggcccttgttcttttctgatgtcagccagccctctgtttgctcaaggccaaggctacataattacttagcatggacatttcatttccttcattttatgtgacctgctgtttctcaggcttttggctgcacataataagctttttttttttaaagtgatctattgtatttttccatgttctgttgagctgggaggagtcggcagaacctttttaatatcagatattacaaaatccctggcagaggatgggggatgggggagggtaaagcctggagagacagggctaagcagcttaaaaaccacaccactcacttccagtttattaagtccctacttgatgcaaacttttcgtaggtcacctcaaaatattacaacagcctttcatgataaatattagatgccccattttacaatgtaagaaactgagggtttaagaaatatggcctgggtccaggactgaaccaggattcgtgacaccacaggcaggctctgtgttagtcttcattcaaataattttctctctctcttttcttttctttttctttcttttctttcttttccctccctccctccctccctcgctccttccttccttccttccttcctttcttccgtcgtttcttccttccttcctttctttcttttcctttctttcatctttttggcagggtctccctctgtcacccaggctagagtgcagtggtgccatcatagctcacggcaacctccacctcccgggctctaatgatcttcccacctcagtcaccctagtagctggaactacagatgtgcaccatcacacctggataagtttttaaatttttgtagaaatggggtcccactatgttgctcaggctggtctccagctcctgggcttaagtgatcctcctgcctcagccttccaaagcactgggattacaggtgtgaagcactggacctggcctaattttcaaatattaaagacatgttcttagtggagggcaggctagcatgatgagagatgcttttttttaattttcttttcttttcttttctttttttttttcttgagacagggtcttgctgtgtagcccgggctggagtgctgtggtgtgatctaggcttactgcaacctccgcctcctgggctgaagtgatcctcccacctcatcctccctggtagctgggactacaggtgtgtgccaccatgcctggctaatttttgtatttttggtagcgaagaggttttgccatgttgcccaggctaatttcgaactcctgagctcaagtgatccattcacctcagcctcccagagtactgggattacaggtgtgagccaccgcccccagacggatggttttaagtttctattgactggcatcggctacttcagcagaagctggatccataatgcattttgttagctttgtaagagttacagtgagatctgagttaactattccttttcccaaattaccctagtgatgttttaatgctccttataaaccagtcccctgctgtggttccttcatttggtatgaccccaggctacacagccagtaagaggcagagatggggatttaaaacctgatcttcctgtttgttgcttctacgatctgccggcacttcttgagattcatgagcgtgtggccgtatgatcactaatgaattaactcaatcaatatcaattgaatgtctattctgtcttacatttgtatactgtttaatggtttacaaacagtttttgcaggtataatctcatttaaatcttacccagaaaccacaggaaagaagtaagccaggaaatatcaaaccaccccaagacacaggcagaatacagccaggattttaactcctgtcttttaactcccagttttgccacactgtacaggtctgcggttattggtgtctctttcagatgttgctactatccagcctgggaatatggaaaaaaagtgggggaggagggagcgagggttatttagctgcactttcaaatcaaggagaatggccacttaaatgagactatttcttcacccatagctctgaggatgacattagcagcccacattagaggcagaaaaagaaatctcccttctgaaaagaccataatgataaaacaacacgttttctgaaatgataggaagaattttatgtcgaatatcgtaatggggtcagtagcacttctcagaagggaggtcagcaaactgggtcttggtgagtgcatcagatcaaagcaaaagaaggagaaggggcagtgccttctgtaccgagaggaggagcagaagcacaggcatagctgtgatccagaagcgcagatttggggcccctggttgctggatggccagggggaggatttggtgtgggctggggagtggctggaggctctggaggcttccatgtcagagggtatgcagtcaaagagagataggagaaaaaaaataccccagctcggaatgaactgatggatggaaggaggaggaaagcgcagagatgggggtactaacgttatttcaattcagtagtgttccatgaaaggcacataaaggcaaagcaaacccaaatgccaaaggagctgagaaatcaaagagacagtttgttggaactgggtgatttattgagggaacttaacaacagaaaggtggtcttgggcggccgcaagacaggcagatctctgcgctgttactttccagacccagcgcttatctaccatagggaaagggagtatgcgctccagcaaggtgattaaaggcaccctccagaatagacaagtatgctgcgtgcctcaccgcctataatttgtgcagtgacgttaaggttgacatgttgtcatacaagagacagtaaataaagtaggaatcaaaaggcatttattggactggggctcatcagaagtcaacatggtgaattaacatccaagatagagtcacttttgtctccactccaacatcataaatttgatgattgagagagtgagaagatgctagtgctgtcttcagtgcatgctctgaaaggaggaaaaaaaaatttgcagtcaacatttttacattctttcagggtaggggacagccttttccacagagtgtcttttggtgtacaaatgaaaacctcaccctcaaaaggttgggttagttgatggttcatttggggggaaaaagaaaaataggccggacgcggtgactcacgccttgtaatcctagcacttagggaggccaaggcgggtgaatcacctaaggccaggagttcgagaccagcgtggtcaacatggtgaaaccttgtctctactaaaaaaaataaattcaaagttagccggatgtggtggcacatgcctgtaatcccagctacttgggaggctgaggcaggagaacaatcgcttgaacttggaaggcagaggttgcggtgagccgagatggcgacattgcactccagcctgagcaacaagagcaaaactctacctcaaaaaaaaaaaaaaaagaaaaaaaaaaagaaaagaaaaaacataatacattgtttttaggcaaagatggaaagcatcttattagtcttaccagacatgaaagaatagtgaaggatgtatcctcaaaagacaacctcctgtatttgaatccaggtctttcacgtcctggatgtgtgatcttgtacaagttagtgtcggtaggacagttggaagaacacatgggacagatatcactcaatgacttgcagagacagcctgtgtcagttttgttgtgagtggctcgtttttaccctcttccctcttaatggattttttttttcttttgagacagagtttcactcttgtcacccaggttggagtgcaatggtgcgatcccagctcgctgcagcctctgcctcctgggttcaaggattctcctgcctcagcctcccaagtagctgggattacaagcatgtgccaccatgcctggctaattatttttgtatttttagtagagatggggtttcaccacgtgggccaagctggtctcgaactcctgacctcaagtgatccacctgcctcagcctcacaaagtggtgggattacaggcatgagccaccgcatccggctctcttaatggatttctttgcagttctaaaaagcattgttacagcaaatatatacacaagcaagataaactatctgaactgtgtttcttatttggtcatgtaagtaatgatagtgtaattagtgtgagaaattagtattatttattagtatgcataatattagaatattaattaaggaaaggagatcagcatgttggcaatctgaagactaaatccataatttcaattacatgattttatttattcttataaaacaagaatcgttattcccatattgaggggttgaggcagaagttcaaaactttagttgtatttctgcttgggaaaatagcagagatctaaaattagtcttattagaccacagatatgtacccagccaaatttaatgtgggattttaaagttcatggagttaaatagttcaaagtagcactgtacaaagcaaatagaaaatgcacttttaaacttttttcaattttgcttggtaagatatgaaaatcatttaaggaatgtatttatatttttatgataatccttaaaatatttagcagcatgaaaaatgtattaaaatattaacaaaatgacaggctttttaaaaggacagttctttagtaggtatcatatttgttaaatcaaaagaaaacactcttctatggtaaacagtcctaatttttagctatagattcatatatttataggttggtttatagttatgtttgtcaatgaagtattatagctatgatgttagagccctttttagaaggatgtttatggtaatttttatgtagttaaatagattcaaattaagatgtactacggtaaaattacatatggcattactcctaccatttggagaaactggaatatgccatgcaacctttagtatcgaaactcgacacccactttcaaaacagcaagcatagagaaatcttgtgatttattcctccataagtcagcctcatgaatcctggtgacagcaattattttgatctgaatcactcagtgaccaattcttagttcactgattgcattccatgaatattacagcatcatctgtacctaacataggaaattattgacatcatattttacatagttggttcaaaagggctaactcattagaatgagggagacagagagagcatccccaactcccttgttctccaagatagaattgttagaagaaaaagtaatagaaatgtcagaaataaatcaaatcaacagcatacatttctgcagcaatgaactttccttgttgttagaaaataaaagcaagaagaatgaaccctctcttctacagaaaacttcttctttcacactcaagttgcctgttccctcgatcttttttttgtactgttattaaacacatgaatataaattcatatggggaaaagtttatagaccatggtatgattggaactagtcccagaaaataaaggcatctaacagcatgcatgtacagtatgtgttgttataaggcagttccttgagatttaaaaacctcaagatatgtggtactaaataggaataaggaacaagaatgaaaggaaggtgagaaaaacacgagttttctcttggaaaaatctataaatgattactgaagtaaaatatgtcattcttaaagaatcatagacatttagaaatcagacagagtattaagaatattaaagatcatgtcaccaaaagtcctcacctcttactaaatggggagacgtattttatttctttaatgtaaatgataaatgatcatttcaagtcccacatgaggtgaaactgaccataagaaggagatcattttttgtagcttttttttttttggtagcttctagttaatacttctatacaagaagggattaaaatgaaccataaattctttccagacaaaaagaaaaacccagaaatttctcaatggcaatgtgcatattttgcagcttgtgtcagttaggggaggagagaaggaaggttagtaggctgaaacgaaaggatgcgtctcagtgttttgtgtattctaatagcatgtacagaaagaagtagccctggctaggaatggtccacatgcaaactaaaaagtattgccctacatcttaggcctttggttgccataatgcatggcttgtggtatcatgttcaactcttttttcttcttcttcttttttgagacagcgttttgctctgttgcccaggctagagtgcagtggcccgatctcggctcactgcaacctccacctcccaggttcaagtgattctcctgcctcagcctcccaagtagctgggattacaggcaggcgccaccacacccagctaaactttttgtatttttagtagagatggggtttcgccatgttggccaggctggtctcaaactcttgacctcaggtgatccacctgcctcggcctcccaaagtgctgggattacaggcatgagccaccatgccacgccatgttcaaatccttatgtcttgtgtatctctttatgtatttgaatcctcttcccaattagactgcaatctcttttagagaatgtggcttattgttatcacctgtttcttatccattgaaccttcactggcacataaaatggcgccttatagaaacttgacagtacggtaagtgattgattgacagctgtacctttaaaatagaaacttgctgtcctggatctatgtgattcaggggtaaagcatgctgaagacttaagttctaaatcagattcttgtttgctccctgagtctctctgagagttctaattgctcttttattcaagactcattgttcactgtgtatgtctcaaagtagtttcagccctcatcactcccctgctgaaacccctttgtaagcaacaagaagtatttcttttcttttgtacaactcttagcagtgattgtgataaaatctgtataaatacatatttggaatgctccagacctccatgcaaaatgtactaacaccttcttttggaaattgtcctttattgcttttattttccttccccaagcacataaaaatgaccacaaaggtatttatgtgaaacattcttagttctcttctgaaggtaacaatgatacatactttctgatttgtttttcttttggggttgatcattggaggaaatatttaaaaccatagtgagaagaatttgccttaaggaaagaagatataataatatttctaacagtgtccatggcactttatatgtaatcactcatttaattctcatgaccaatctattcactagatcattaattattattattattatcattagcattttgcagaagagtgaacttaggaacagaaagaagccaagtaatttgttcacagttactcatccaagatctgagcacagaccgggctccacaggtcacaggtttaaccgtgaaccagaggtttaaccgtgtagccttcttgacaggtaagaaaggtataggaaaggaataattgaaatctcaaattcatggtttgcagtgtttaatacagtgagaaagttgattgaattgtctgtggctctttaaaaatatgctttttgggggtcagaatgatactaatctcttcctttaactagtgaccttagagtaagtttgagttatcaggttgcatagctgagccacgttatgtcagctgtgcgtaaaatttgctatcataaaagatatgaactgttgtttccattgctattgcaatttttggaaacagttttttaaaattcttttttgtgtattcgttacaagcataagtccaaatatcccagtatcttttgaatagcttagagaggctgggtgcagtggctcatgcctgtaatcccggcattctgggaagcctagacaggcagatggcttgagccatctttcaagaccagcctcagcaacatggaaaaaccccaactctacaaaaagtacaaaaaattagccgggtgtggtggcacacacctgtaatcccagctactttggaggctgaagcgggaggatctcgagctcagaaggtcaaggctgcagtgaaccatgatcgcaccactgcactccagcctgggtgacagggcaagaccctgtctcaaataaataaatagtttagagagcttgagaaaaaacatagatgtattcctcacacatacttctgccttgaaattgatgagagtctaggacagggcggcagataagtccaggtatcatattagcatcagctcacctgtctcaagatttactgtcatcccagaggacactgacgtcacacaagggagcttcctgctgctctacagtttatgcttgaggatgggacacttaagtctcctctctccagccacgagccatattgccacttttctatgtttagtgaccttaactggtaatttttttttatcacttccaaaatttgtaagcacttgagacttgggagctagtctctagtggaaacatctttttttctctctctctctattgctctgctagctaggtttctttttgttaggttaaaaaaaaaagaatgatgttcttattttttaaaaactaggtactgcgctgagaattacagattggggtttgatcgcaagctctgccaaagctgtgaattgaagcaaatcacatcagcactttgaacatctttgttgttcgaagagccaagcaaatattgaatattgagtgctagtaggtaggtattgtgctgggtgcattgtctgtctgaacttttatcagcaggcatctttcaagctcccgctgagtgtgaataaagtactaggctaggtagtgtggggcacaaaagaataaaaaataagatccccgctcccaagagcttatttatcaacacacgaatagcctcttttaggagggtcagccagtgtctgagccgtgtagagaaaggtcacggtcactgagtgctcagtcaactgaaatccctcaaatctccagtatgttcctgctcagagcataggcgtcccctactgttgcaaacctaagactgcaatccaataaaggagaccagcaattccagttcctgatggtacttagacataccagatactgggacaggcagggctgggcagtgggccagcagctgcaaggttatgtcctggcgttagaggctggttcatgactgagacacgttctctcactaggggagacacaggctcttccaccttggtccgaggctgtcggggaacatggctggggtcttcgtctctgatgtgctttgtgctgaatggaggtgtctgggtcacttttcttatttaagatatcttaaaatgagaatagagaaagcagttttggtaggaatggaaaaagatgtagccactgcagaaaacagtatggcagttcctcagcatattaagcataaaattaccatgtgatcagcaattccacttttgggtatacacccaagagaactgaaagcagggaccgagagagagatttgtacagccataacctagcagcattattcacaatagccaaaaagatggaggcaacccaactgtccatcagcaaatgaaagatgagcaaatcgtggtctgtacatacatggaataattttcagctttaggaaggtatttctcacacatgaagacattatgtgaagtgaaacaagccagtcacaaaaaggacaaatatggcttgattccatttacttgaggtacgtagagaagacaaatacgtagaaatagaaggtagaatggtggttcccagggaatggagagaacggaggaagatgaatgattgttccatgagtacggagttcagtttgggatgctgaaaagtcctggagatggatggtggtgatgattgcactatgatgtgaatgcacttaatgccactgagctgcacacttaaaaatagttaaaagggccgggcgcggtgactcacgcctgtaatcccagcactttgggaggctgaggcgggcagatcacgaggtcaggagatcgagaccatcctggctaacacggtgaaaccccgtctctactaaaaatataaaaaattagccaggtgtggtggcgggcgcctgtagtcccagctactcaggaggctgaggcaggagaatggcatgaacccgggaggcggagcttgcagtgagccgggatcacgccactgcactccagcctgggcgacagagcgagactctgtctcaaaaaaaaaaaaaaaaacagttaaaaggagctgggcgcagtggcttatgcctgtaatcccagcactttgggaggctggggcaggaggatcgctggagactgggcattcagaaccagcctgggcaatgtagcaagacccagtccctataaaaaataatctaaaaaaattagccaggcacagcagtgcatgcttgtagtctcagctactcaggaggctgaggcaggaggatcccttgatcctagaaggttaaggctgcagtgagctatgatcacaccactgcactccagcctgggagacaaagcaagaccctgtctctaaattttttaaattaaaaagatagttaaagtggtacattgtaggttatgtatatttagcaataataataataaaacaacacagtttccttttccaagagacagaaggggtctgtttggttaaatgaaaaggacgtggtacaaagtggttgagagtagttgctgttcaggctcggggctgctgctgctctctgtctgccaacagccaaaggcaagtcggttggagcaaactgactggtcttggctctgcctcagagctgccctagagctttgactgtatgaggaagaggggcaatgaggttttggttggttagatattacagcagccacggaggtatggtttggatttgtgtccccacccaaatctcatgtgggattgtaatccccatgttggaggagggggctggtgggatgggattagatcgtaggggcagatttcccccttgctgttctcatgatagtgagtgagtgatttctcacaagacctggttgtttaaaagtgagtggcacctccccttaaactctcttcctcttgctccagccatgtaacatggctgttttcccttctgccatgattgtaaatttcctgaggcatattcatccatgtttcctgtacagcctgtggaaccgtgagccaattaaacctctttcctttataaattagccagtctcaggtatttctttctagcagtgtgagaacagactaataaacaggacttctgatcctgtggctccagtgtgactgcagcctgattaggaccccacacctggctgatgccgttctgtcactctgtctacttacaagcagagacattcgccattggttaaaaccaaacacagaggcacgatcggctgctacagtaccacctagtctccaaaatggcaggaaagggcgcaagcccacagtatggacatctctgtattgatgggagatcacaaatccataaaaaacaggtgaggtagagagaaaaagaaggaaattctgcaggtgcctacagcttcccattacatgtcttggacaatcttatcttagttgtatttccagagcccctcagtaggccccccaagagcaaggggccaccttctgcagaaacttaaatgccaattgttggtattagccaaagtggagaaagagaatgaaacttactggtttgagatcaagctattgccaaatagacatatcataccagaagacatgtgtttgtgttattaaaaaaagtagttcccccaaaatgacagtctctgcctcataatctacctgccatttacccctacctgccactccctgaagccatcggtaaccttggaaatgcttgcatcagtgatccaagtgtggatctccctacccccaccctttcttattcagaactttgcagtctgagcctcctctcggctaaggatctcctttgggggactgtttcaatctgacatcctggcttatctatagggaatatgctaggaagctggggatattccagaattaaactgcagagaattatgttcattcatgggcctgtagtactatgcaccaggcgaagtgccaagcaaggcaagtgcaaacatggaaaatagaaagaaagaggctctgcttacccagggatctcaaaggcgaaagggtgagtgcattgcaattgcctccaatgtggtcagtgttattgtagggtaaatgcatagaggtagcaacctactcttggggtctggagtaggaatagaaaaaggtggtgttctgggttgaattgtgttcccccagaaagtatgttgaggtcataatccccagtacttatgaatgtaatcttatttagaaataaagaggttttaaagatatcatcaaattaagattagattttactcaattagggttgcctcaaatccagtatgactgatgatgtccttataagaagagaaaaccaagacacagatacacagagagaaaagatggtcatccaaaggtggaggcagagatggggcagatgcatctacaagccaaggaatgtcaaggactgctggcaacctcagaggctaagagaatggtgtagaacaagttctcccctagagcctcagaaatggcatggccttgccaacaccttgattttgaatgtctagcctccagaactggagagagtgtatttccattgctttcagccacctatcctatggtgcatagctgtggcagccccaggaaacaaatgcagatggtatcatttgaacttgatcttgacgttggaatggttcttcaggtgcatcaacaaagacaggaagagataggggctagagaaggacaagagctgttcagaaagcagctttgattcagtgtgatatacccaacaggggtaatggtatgcaccagtgtaccgcaatataccatagatggagttgagttgtgttctggaatgatggtagaaaggtaggcaggaattagcccagacaggggatcttttgctatgctaacaaggctggactttgttcactgagggtttcatggctgaaggattgtaaaggctcccatagcctcactcattctgctccccactctctctctgtagcgtggagcatatcctagtttggacctcatgttgtcttgctctctagagttcttccagatggaaggttgggccagatgtagactgactttaggatgggaactatgaaggctcttttctgaaacatctctcccgcttgcatttggcatgtggttttataactccccatgtccaccccagacataaccttatgattggcatataatgtactcgaatccaaaccatgattaaagtctgttttgttttgcaaattcttggcactgttttgtgaaactcttccagttctagcctggtcctctcttaataaaaccaaagcttttgatagcaagtattccaaggttgccttactcgcgtgccctgattctgtactgatgaaagccatcgttttgagatttaccttggttccattttccaattcttattttcttatcagaaacacacttcattcttttcatttttctcattatatgattaatgattttccaaatcatttctgattaatatgttttccatccaatgtgaacctaaaaataaggaaaaatctcaatccaacataagggactacttgctacacattcttaaaggattattttaaatcttttgagcttctaagttgctttaaatagtataacatgaatgagttgactgccaaggagtatgggattgtagtgattcaaaatttcttcgtgatcactctaagaatgacttcttatttgccagagtagcttcattcagataatagtaattataacagtgctacagttttaaaaaacaatgtggaaaattactacaggaagatgctggaggcctgagtgggagcccatctctgcctttaactaacacaaccgtaaaccattcaactatttttggcttcagtttccagaaaatgaaaaaagacctgattcgattatttctaaactcctacaattgtgaagtcacgaatttgctttttaattacagaggcgatgtgaaccctgaaggagtgttttaagatttgatggcagctggaacccaaatgctttcaggaagatttgaatcttgcaaaaatcttttcagtgggggcagtattctttagcaaagtttgccatctagtggccaccaggactaaatggggctttgcttaaagtgttgaacaaaagactccttgactaagtttatttatttttaatttttttatttttatatatttagcaggtacaagtacagttttgttacacggatatattgtgtagtgggcaagtctaggcttttagtgtaaccatcccccgaatagcgtgcattataccagttaggtcatttctcatccctaacctccctcccacctttccgagtctccagtgtctattattccactttatgggtccatgcgtacacactgtttagctcccacttagtatttgactttctgtttctgagttatttcacttaagacaatggcctccagttccatccatgtcactgcaagagacatgatttcattctttttaagggttgggtagtattccctggtgtgcgtatatgtgtgcatgtgtaagtagatatatacaccccacacattttgtttatccagtcatacattgatggacacttaggttgattccatatctttgctattgtgaatagtgctgcaataaatatacaagtgcaagtatcttttgtatgtaatagaccttatctaagtttcatagacagttgagtacaattatattaattaagttttgaagaattgagtcaactttaaaagtagagaagtgttctaaataccagttaatcatggatcttagttcttctagattttctttatagtttctagatcaccctccccagctccaaagattataaagcactaaatgcttttatttgtttcaaataagagcttgtgaaatccaagtcctggaattacatatcaaggaatatgtatattacctgatctttactgatgactttggattctcatgtcttctcatatctgataaggcagatagctgcctctctgccttatcagctgtaacaatctcacatgacttttgggtagcttcatatttaaaaacttttttaaaaatcttcagtatggcaacttatgtactatttttgtaaaaatattgaataactggaataatagaaatggttcacgctttgaactagcataacaaaaactatgagtattctgttgacattagagaaatgcctaaaaacacattctccttgacattttgttccatcccacttggactctctcttgaacaatattattctacaatccaaataacatgttgcaaaacaatcgcagagtgactcaaatcgctaaacatcttttcttcctgtataaaacttgacaaaagctttgattaaagtctcatgcaggttgtggattcggttccaagcagcgtggtatgtgatggcgtactcaaaactagtctggctcaactgtacagttttataatttgcctgcagggagatattgagaaagtggaacgtgtaaccaggtcgctcactattaatcttttagctggggaaagaacaaatccaacttctttcttgacatctcctcttggttttctcaaaaacacctcagactcaacacatccaaaattgaaacttgcgatcttgtctccccatatcctggcacatttctactgtttcagcaaaagccatttctgtctaactggttacgcaaaccagtaacctcagagtcattctcgatgaccttcctctccctcggatgcagaaccagtctgtcacccagtcctttggtctcatcattaagaatcctgagcagatgcctccttcccttttctcccccatcctgcctgcctactcaaagccaacaccccctctgcctgcccatggcattggtcagtggcctccactctgccctctctcgctcttgtttcccacgtggcacttactcagagtaatcttttcccagtgaaaagaaaaacacagaagatgttgccataatgagttttacaatgccacttaggacaaacctgcctcctgttctgttcacggttatccctctgctcagcgagataaatgcatacctgattgcctcctttggaaaggctgatcagaaactcaaaaacatgcaaccatttgtctctgagttgtcctgcctttccagactaaactcgtgttcatcttacatatattgattgatgtcttgtgtctccctaaaatgtgtaaaaccaagctgtgccctgaccccaccttgggcacatgtcaccaggacctcctaaggctgtgtcatgggcacacatccttaactttggccaaataaacttcttaaattgactgaaaaaagataaataaataaaatgcattaaagagactacatttaagtggtgaaaaagtgcttgcttttgtgcttttgactttgttccattaaagatgcaggtgacctacagggagggaacatcacacactggggcctgtcacgaggtgggaggctaggggagggatagcattaggagaaatacctaatgtagatgacgggttgatgggtgcagcaaaccaccatggcatatgtatacctatgtaagaaacctgcatgttatgtacatgtaccccagaacttgaagtatattaaaaaaaaaagatacatacaggtgacctataaagaggtacatgggaaacaaaagtaaaaaattaaccatgaatacaaaaatgagacaaggggaaagaaatgtaaaaactaaaaggattttgaagtcaacctgggcaatttagattatattttaattatttttatttatatctatatttactgacctttttttgaacttttaatctttatagtctgctgaaaagccagagaaatgacttctggaatatttgtacaaatagtaagtgtcagctaaaatgagcttctacgtcatgtaatattttgaaagagaagaattgtaagtggattgatcatcttggttatattcaagtcacaataaacaaaatattcaaataacaataactattcaattacgtatatagtcaaccaccaattttatatttatttcaatattcaaattctagtacatagtcaagtaacaaaagagaaggatacattttttagaatgcatgtatatatgtatatatgtgtgtgtatatatatgtatacatgtgtgtgtgtgtgtatatatatatatacacacaataagacacttaagaaaatgaatgtcctattataaattgaactctcaactggctttcaatttatgtaatatatataaaaatataaaacaatagtgcaaaaattatttaacaaacaatataaaaattgcattgggataactagttaagtacttaaagaattaggcccacaccttgtgtcaaaaccaattagagagttaaatggaatatacttgagtagagagttggatataaaacaaatcataattagaataaatgtgttgatttattagaacgatgaaaaggttgaaaggtctttcttagttttgatgtaataaaaatattcacaaagcagcacatactgttattttaaaatagtaaactgcattacaagaaaataagttgaaaaggtatgttgggaaaatatttgaagcaaatatataaatgaagaatcaaaacatcacataaacagtttctacaaattggtaaggctgcagcaatgtgaaaactgatttcagaagtgtctgtattagaagtacaattaaaagtagagaaattttaaagaaaacatgcaaaaagttggccgggcgcagtggctcatgcctgtaatcccagcactttgggaggctgaggcaggtggatcacgaggtcaggagattgagaccatcctggctaacacagtgaaaccccgtctctactaaaaatgcaaaaaaaaaaaaaccaaaaaaacaaaaaaacattagccgggcatggtggtgggcacctgtagtcccagctattcgggaggctgagtcaggagaatggcatgaacccgggaggcggagcttgcagtgagccgagattgcgccactgcactccagcctgggcgacagagcaagactgtctcaaaaaaaaaaaacaaaaaaaagaaaacatgcaaaaagtcttgaacatatattgagataaagactaaattttatttgatactttctaagttgtcaatattgttatattttcaataaaattaataaaacaaatgtatgaaacatcctggtagatattaaaagagactattttagaatctacaggactagtaatacacaaagtccctaaattttaacagcattctagatatactgttgtattaaatttgatcaagaataaatacaaagttcccattaacacatttattcaaggtaaggggaaataaaggtgattcataggagtcctgggtaggcccaggtaagttggagaattttgtgtttaagggtagggtcaccctggctgtttacagggatcatgctcacgactatggaaacaaggagaatggtgaaagagactcaactcaagacaacatggcagagtttaagagtgctgtggcttggatgtagttcgtgcctcccaaaactcatgttgaaatttgattcccaatgaggtaacgttgggagctggggcctagtgggtggtgtttggttcatgaggacagatttcttatgaatagattaatgcccttcctcggggatgagtgagttctcactgtcttgggaataggttagttcctgcaagagcaggatggttaagaagagtctggctcctcaatttctctctcttgcttttcctcttggcacatgatttctacacacacctgatccccttccggctgctgagtggaagcagcctgaggccctcaccagatacagctgcccaattttggactttccaaccaccagaatcatgagccaaataaacctcttttctttataaataacccagcctcaagtattcagttatagccatggcaaatggactaagacagggaacaacgagagctttggtatctgagagtgctgagttggaaacctagctatgtctctttactcttagaaccctgtttcttccatcgtgcaactgagctaccactaactgtagtgctgcattgctggggagaactaataatgcaatgtggcaaggaagatgttgctggcttttatttaacagcactcaatcaatcaggtgatgccaggcctgcttctccatagtgcagtgtctttgatatttactgcaatgatgttggctataattctgttacatgataaaagagatttcaagagttttaaaaaccccatcaaaaaaagagttcattctggaaccacagatgtctggtttctttgctgagattcatatagagtaagatcattgaatttagcaatggatttcagacatcaaattctacctttaaaaacatcatttaaaaactaaaattagaatcatcaaccgcttctcaactaccatatgtcagtgattatggggatccctaaaggatatggcttttcctaacgtgcaaaacagtctctcataaaaaaattgatgcacatattcaggtgaagcataatactgattcttgcctgtggcagaaattctgttaagtacacctagcaattttgttggagagttctgatttcatctgttaatttcaaatttctggacagctctttgaattcttttgtcaaccttatgtaggaagacttgagagttgttagggctccataggggagtatccttagagaaggatggctccctaccaagcacacacagatgtggggcactagagtaggctgagtaatcgccccccaaagatgtccatgttccaatctatggaacctatgaatatgttaccttatgtggcaaataaaattttgcagatgtgattaagttaaagatcttgagctaggaagattatcctggattagctgggtgggcacagtgtaatcacaagggttcttttgagtagaagagacagataggaaagttggagtcagagagggagataggacaacaggtgcagaggtcagaaggaaattgcagttgctgtctttgaagttgtggaggggccatgagccaaggaatacagcagccgctaacagatggaaaaggcaagaaaacaaactcttccctgaaggctccagaaggaacacagccttggattttttttttttccccagtaagactcatttcggactcccagcctgcagaactgtgagataatacatttgtattgttttatgccactgtatttatggtaatttgttaaagcagcaatagcaaacacatacaggcacacagtgtgtagaaatgtcttctatgtgtcttttttgtgtgtccagatgaactaaggtagaactgctgtaaggaaacctgcagcactgttgcctgtgttcatttttttgttcttattcgagacagggtctcactccgttgcacaggctggagtgtactggtgtaatcagagctcactgcagcctctgtccttccctggcccaagtgatcctcctacctcaggctcttgagtggctgggacttacaggcatgcaccatcatacctggctaatttatttattttaatattttttgtgaagatagggtctcactatgtttcccacagctggtcttaaactcctgggctcaagctattctcctgcctcagcttcccaaagtgttggaattacaggcaggagccgtcacacctggtctcctcctgttcatttttatttttgccaacagcatcacaaaatgtgtttggccttttgagttagccacgtgattacctctgctccaccaagacacgagaaggtcagcagtcactagtcattctcctctccagcaaggtatagtctagtaatcagagattcagagtcctgggtaggtgaaggtatggggtgggaagtgttcctatctgtacaagacctttcatttatttttaatctgaccttgcttttaaatgtgcatagtgcttatattaatcaggagttgggaagcaatcgatgggcatcagtgggtaggtgctggggaaggagtgaagaaatagcactgaagcactggaaataaatggtcagaaaggattctgttggctcttctactcctggaacccggagaacagctccaggtcaaaaggtgcagtgaccctcttgatctccgagaggaagaaacctcagatgaaagactgtgtgtctactgggttaaacacaccaattctctattcagactgcctagaattgaagcccactacccttcccctggctctgagagcttacgccagttaggaacctctaggctcagctttcctgtgtgctaaattggtacaaaaatattatcttgaaggatggttacaataattaaatgtgaagtgctcagcacataacaagcactctataaatgtttaactagtattatattaataatattataaccttagggaacttccaaattttgagaggaggataaggctcctagttctctctttcttttaaaaaaaaacatttttacaatgtcttctctacttcctctgttacataaatgaggtaaagataggctctgtgtattggtccccaggttgtttatttcttcaatgggggttgaaatgcattatctcagaagcctaatggtaccaatctcaaatgtttacacacccagctgttatttatttatttgtttgtgtttacagtcagggtctcactctgtcatacaggctggagtgcagtggtgcgatcatggcttactacagcctccaactcctgggctcaagtgatcctcccgcctcagcctcctgagtagctgggaatacaggcatgcaccaccaggcccggctaattttcagggttttttagttttgttttttgtttgtttgtttgttttgtagagacagggtttcactattttgcccaggctgttctcgaactcctggcctcaggcagtctttcaactttgacctcactgagtgctggaattacaggcatgagccaccagacccagcccatccagttgttttaaacctagcccgaataagtagttttttaagcccttttgcctgccttgcataccccgtgaaacctcatttccacctgctgaccgtaggtaagatgcagcctcgcagttgtaaggcataatctgctggggccttcagagctctctgacccagagactgccaccctactgctgaatgacatcacctcgacacgtgagacccgtctgctatctcctctcctgggaattccctggcccttctccccttctaagtagcaacctctgtgtgccatagcctctgcacagaatcctgctgtgaggggcttcctcccatgcagagttgtcataattacccagtaaagctgtgtgtgctttagccacctcctagacatcgtatctttttccttgatcagtccccaaatccctcaggatcttcttcttgtccaactaacaccaattcccaataaaggaccattcaaacatatttttacttctccgcttcatcataagccaaaatagaaccaagagacagaatagtcaatgtgttagttttctttagagttgcccagtagggggtatgaagtgccggctggatataggaagattgtcagggttgccaaatatcccaaatgattatattctttccatcatctcttaaaaaaaaaatcatactgtgattttaggcacatctgtaggtactttgcaaaataactttgtctaagtccattcaggctgctgtaatgaaatagcatcaattgggtggcttatcaaaaatgcatttatttctcacagttctgaagctgggaagtcgaaggttgaggcagatttggtgtctggtgacaaactctccccctctgagtttccataaattttagatcttttactccattaccttcatagtatctgtgaggaccaccttttctggggtaaaggaaaccatgatttcattctgaatgctaatgcatatgacatagagtacctctgatgatgttacagtaacacacagcttcccctgtttcataaatggtaccttcttactgtgttctaatatggtggaaggggcagtggatctctctgggacctctttgataatggtgcttaatcccaatcatgacctaatcacctcccaaaggcctctcctaattccatcacattggtgattaggttgcaacatatgaattttgagggaaatgcaaagattcagaccacagtacctaccaaactagaaaagagaaattgaaatccacaaactttagccttcaaattcagtagaaaagccccacttttccaagctaattgagctgatgttaggacccaaatgaactgttctttatgaggaagtagagaacatactgcttgtgtcaaacataatgagttggatctttcaaaaattaaaaattcgtatttcaattaatttacctttggtgagtgtctgattcataagtaagaataatggaatacttctgtggtctaataattaaaaagtaattgggcaaatacattttttgaagtattttgtcataaatcatatgaatctccccaagttctactatttctgatcttaaatttgagaagaactttttctgttgtatctgtcattcttatagtgttctcaactaaatccaataggaaaagaaaaattgagattttcctcattcatttctttgtcactatgtagctcatagctaattcaatattaggagaagtgagcttcttttaaacatatcttaaaagagaatgtctatgatctcattggacatatccaatatcactctctgagaagtcttcctcttgttctgtcctgtaattttatatctttgtaaccaacatcgtttgatagcccatcacctcctctcctcagatcctcatttccttccttatctgagttcccgtgatggagacagactttctcaactctctgttcctctctccctctgtcttattttcctgggaaatgtgacatcagcctaaacctgactctcattcactctgcccttgaatttcagcagacacacatagtgggggaaaaagaccactctgggcactgttttactggaagttcatgaccacaaatatccacctgcactcaattctacctgttgattctgttttcctggccagtccactcacctactcctgagaggtctctttcacaccttccttgtacttaaatctgcaacagtttctcccatctcctcattctcggttaatgatctttctcctaatttcatctgagaaaatagcaactctctaaaaagaccttcccactactgctaccattaaatccacccactggtacccaaatcttctgcttccttcctgcgacagtgggtgaaccaactaagagtctatctgagccaaccactctgcttatgcatggggttccagccccttggcccaaccaaggactttgctcctacaattatctgtgatctctgttgaagtgtcttttgtttttcctttcttacctgtaatacctcctattccaagaaaaaaaaatgtcttattcctgcatctctttgcagctttgttttcatttttctactctctgcttaagaaaatctccttgaaaaatgtgtgtccacccactgtatcaaattgttcacctcgctctctttattgaactcatttcagactcttgactctgtccccccaatgacttcacttgagatgctatcatcagtggcctctacctgaccagatctgatggtcagttctcagtcttcatcttacttgacctcacctctaatgggcgagatgctccaggaatcagttttcagctcctctttcttgggaaatttctcaagggaatttcacaaaagcttgtggttctcaagaccatctatatgccaccttcctagtttatttctctactcacacctcccttctggaccctgggattatatatgaaattgcctacctgactgctccacatcgatgtcctacagacgtctcaaaattaatatccctgcaaaagtattttttgttttctcctctgatcctgctcctccctaaatatttttcttctcaggaaatggagcaatcatgtgaatggttgctcagccccatctccccccttccagcttccaactggactcattcttggattctttctctccaataagacatcaatctataggtcaattctgtcacactggacttcaaaatatatccagaatcctaccacttctcaaggtgtcctcgcacgaacactttagaccaagcccttctctcttatctgaactattgcaatagtctaaaaactcatctctgtgtttcctcattagctcttggcagtctccacacagcaggcagaatactacttctgagatataaatcaagctaggtgtccttttcaaagtcctccagtggctttcctcccaattagaagaaaatgcagtccttgttgtaactttgtgaacctatatgatctggccactcaacgggcttcatccataggcaacttcttactgtcctttctgtgggcaaagtgtgttcctgcctcagggcatttgcctggacttttcttctgccatgttgtctgactccttcactttattcactttgttctgctcaaaactcatctttctaagaggtcaaggaggtctgcctattgtcaattttatctctctcttttttttttttttgaaagttgtccattctaaatgtagagggtgcctaagctagcaatgactatggacgaatgtcttttatttttggaaaattaaatatttaagatttaggatatctagatacttacgaccactgtacagcctagtggtagaatcaagaccatcgcaaactgattttgaatgaaacaagatccatctttggcttcctccatttccgtttccccatctctactttcttaagccctcatccagttatccaatactgtgcaggtttatgctccaactccctcccaggtctgctcttactcctgaagtgtccatgcaccaaagctacctacatcatcttctccccagtctctggaacttctcattggtagttaggtgttgggaggaaaagccgtttgctttaactacagctgcaagctgaggtggatggccttcccttaagtgtcttcatcttttattacttccagctttgttggtaaatgatatgcatctgtgttgagtagtcttaaggtcattgccctcaaatatttatctgaagctcattgatgagaaacaacactcagtgggattgtttaatagacacagaattcattcagtgtctaaaactccggttgggagctagatttttacagttcagcaaatctgggttcaaatcctatttctgctgcatatgaattttgtagccttaagcaagtctctcggctctttttttttttctttttttgagatggagtttcactctgtcgcccaggctggaatgtgatggcatgatctcagctcactgcaacctccacctcctgggttcaagtgattctcctgcctcagcctcctcctgagtagctgaggtcacacacgcctgccacaacgcccagccaatttttgtatttttagtagagatggggtttcaccatgttggccaggctggtcttgaactcctgaccccaggtgatccacccacctcggcctcccaaagtgctgagattacaggcgtgggccaccatgcccggcctcaactcttaagtctgtttcctcatttgtaacccactgtattagtccgttctcacactgctctaaagaactacctgagactgggtaacttatgaagaaaagaggtttaattgactcagttccacaggctatacaggaggcatggctgagaagccatcagaaaacttataatcatggcagacaggtgaaggggaagcaaccacatcttaccatggtggaaaaggggacagagagcgcgaagagggaagtgctacatgcttttaaaccatcagatctcgtgagaactcactatcacaagaaacagcaagggggaaatctgcccccatgatccagtcacctcccaccaagtccctcccccaacactgggtgttacaattcaacatgagacttgagtggggacacagagccaaaccatatcacccagggataaagagtaatagtcttcttcataattgatatgaggattaaaggaataatgctcactgggtgcctgtatcagtaaataaatgctaatgttttttgtcattgtttttattactattcttgggtcaagccaaatctataaggagttaattatcttatctaacctattgtcctttctctctgcccagattattttactgaatgttgctatggtgggaaacctttagcttcccctgaccgtcagtctaagaagcagcttttcagaacccactggggcatttaccggaaggaatgctgttcataagtttacacaatgttcctttttatggggcctccaggagaaatcggtgtctggtgttagtgccaaacagagtcgttcttttgagcatttggtttattttaagcttatggatggtaaattacataaccgaccgagtttcactttttgagttggctgctcgaaagcttacagccagatctatggctcatagtaagaagtacttccattattatgggatgcatttcgagccttgtttctgcattttgtattgccatctttgctttgctttttttcttttaatccctcttttatgttatttaagtgtccttttaaaatttatccttgtaaattgccttaaattatttctgaaacaaggtgaggaatagatagatacatagctgtaggtagatgaaatatggttttaaataatttgtcatagtgcttatatttaagagaggtttaatttttataagaagatacttgtggcataaaatgaattttccaattggtaaaatttcagactttgcaagaaagcgcaaggaaaaagtataaggtgggaatgtttttgcagaaaggtgatttgggaaactgctggaaggggaacctctgaaaggtaggcaggtaggcagatgatggctcgggtggaaaagtgcctgttgtatgactggattggttaattaaccattatgtgatcctccaaggtcagcttataaaattaattttcacctttcaaagagaaggtaggaagaggtttaaagccatgggctcaggagtcaaacatctggatagaagttctaactctgccattgccttgagcaacttacttgacttcacagtgcctcaatcacttcgtatatgaaatggagatgaagggctcatggagttgtcatgagaatcagaggatgagctagtgacgtgtttagaatagtgactggaacttagcaggagtcagtgaaactctttgtacctcttcgcttgagtccctgggtttttaaaaagttgcaaacagtccattttttaaatgaattgcatagtaaggtaagtcagatactggtggggctgagtacatagcaatatttatgacaagtatgaattttaataaaaatatatgcagttcattagatacatcatagaattctaaaatctatcaggagtattttatggcaacttcagagaaatggtatgtttctctttcgtggtctttccaaacaaagaggaaatcaaaattgctgctgggaaatattttatcctgttatcatcctagatttgttcatgaaatgttacactatgaatagcctttcttgtcttttgccaccaaaaagctaccattttctttcttatatacatgttgcattttcttagatctacaatgaatgaaatgaactggtcaaatggattctctgagagtgtggaaaatttaagacatgaatatgcctcgccttttcccctctcctttctcacttcctccactccctgtaataaagagaattttacttttctctactcagtgcttctccttccatccccatgtaataatgttctatcattgcccccgactctggagcatgaaatctgaagtttgggcgcgaagacaattggctgaagatacaaaataaaaggaatcaggtttttgtttcctggctcttcttgtttagaatctgaatgatgggtacaatagggcaaatgtaaagaaaatttttaaaagcccagaaactaagcaaatttacatcatacgaagctgagggatataggttgaggaagagagagtcaggaactctgtacgtgggagagtccatttttgatgtttttgtttgtgctagaaagcataggtcctcaaatggctttggttatgagagaatcagggaggaaaggaaaaaggatgtttgagaagtgttgctgtgtggattataggatcctgtgttacattctttgagctacgcaattaaaaattggcatttgattttcaagtttttgttgctacattgtattcctttaagtatgactgggctatcagagaactgggatttattagggttacacaatcttgttctcacaatcttgaatgtagcaagtgtagtctacctcaataacacaaaatatgttttaaatttatcattgaggtttagtgtgcattccatgattattagtaatttcaaaagtatgactttttccctaatttcattgcttttagttatcttatttacttctcctgctatctgcgtctaggtggtaaataaacaaatgttgccactctcattactgagaaaaaaaaatgattgattgttggtctgaaaaacaaaacaaaaaccaaaaaaaatcccgtacatcaaaagacaacccagacactttggtgagaaataaaggaaaattagagaaaggttttcagttctgtagaagctggaatgaaatagagtgtgcattttggtggctaaagaagtggagttcagtggaagctgcaagcagccagatagagattttgttcaggaccctaaggagagaaatgaggactggaccaagaaatagaagtacactggcactgacatgaaaacaaaggtttatcacagatcggattactgaagactgaacttcagaaatgcatggaaatgttcaggaatgagagaacacgggaacgtgtatgtattacattgggtttcattttctgtttctgtccttgcacttacctacttgaattccccaatatctaatagattcattcattttccttatctcccatcttcagctccttagcatgagagcatcatcttttgcttgggtaaaagtacttcctagctgatctccctggcttctctctagccgtcttccaatctgtcttcaactgtcctgccaaagtggattttaaatggcacaaatctgatcatgcctcttgtgggaaagaaatcccactgctcttagtagaaagagaaaagatccccagcgtggccctcatgatcttgcctgataatcacctgcctctctaacctcatcttctcctccctctcttactttattctccaactgcttaagctgggccttctcccttctaccacgtagagcttccctctccctgcctttagtgaactccttcccacccttgagcctcagctcaggtagcagtgccccagagacaccttttctgacccttctaattctcgaagatgtcaaccccctctacattctcatagtattctgtacattcatgcaaagatcttattagcttgtaattctatgcttatgtgattatttgattcaaattgccttgccccctggactttaagctccttgaaggcaaggacattggttgttttacttgtcgttttcctactggtgcccagcagagacacgcacttgatgagcagcactcagttgatattgttgactgaatggatggatagagacagttggtcctttttttgtttttactgaaattagcaagagtttttggtcaacttaagcaccctaggctcttcatagttgcagacgtactgtgaagggagagtctaatgagtatttaagcaggtgtctgtcagaagacggacccttctttcctaaaatcgcagccacagaaaagccagaagcacttaagcagagtcaattctgacaaaaaaccttcagttctgctacagaaggcttctttaggtctttcatttcttattatgaaagagttctcttcttgaaggaagcacttcatctgatgtttaactctgactgtgttcttgccactcctaactaatagtaacatagaaagtgaatagtaaagaaacattaatcctcatactttcaaaagactggccaggaataaatcccttggatttaaaaacatatatcttccatcgatattatctacatttacctttgattacttttaatttgttgatttttgtcattgagcctcttcttaacgcttttcaatattttgcttttaagatatctcgtattataacaaaatagctaatttagcaattcattaggtttgtaatttagctacatgagccaagcagctagtttttgttgactttatttgattatttagtaaatgaacagttatcacagacaagtatacaagctcaaaagctttcaatttcttgctgaagttgaactattgaccaggttatttttagactcaacagtctggaattttttttctacttcttaataaaacaacagatattttcacatttaaaagtttcagtaattctgcatgtactgccagttcaattctaaactctttgctgtgtctaaactcttttgctgggacccaggtagtcccagcctgagttcctgattctcgtctccattcttgccttttcttttttccctcttccactcccccgcctcctccacaggcttggatctgtgaattcatcattcattccagaaacactttgaggtgcttttaaaatccatgtttaggccgggcatggtggctcaggcctctaatcccagcactttgagaggccaaggtgggtagattgcacgagctcaggagttcaagaccagcctgggaaacatggcaaaaccccatctctacaaaaaaatacaaaaattagctgcgcatgttggcacatacctgtagtcccaactactacttgggaggctgaggtgggaggatcactgtgagcctaggaggttgaggctatagtgagctgagactgcaccactgcactccagcctgggtaacagacacagaccctgtctcaaaaattaataataataacaatagtaataatagtacaagtttagcatctataattggaatcagagcaaaagtgccaatataggagttaatgtctctttcttggtgtagtccaaacgtaaacactattgggccaatatggcagctcccctgtcctagggacttgggtctgtcttgtcgctctcttctcctgaatgtgcagctttcttctcattataaatggctgtcccagctctcagcagtgacacatgacttgggtattggcacataccatttctacatctgcccattgaccagaatctagtcccgtggccatccaagttgcaggagaagctgggacattcatcttagcccagcagccgatgtctgtctctattactgtaaatgaagtaaagaatggatcaggaggggacaactatgaatctttgtgatacctactatgtttcagtcactgtgctaagtgctagggatatagagataagtaaagactgaatctggtggagaactgagtttagaatgaggacttggggtagatccctgttgtctgaagatacccttcttcgtatacactatagaaacacaatttgttctgtgtatgttctgtatgtaaccttctgtgcttttgcatcttctgcccattgcctgggatcctttctccctcgcactttccactgaatgcaattccgtccattctgcaaggccagcccaagtgtcctcatctttgtgaaggctctatttttccttccagggatggttaggagttgttcccttggcgttcccattgctctgaaacactgtgttctctttcctctgttttttgagatggagtttccgtctgtcacccaggctggagtgcagtggcatgatctcggctcactgcaacctctgcctctcaggttcaagcaattctccttcctcagcctcccgagtagctgggattacagacatgtgccaccctgcccagcagatttttgtatttttagtagagacgaggtttcgtcatgttggtcaggctggtctcaaacttctgacctcaggtgatctgcccacctgggcctcccaaagtgctgggattataggcgtgagccaccccgcccagcctcctcagttcttatacgtgcctagaggaatacatggattgtattttattcatttcatatccccagcaccttagcacagcactgagcaaacagaaggtgctctataaatgtttgccgaatcaaattagttagtgcttggaatccttttgtggattcttgaatgacaaggtgggtggaatatctaatgaatgggggaatctctctcatattgtgtataaaaatatcatagttaataaaatgttaagtgaattccaaatcaaattcagaatcatagaggggatagatcatttccccagtgttttcatcttattctaactttaagctaaatttttattctttattcagttattctagtaaaaatgtggtgatagaggtgatgaaggggccttaagaaaaaacttgaggccgggcacggtggctcacgcctgtaatcccagcactttgggaggccgaggcgggcggatcacgaggactggagtttaagaccagacttcctaccgtggtgaaaccccatctctactaaaaatacaaaaatttagccaggctggtagcgggcacctgtaatcccagctactcaggagcctgaggaaggagaatcacttgaacccaggaggtggaggttgcagtgagctgagatcatgccactgcactcgagcctgggtgacaagagcgaaactctgtgtcaaaaacaaacaaacaagcaaacaaaaaacaaaaaaaaacttgaatttgaattatgtgttcttttatattacttagtgttcctctcactgaagtttctttaaaaaatcaaattgaagtcctacctacttggaatatatcatgtatggttcagaaaatggtgagggatttttttttttttccaggatgtacttcaagagccaatttacagtgtaattcagaaattttgttttactctaggtttctgatttaatcactaaagtgtccttattttctgtctatagactatgttattttccttttggaccttcaaatccacaaaggtttaactagtatatgataggaccatagaattttcacagactatgtagattatataagtttcagagtttaaattatgctattgcttatattactgataaacaaaacatggaatcattttgggacccagtttgtcagttaaataaggagattaaggcagaatttttttgtcacctctatcaacctcttagactattaataataatataaaagtgttgctttaaatcatagactttaaaggccaggcatggtgactcacacttgtaatcctagcactttgggaggctggggcaggagaatggcctggagccaggagtttgagaccagcctgggcaacaaagtgagacccctgtctctataaaaaaatttttaaaattaggctgggcactgtggcttacacctgtaatctcaacactttgggaggccaagcttggcagatcacttgagtccaagagttcaagaccagcctggccaacatggtgaaactccatctctactgaaaaaaaaacaaaaaacaaacaaaaaaaaaaagtaaaagtagccaggcatggtggtgcacacctgtagtcccagctactcaggagtctgaggcaggagaattgcttgagccctggaggtggaggttgcagtgagctgaggttgtgccactgcactccagtctgggtgacagagtgagactctgtctcagaaaaaaaaaaaaaaaaaaaaattaagcaggtgtggtggcatgcacctacaattctagctacttgggagtcggaggtgggaggactgcctgagcaaggcaatcaagagttcaaggctgcagtgagccatgattgcaccactgcacttcagcttgggcagtagagtaagaccctatctcaaaaaagccttgagaaaatactggtaaagtgttgagaattaattgtcttttatttttccaggagcctaaaggatgtagtggtggttaatctgtgacatgaaatcattaacataccttcttaggtctcaacagaatatggaatgacttgggcatgggtgcaaatttggatcaatatctgtgacacactaaagatattgcgtattagaatggctgatatcataccaatgaacagctgaatctccacatgtcttaatgattcatctttttaggtgtgacatttacatggtctttagggagaatattaggatcagctcagtccctgaaaactgggtctttagggaaagatctaaataatagcttacaaagaatattgacttgggagctctcacacttggaaggcagccttatgtagtttattatatctaaatcataggtggtatgagatctaatgaattaatgaggtctgagtcggatcaaattcgccttccagagttatgtttatttaacatgctttaacccagaaaatgaacatttgccagcgagcaccaaacaactgtgcgccgcagtgcttgagcgagtcaggtcctgaggccactctggcgatcctccttacaattcatgtgaaatacctactgcaggacaaagcatctgacggtttggaggatgtttctgtagtcctaggaatccacagtgaattcgagtctagactcagtcatttttcagggtcaggggaggagggagaagtagcaaatcagatatgcccaaaacgttacagaggtaacagtgaatccaggatgctgctgtcagcctgtgcattgtgaagaaggcaatcataggcgagcagccgcgggagcaggaacagcagcgtgctaagaagcagtcacataaacagcagcaggagtaggcctcctgcttttcaaaagcagagtactgcagggtcgcgaaatgcaagacactcagatgtttgaaaatctcccgagttgagaatggctactgtaaaagcgtcaccaagaaactctgacgatctggacagtcctaactctgtgttagcaatacttacttccggaaaattaatgctacttcttgtagatttttgcaaataggaaacccccttgaagaagatctcaaattacgccccccacccccaaaaaaagacaaacaggggagaacaaagttttggcatgcctgcaggaacggtggcttttttagaaactacctaggaggcagaagctaagtgatttgctcatgcctcttacctgggagtagaaggtgggaagaaatggaccgaggctgtgacgagaagacaaggcacagtgcagcttggtgaagccacacgctgactgcgttctgccccctcttcatgcagtgctgcgggctggtgcatcgccggcgagtacgggtgtcctatgtaagtttctattgctgtagaattgcagctgggagctgaaaatactattcgtgtctgtctggtgcatgttgcctctttcagctgtttttattccctgtgctgaaccaaccagacagtcgatcatttcgtaccatgagttttcaaggaatctgaggtataggagattctgagatatttattttttcccagagatgtttttatctgtcttttgtgccttgtgactttgataaggttggaaataacttgcgcggggattggtttgagaagtccattgtctcagagatctgcctcattcaaaccagttgatactctcttttacctagagtagtcctgttttcatatttgaatgatgggatggtggggggaagaaataccacggagtttgacaaattatagataggcgcagaggctaacactaaatcctattttgagcagcttcagaaaaatagtagataataatcactggatggatgacacagctgttgcaacagctttatcatcctgtgactctttcactgaaatagcccttatttcatggccctgctgtgttttgcaaaatggctgtctgagtattaaattctacaaggcaggctcacacaaatattgaagtgtatcactacttaacatgattggatgctaattgcaatatgctgtgccttacactagccgaccagctccgagcaagcgctggcttgattttcatactccttttgcgagcagctactctattttcaggaagggttgtaaaagggaacaggaggtttatgcaggctgggcaaactgcagtgctgaattgcttaacactggtttgacattcctgactgcaaaacaaatagaaaattgacaaagcaagctaatcaatacttaaagtattgaaggtaaagaaacccgtgaccttggaaaattggccacagaaaagagatatatgtgagacttacaggacaaacaaggtcaaaatctgatatgatctcaataataaagttggaaatggtgacggggtggggtgggagggcagggagagataactatactgtcaaaccttaaagagagtattcaattttattaaataagtaaaagcatgaaaaaccccttttatttaaaggtttttgcagttgttacatatttggtgccatttgtcttttgaatgcaacagttgacatatcagaaatcaatggaggagtcaggtagccagccaagatttctaaagacgacatctgcagggatagatggtttttatccagtcaaaaaattaattgctttttaaataagatttgggaataagtgttacaaactttttagagtataagattagccgcctaaagaaaaccttaagttaaaaacaaaaataattttaatttaaaaatccatagtttctagaatagtgaagagtgagaatttcttagctttctgtgtttctgtttattcttgtataatgaattagaagaaatccatggttatgtgtgcctattgaatacaaaaattctgaaataaggcctccaacaaagcaacaaatttttaccctacttattttagttcttcttcttacattgaacatgtaaataaatagaaagaagagacaacataatctggatttttgaagtcttgattgaaagctacagagacttggttcatctgctcattctcaaatatttttaccctgtattttgaataaagtaccacaaaatatagagcacagatgtcttttaaagataaaagaaatgcatacccttggtcactagaaataaattttcgtttactttagagtgtttttctcttgggaagccttacctctaacccacctgctgctgttttaacctctcttctttgacactttatggattgcagttttctttacagatggccaacccagagtggaagataggttaaatcgaaacctatttttttccttgaaggaaaagaacccactgtgcatctatctgtaacggagactttagatttgaccgcaaagcagatgagtctagaggctgctcattgaatacaaagggcagccagacccctatgtggtactggtggttaggacctcgtcatactggttgggctgtcctggtgtcctttctcaaatctgttgtcagtttccaggaatcacaattctggtaatactggaactaaatgtcaatatttatatacatacatgtatgcatatatctgttagatctaattacataaataatatattttagatgtaatataaatcaattgataaatatgcacctgtgtgtgcatgtgtcttaatctttcactagttcttataccttttctttttagtatgacagctttcttaagaattcctcctactcaaacattgtctctcagaaagaatatgaaagttatgtgggtttcaaagaaagttatactcatatgccatagttctttatttctaggtttttacctttctaagctgttgcttttattaggttgcctccgctcacttgtttaacgttacattcagattcaaaacttctctgagcagtgggctcacagaagtaggctgcagactgtagtcctgtcttgctctttaagactcaatgcataagctttattcttgacattattattgatgttcaatatctagtcttcattcttttgtttactcctaaccatcattcttttagaactcagcttcgcagctcagaagtaattcctgtgtttacctaaactgtcttgctatttcgttaaggacatgaaaatctgtgagctgaataaatactcttaaatttaaaaggatatataaacatggtaagctctgtgtgcatttctgtgaaacacttctcaagtattgacatttgcatgctttggagagcagagacactaactctttttggtaagctttttgaaaaaatgttttaatttttgtgggtacataataggtgtatatatttatggggtacataagatgcttggatacaggtatgcaatgcataataatctcatcatggaaaattgggtatccatcccatcaagcatttatcctttgtgtcacaaacaatccaattatacccttttagttattttaaaatgtactattatcgaagtataacatacatgcagaaaagtgggtgcagaaattatataagcattgagcttgaagaatgttctcaaagcaaacatgcctttgtaaccaacactcaaatcaagaaaccaagcattgtgagcaaccttctcctcccttccaattccagctgtctcccacctcccccagggtacccactaaacagacttctaacatggtggattggtttttcctgtttctgaattttattcaaatgaactcaaacagcatgtactctcctctcatccagcttgtgttgctcaccattgtattcatgatattaacccacgtggctgcacatagttaaagctgcaatttctcgtgctcacggttgtacagtattccattgtgtggctctgtgatgacttagtgatccatgctactgttgatgggcatttgggtagtttccagtttggggctatcataaatagtgctgttataaacagttgggacatgccatattgtgaatgtttatgtatgcatttctcttggatgcaaaccaaggaatgaaactgccaagtcatagggtacagtataaatacattgtgcttaagtagatgctggtcagcagctttctgaaacatcgggtcaatgttcactcccacctgtgtgcctcccccctacacctagtattgtcatttgcattttagcgtgtctgatgagtatgtcagagtatcccattatggctttgctgtgcatttccctgataactaatgaagtcaagcatgttttcatatatttattgaccatttggccatcttctttttttttttttttttttgagatggagtctcactctgttgcccaggctgaagcgtagtggcacaatctcagctctctgcaacctccacctcccgcattcaagcctcagcctcctgactacaagtgcccgccaatttcacgcccagctaatttttgtatttttggtagagacggggtttcaccatattggccaggctggtcttgaaatcctgcccttgtgatccgcccacctcagcttcccaaagggctgggattacaggtgtgagccaccacacccggccatttagccatcttcttttgtgaagtacctgttcaagtatcttgcttctttttgtcttaggttatctgtcttttcaggcattttccttcagaaaagaactggcaaggagaaaagcatctggtgattagcataacaaaatcattaaagacaaatgttactgacagagatatatacaaatggaatcagacttagcctgggtttgaattttgatataatcatttacttaccgtgtgatagtggggttcttttctttctttgagtctcggttttctcacccatataatcaggataatagtaaaatttcaaaagtttattgtgagagttaagatgaaataatgtttgtgtgcacttacttctggcctgatacgtagttgtttttgaaaaatgagtagttattgtgataggagatcatgaagcaggggagtttgctgtctacttggttgctgcctgtgttagttgctaactactaatagtcttgaaaagcttttattaataaatgactagatactggaaggtaatgtagtccacatgttagtaatctcttataagatccacactttccatagtgtgtgatcacctttgagcttttagagcatttaaatgtcaccaaatgatattgcatttgtatatataccgtaacttaagcaattcggtactctagttaaattctgattgttccaacgcacatttacatagttcttcaaagtttacaaaatgcttttatgcccactatttcatttgacattaaagcagtcactagggataggcaaaggaagtgatgatgtcttcattttatagatgagaaaatttcaaaccagggaagtaaactgtactgccaaaggccacagagtctgaggatggtcaaactgagattcaagctgaaattgactcttattccatgtatagtgctttggtcatcttgtttggaatgtctttccaagtttaaataatgggattataattaaatttaattaacatgaaaatgttgtagtgcttttgggtataaaaatcaattatcactgggctagagaagtgctgaagtgcctgttcacagagatttctggttagtagaatgtaggtagtatagttttttttttttaattgtggttgttcactcacaattcatactttttacaagtgatcagaattgtcccgacagttaaaataagtgtgagcgggccgggcacggtggctcacgcctgtaatctcagcactttgctaggccgagatgagcagataacttgaggtcaggagttcaggaccagcctggacaacagggtgaaacctcgtctctactaaaaatacaagaacttagccgtgcgtggtggtgcatgcctgtaatcccagctactcgggaggctgaggcgggagaatcactggaaccccagaggtggaggctgcagtgagccgagatcgtgccactgcactccagcctgggagacagacgagactctatctctaaataaataaataagtatgagctatacacttatatatgccttgggaaatatatttgcacagtaaatgatttttaaaggcatgtgtgtatgtatgtgtgtatatatactatgtgtgtgtgtgtatatatgtgtgtgtgtgtgtatgtatatatatctgtctccttaaatcactcagagcttttccagataatgtcttaagatgtcctttaagggtgatatttggcttttaagacctctgtatctttgaatgtcaagttcatatatgtattttcgtaagaaattgataacttcatatttggaactgcattttttttttattaataatagcttttaatattggccatgttaaaatccttaatttttttcagaactttaaatttggctttaattataaacctcactacataatgacattttattaaaattaaataaggggctgggtgtggtggctcgctcctgtaatcccaacactttgggaagccaaggtgggcagatcacttgaggtcgggatttcaagaccagcctggccaacatggtgaaaccccatctctactaaacatacagaaattagccaggtgtggtggcgggcacctgtaatcccagttactcaggaggctgaggcatgagaatcacttgaacccaggaggtggaggttgcagtgaactgagatcacaccactgcactccagcctgggtgacagagtgagactccatctcaaaaaagaaaacaaaaaaataaaaagggaaatgaggtaaactttcatataaacattaagaagcacagaggcgggaaaatgaaattaagttggtggttggcaacctctgggcatgtgtagagaatgagcttgttggtgcatgttcagggtcatgggaccctctggttgccttagcatctcccagcacagccccagttaacacctatcactttttcttcccattggagaggcagtttcatgtgtgaatgacacttccggggcagcggcccagcctttgcacaccagagaagctcctgcaagttacttcatcactctgtgcctcaacttgcctttctatgaaacaagaataataagagtcttactcttaagttttctatgattattaaatgtgttaaactatgaaaacacttggcacggagtaagtactcaagtaaatgtgaactgtttcaattgtgattattcccacctccctctgcatctgagtacaacttctccagtgctgaaaaagagcagtcccttttagaaggatgccttcattgttttaaagaaagctcttgtaaagcgtattgaattatgtaggaatgtagtggtcatcatctaactgttcattcatgaagcaattactgagtccctgctctttgcccaaggctattctgaaagttagaaatgtacagaggaattgaacctttcatctctgttctcagaaaagtctagtctagcagtggaaatatatgagtttccggaacattaaaatgtgtttgacataacaggattatctgacaataggaataaataaatggtataccacctatagtaggaaatagcatatagacattaaagagaaaaggctagatttgtatagacttacgtagaaggaggtttatattctgagaatacgttatataaaaattaagacgtagagcaatgtatatagtatgattgcatttattctacatgtgtttgcatttatattggtgtttgcatgagtagaggtctaaaagactttaccagtatacgaacagcacatgaaaatgagattatagaggaacaggcaggattttaccttttacatcattaagtatgttgcaataagtatgttttaatttaataatacatatttaatgtgacaaatgccttaaaattaatttatccctcaccttttcccagaaaggcttataaaatttaaatatgttatctcctacctcactagaaaacactcaacctgaaatgcattgagcaaaagtaattcataaatggaggagtctactgattgagaaattgtcatatgtactcaaagtattttggaataaagaagggcaaggtctggccttcttcttgatcaagaagtgtctcatagcagcactgctatgagctcccaaatgtcctttaggtctggccttcatgagatgttatatgtggaggtgcttaactgtgggttagggttaagtcctttgctttgcatgataagaacctgtttcacgaagggtgatcaagtcctactgagttgatttgcactgtggtacaccttcgttgctggcagatttcctaaataaataaaggtcagaaggaatatatgagatctaagcaggtgaatttacatcatcttaagagatatttccattaatttgtgctagcctactgaattatcatccgtcactaaagatacacacaactcatgatggtcacatggtcacatctgttagacatggccccatcccactgtctaaaacacttttcccttcacttctgtgataccacattctcctgtctccatttttttcttcctatttctcctaatctacatatgatatattcaatgtcttgccatattgctattccttcaggtggtcatgagtccatcctcaactctagagaagctggtgaatggtaacataacatttgaggaatgctcaaaagaaagaaaatctgaaagaaaatagacctagaaaaaatggctagagaaattgaagttaaacttttctgcacatacgctgatagctaccaaatcaatatgcccagcccagatctttcttccaagttttagacccatattcaaaagtttccagacatctctatttggaaactctccaggcactgtaaacatggttatacaagactgagctccatccttgcggtcctgttcctccctctctctgctcctcccttccactctcccaccactacttatatctactcctcatttactggttagattaaatgacacttttatactctccattgtccaagccagaaacatggtcctgtccctcttctttactttctgatccattcaatcatgttcgatcattgctacttccttgagagctctggaatcttttctttctattccacctatctccatcctagtgcaggctgttattttcttccccagttaccacagtaactgcagtagtccattctcaccctgctgtaaagtagtactcaagactggataatttataaaggaaagatgtttaattgactcacagttcctcataactgggtagacctcaggaaacttacagtcatggcaggaggcaaaggagaaataaggaccttcttcacgtggcggcaggagagagtagagagcaaagggggaagaaccccttataaaaccatcagatctcataaaaacttactatcataaaaacaatgtggaagaaactgcacccattaaccagtcacctcccactgggtccctccctcgacaaggggggattatggggattacaattccacatgagatttgggtggggacaaagccaaactctatcagcagcctcctaactggtcaccccatcttagtcttcatccttcaacaatccattctccacattggaactgccattgtgattttttttcaagagcaatcatggtatttctctgcttaaagcccccagttggttcccattttctgagaatatgagtgcaatctgagcaatgttgctatgagacacttcttgatcaagccactgcttgtctccttagccttaattctcagcaccttcatcctctggagtcccccagtggcattgaatttcatacagtttcctaacaatcaacactcttttatttgcctgtgctcctccacagaggctgttccctggtctcggttaggtatccttgcttttcccctatcataacacttaccctaccttatcctaattatccctctagttgtctgcccatcttagaacttaagtttctttcattccctttttgattgttgtatctctgttgcccagcaagaatgcctggcctctgacagacactcaagacgtaatggttgaatacatatatacataatgctggggaaatatcaaatttttactctttcactactacctctttattcctacttgtcattataatatgtcgttttgggggatgggggtaatgctctcagtcagtctatgaagcttcccctagatacttcattgatttatgtgatatatgtgaaatttactgtatacttgtgtgtataaacacacatacacagagctttgtgatggtataagtgttccttggtctcatcaatatgcagaaagtagaagagaaatttggttgatatgcataaagtagaagagaaatttggttgctacagtttgcaactatgtaatcatttcctcttttggcctcttttcccgatttagatgatattccttgtatttcttttaagaatataaagcaagaagcagcttatttacccataacaaggacctactgaagtgcagaggagatctaagttctgattgaaagcacgaaattgactaaaagccacaaactaactttgttttaaaacagcagttacaaaagtaggtaaatatgtttaaaaacaaaaacatatttaaaaacaaaaacctatcttcaagcacagccatttaaaaataaaaacaccaccagattatttaaagccttgagttaagggctttaatggctatatgtatggaaaccttccctaacatctttatcatatataaaacaagcagctcctattttaggagatgtgtccttcctccttccttctcccggtggcagcacaggcaggtagccgttctctgaagcagccttttgtgttgttggtttagaggctttcattgcccgctaacctttctgctgaatagatctgtttcccattgagccagactcctgtgtgtgttctcttccttggtattacattgagataacagccaattctcttctgtttgaatcatcagaagtagctttattttttgtttattggggtttttttcttccttgcacttttgtgatgagcaggtcaccattctcctccataccaccaaaggaataaataatttatgtaacctaccctgatttccaaacaataaacctgaataaagagagtaagggacaagggttctgttgtaatttccatctcttaccatttttttctttcttcctttcttttttctttttttttctggagggagtaatatttccagtgagtctgtgaagcttccccagagtgtcccattgacttctctatggtagtttcattattgggtgaatcagttttttctttggagcagatatgatattatgaaacaatgtgatagctattcgaaagagtggatcacaatcttttttctacagagaggagtgggacatagttctaattagaacaaaggcttcttaatgactttcaaggctcgtagttaagggagacagggcaagatgtcaaggaatggtgagctaaaagaatctacttggaagatgtgggatctctcccttcctctcccccaaggttctatgcctctatattcataattaccctccaaaaaacttcagagagggtggataatataattcggtggtacatactagaaatcacctctttctaatttaaaagatagaatttattggaggtttgtagcaatgctgctgatatggtttggctctgtgttcccacccaaatctcaccttgaagtgtaataatccccacgagtcatgggaaggacccggtgagaggtaattgaatcatgggggcagatttttctcatgctgttctcatgatagtgaacaagtcttacaatatctgatggttttataaaggggagttcccctgcacaagccctcttatccgccgccatgtaagatgtccctttgctcttcctttgccttcggccgttgattgtgaggcctccgcagccatgaagaactgtaagtccattaaacctctttcttttataaattacccagtttcaggtatgtcttttttagcagcattagaatggactaatacagcttcttagtgtgtactttgggtcactagcgttaggattcccagggatgttggtccccaaaaaaatgcagatctctgggaaccatcttagactcatagactctgaatctcagggatggatcctgataatttaatgtttaataatctctcaatgtgacttcattgtgcatcactattttttgagggctactggccaacagcagagctatggaaggaaagctgaaggttggatcagggctgctctgagaatttcagtattgggaactgtggctgggctccttggagtctatcttttgaggtgagtcagctcacctcaagtcaactggtgtcaagtgtctcaaggttcaagttcctaggagaggggatcagagtgacctggcttgatctccccaggtcaggagaggggagggctacttgatcggctctctcaccatgcttacagacagtggaggacgaagaggatttccctgaggaaaatccaagtgctgttttccagaaaacaaaacaaaacaaaaacaaaacaaaaaaaaaagagggaaatggatcctgggcagataaaaaccgcattttttttttgcacatacacagaactttatgataccatttttaaaagtgaaccatgctctcctgtggtgaaagcttagaaagtgaagaattaacatatttaagcttagcagtgctgatgttcctcattacataaatggggattatggaaatggtggctaatagtgatggagtttacaaggaaacatccagaattcaaaatacagaattgcctttccagtaggatttgtacctggcaaaaacttgcagagtagggactcagtatttgaattaatttaagtagtcatggcaaaaagattttactcagatattcagtaagtattggcaacttactgaattataatactgaattatagtaggagcttgcagaattgactgagcaacactttgaagaacatatttataaaatagctaaaatgaaataccacatactctttcattcctttcaaggtacaactttaactactagatccagttcataccgtttgtttcttcttgttgttggaatttcttcttgttgttgttggaaccacaggtctgaacaaacactgttctgttgaatatctagaaggaaagacacaatttggattttgcttttccagaaagttccactccttgggggtcctactaacctctaactttgacatcattatggatgctgcagaaataagtcggatgtcctgggcgcaatggactacattgtgaagcctgttggcaacttcccttatataaggttaattcgggtgaaataaatcaacccgactacttattttgatgaaaataaatgtcagtccagaaaaaaaaagaggagagagaaggcacctgcagtggaaaggaataagaaaagtatcttgcaaactgttcaaactgtaagtaactatcagcacccctcagcaccatttttatctgaaagaacactgcaaatatcttaaaaagtgacttaaggttgtgcaagaagcttcctcaacttactcctgaacgcctgcctctcaaatctgaatatggcagcaggacagaaagaccctagaatttctcaccttgtatgtaagcactctaagcaaggtttgcctatgaatttttgtttgattaaagatgggtgaagagagggtcagaacttctctatgtcacgacctctcttccttcagggttgtacatgttttaaaagagaaatccacaatttttttttctcatatagtacacaccttcacttaatttagtcttatggctttaaaatgtattattttaaataacctttggtcaatcctcctcaaagcaccaatttcataggattttcatttctgaactatagttacaacatgcttataaccatttaaaaataataggattcttatttctatggaccaaaaaaacacttaaaatttcaaaatgaatccccgcttcaaagggaaaaaccatcagggctggagggtccttttctgatttttcatttttttcttctctgtatgatttcttattacacagttttatttttccaatgaacttaactcttgagccatgattgacactacaatcagattaaaggatactcttttaaaagacactgatttggactctactccacaaaaaaggagatgaaagctggctttttctgacttgattggctgttctgtgtttacctttttaatgtccttgatgagacaggtgtttctcatggcattttatgcagtcagtcagtcaaccgggatttcactctgacagctgtgctccatcgctatctggagaaaatggcagcagctcagagttcctacagatacccctgtgatttgatttccagctatagactttcgttttctgccaggcctctgatgggtcagatttaagtaccaatgtgccatctaaatactagctttctgaactcatttcccaactttatcctgttaatgccaaacttctttatgaagggggaaggttagcttcgtaataaggggatagatacaagagactccatacacacgtggttttgaatatcagcttctaggagctgatggaagagtatgcacagaatattagtctcatattaagcatcaggaagaatagctagtggatgctgggcttaatacctaggtgatgggatgatctttgaagcaaaccaccatggcacacgtttacctatgtaatgaacctgcacatcctgcacatgtacccctgaacataaactaaaagttgaagatttaaaaaaagaaaaataaaatttatttttctaaaaaaagaaagtttcatattaaatgagtggctcatgaagaaaataaaattggattttattctcccatgcaactcatcatggttttaaaaatttattcttgttaaataatggctctgtgttttgtaaactgcatagaataacacaatcaatgttttattaatagtttctaaattaccatgcagaccacagaagctcaagattttaaattttgaagtaggactttactatcagttgttattagtaatttgaaccaatttctctggtttcaaaatacgttacttaattgccacgagagtggtgaaactttgttcagatttaatgaggaaattctggttcagcttttctttattccttgtctatctttcatacatttcaacatgtcaaagtattaacatatattttatagtaatctcaaataataactaatcaataaatacagaacatctctgtaccatgcaacaatttcagtttcacatgatataaaagattagaactgttacagactttgggcaaaagtggtgagctcagacaatttcacgataaattaaacttagaatcaaagagtgaaaccagaataagcaacgttaagaagtggatgatcaggccaatcttattggaaacgtcaatcgtgtacttgctaacctacagccttctactacatgaagctgcccaactcacagtcactgccaaatggcagttctgtatatacaaactacatggacggcaccctcaccccacaaacaagcagccaaaatgtattcggttgagcactttgacttaggaatttgaatggagaattcacagtatcacttagcagtggagcaggagctgaaagattaccatatgagaattaaagtcatagagggctggatacagtggcacgcacccagctctgtaatcccagagctttgggaggccaaggcaaaaggattttttttttttaagatggagttttgctgtttgcccaagctgaagtgaagtggtgtgatcttggcccactgcaacgtctgacccccaggttcaagcgattatcctgccgcagcctcccaagtagctgggattataggcatgtgccaccacacccggctaatttttgtatttttagtagagacagggtttcgccatgttggccaggctggtcttgaactcctgacctcagacagtccacccacttcagcctcccaaagcgctaggattaaaggcgtgagccaccacacccggccttgcaggaggatcttttgaggccatgagttcaagaccagacagggcaacataacgaaacccccatctccacaaaaaaattaaaaaattattagcctggtgtggtggtacgcacctgcagtcccagctacttgggaggctgaggtaggaggagctcttgagcctgggaggtcgaggctgcagtgagccgtgttcgtgccactgcactccagcctgagggatggagcgagatcttgtctcttagaagaaaaaagtcatggagggtcatggcaagccaaattctgagtaaagaatcccgtgaggaagtggaagctatgtgataaagaatctgcatggaaaagggaaagagtcagccaggtggcaccgggtgcagaccgcagagcatgcaggaggagtggcctataaaggcaacaccctttaagacagaatgttgtgttcatggcagaacaccagagtgaagatcaaaagtcgtctctggtttttctgaagtcttatggtccagcttttctgagttgccacaagtgtatattctttaagtaaggcccggccccttgtggggacttcagtgatctctgttcttttccgccaagtggccaacactctaatacaacgaggaaaatatatgatcaaccaaggagacaaaagtgagtgagcgctaaatgttagcataagcttaaatgatgcgacatgataaatcaatataaagatgaaatatatacagaggtttctaaaacacaaatgataattaaagcatatctcataaattatgaagtgagacatacttaatcttcagcttaacaatgtctacacttattcgtttaatcaatatttatttaatgcctagcatgtctcagacactatgttattcttgggggatgtaaagatgaatcaaataatcttttccctcaaggaaatcatagtctggcagctagaatgagacatcgctttcatttttttcttttttaaaaaatggattgcttttgattcctgagtcaatctgttatcctcacttaagcagatcatgtatgggaatttgtctgggaaccagtttcctataaccagctataacacaatgtgattaattagacgtatattttggctcaaatcttggatttaagtgagtaacctaggtagtatacagaaatggatatttttcaggctaatggataaagatatgtgttccagtaaatcaagttacaaggaaaatattgtccttaatattgttgttattatgtagattaattttaagattaattatataactgctatgcatacatcatgacgaaagaaatgcaggatttagcttatgacttgatgtggtggctgggcacagtgtcccacacctgtaattccagcattttgggaggccaaggcagaaggatagcttgagtccaggagtttgagaccagcctgagcaacatagtgagaccctatctctacccagaaaagatttaatgtggtgagtaataaggaactggcttcatgatgatcatgagtctgcattgatgtggcaagaggcactccagaaagacttctggcgacgtaggcaattggatttgaatggagactgtcaggaaggccacagtcttatgtattccccaggtgaggtgatcaagggatgagaaaagtcgcagtgacaggggctattgagagaaaaacaaagaaaatgaaacataaatatgatgattttatctttttctattttacttataaaacatgatttatatagactaaaattttatttgcgataagggaaatggagatagaaaacggctaagtcagaaaaagatagtcattctgcttttcacagcctattttgggccaattgctccctgaaaataaattttttaaaaaaacttctagggcgcagtgaccacacttgtaatcccagcacttttgggggccgaggcgggtggatcccttgagtcaaggagttcgagaccagcctggggaacatgatgagacccctactctacaaaaaatacaaaaattagctaggcctggtggcatgtgcctatagttccagctacttagggaggctgaggtgggaggatcgcttgaacccaggaagtcaaggctgcagtgagccatgatcatgccactgcactccagcttggacaacagagagagatcctgtcttacaaaaaaaaatctttagtatgttttggtttgaaattgagcatattggaaacctcctgaattcttcctctatacattccttcacccatttcttatcaaggacgttttaatttagttggttggccaaattaatcaaatctgaaaggatttggctgtctttctgaaagctgtcccagaactggtaaaacaaatggttcttttcttcctggaagaaattcagagagcccctccctcccggatctccccatttccttttttctctacctttccccaatgatcacagtcagtaagagccagaaatggctttgtaactcttacgaataatgaaaagtcattgctgatgattcgcaccaagggggaaggatgctgtggttagatccttgcttaagaaacgattgtttgtaacattattcatgtctttgtcatctctgggttctgtcactgcagcatgttctactgggatgtgtctttgaagttcccttggcagacatttgtattatcattttagcagcattttcttgcatataatatgccagagtaatatatactaaaatgataaatatagtttttgcccttgaagagttgataatctgacaagggttggcatttagttactaaatcatccaaagagaagttatcataagaagtatcatgacctattgacaaagttttaggcaacctgttagaaatactcagcttggtctaaactaaatacagagctcttcaaagtcattggtactaaaagcctagcttgagctaaagaaaacaattttccacccgagagctgggcgcagtggctcatgcctgtaatcccagcactttgggaggctgaggtgggcagatcacttgaggtctggagttgaagaccagcctggccaacatgacaaaagtccgtctctaccaaaaatacaaaattagatgagcatggtggcatgtgcctgtaatcccagccacctgggaggctgaggcaagagaatcacttgaacccaggaggtggaggttgctgtgagccgagatcgcactgctgcactccagcctgggcaacagagtgagactctgtctcaaataagtaaataaatacaaattatccacccaagagaataaattctggtggccacttattcaaagtagaataagttctactttgaattattactactatgtgttgtttcaccatagctgacacatggggattataaattacatttacaagaataaaaactagaaaaattaaccatgagtatttattgagcaattactatttagcaggtactatcctaagtgctttacatatgttcatgaaatactcataacctatgagcactataagaatcttttattttgtagatgatgaaattgaggcacaagggcactgtgtccaaggatgcccgagccaagatttgaacacgttgagcctggtcctaaagtctactattgaattcgtacacttaatccctctcctagtcactgcggcccctctgtgtgtattataaaaaggtactctctttgagtgggaaaattagaaaaatgcaccctcacagggagcatgtagcctctctttatttcacccctaactcatcctttggcctgggcttttgaacagtacacagaatgtacaactgtacatggcagccctgtcttcactgtcttcactaccagtcagtacctttacaaatttcaagtaactttgacatgcataatcttatttgattttggcttcagccacatgaaataaaaatgacagttaattacctttctcttacaaaacagaaatctattctctttatgtattgatgtattgatcacacaaaaggtacatcataaaaaccaagcagtggcccaggggcaggaaagatcctgggtatgaaccactgtgtgctttactatactacatgctttgcacatgacttaatttactgttcccaaaagccctacaaggtaggggatcactaacgcctgtacacagattaggaaacagcttcaataaagtgaattaccttgctgggctttccatattttgtaggttgaggtgtctgaattcaaccctgggctatctgacttgaaatctatgcttcttccaccattcttagaccatctctatttgagtctatctgattgtttggtgtagacatgttcaaacaagataatactcattagtgttggacaattggagattaggataaagcgtgcctcaagcagagaaaattgcccagggaagatacactagggaagatactgcctgcttcttaataagctagaacaaaaagaggtcacactcaagattatgagccacttattttgttaatcagcacatactaatggagcacctattaaatgcttggcagccatttaggagctgtgtgggaaacaacaatgaaagtcaaaccacttaccctcaaggggattgccgtctaattagtaagacaactaacaagcctgaatgtgaacactgaagctacttagtaatctccaaggacctctttcagtagggactcatttagtgaatttgcagaagaaacacacacagattgggagcttcccttccgttctttccactaaatggtggggtactgtttgctgttgtgtgtgtccaaaaataacagacctctttcccaaaaagcacagtctgagacaaggacttagtgtaggtaatttcctggaatggatgtttctgggagacagaggaggaaacgccaaaataaaggaacattatagcacttttggaggctgtggcaggtggatcacctgaggtcaggagttcgagaccagcctggccaacatggcaaaaccgtgtctctactaaaaatacaaaaaattagccgggcatgatagtgcatggctatagtcccagctacttgggaggctaaggcaggagaatcactggagctcaggagctggaggttgcagtgagccgagatggtgccactgcattccagcctgggtgacagagtgagactccatctcaaaaaaaaaaaaaaaaaaaaaaagggggaaataatgttattaaagttgtggacataaggggtctggattccatcagggccccctggaagatgtaccaaaaccttccagaattgtccactttaaggatggcagtggggagcatttgttcacagcttctgtcccctattcattgagagttgtccctaggggcagtcattaccccacatttctgggctggctggtgaaaagaatggatgtttacaggtcgtaagaccctggggcagagtggagagtcccatggcttaggtttgaggtagcacagaggacactgcagctgtggctgggttcagaggtggattgacagaatggaatgcagagcaacagaggtgtctgctgcaaatctctttcagccccctccgtgtgtgagcactagatggctgtccttgtcatagacaaaagatagaccagtcacctggggaggcactggcatcagcctgggaaatggtcaaagctgggttttaccagtagtcatttaaagtctcttggtctccatttcccataagatggaaagagtaataggacctgccttacagattgttaggaagacttattaactcagtgtgataaaatgtttcatagaatgctgagcactctttctggcaaatatgagtattcaatttgttgggaaacagagatcccaaaaggcttatattgactggacaaggagttgctttttttaagtgtgtttttttccttttattgtctgccttgttcattcacctagtatattagtccatttccacactgctgataaagacagtccctagactgggtaatttagaaaggaaagaggttgttgacaaatgggatctaattaaagagcttctgcacagcaaaagaaactaccatcagagtgaacaggcaacctacagaatgggagaaaatgtttacaatctacccatctgacaaagggctaatatccagaatctacaaagaactcaaacaaatttacaagaaaaaaatcaaacaaccccatcaaaaagtgggcaaaggatatcaacagacacttctcaaaagaagacatttatgcagccaacagacacatgaaaaaatgctcatcatcactggccatcagagaaattcaaatcaaaaccacaatgagatactatctcacaccagttagatggcaatcattaaaaagtcaggaaacaacaggtgctagagaggatgtggagaaataggaacacttttacactgttgatgggagtgtaaactagttcaaccattgtggaagacagtgtggtgattcctcagggatctagaactagaaataccatttgacccaaccatcccattactgggtatatacccaaaggattatacgtcatgctgcgataaagacacatgcacaggtatatttattgcagcactattcacaatagcaaagacttggaaccaacccttatgtccaccaatgataggctggattaagaaaatgtggcacatatacaccatggaacactatgcagccataaaaaaggatgagttcatgtcctttgtagggacatggatgaagctggaaaccatcattctgagcaaactatctcaaagacagaaaaccaaacaccgcatgttctcactcataggtggaaactgaacaatgagaacacttggacacggggtgggaacgtcacacactggggcctgtcatgagtttgggggaggggggagggatggcattaggagatatacctaatgtaaatgacgagttaatgggtgcagcacaccaacatggcatatgtatacatatgtaactaacctgcacattgtgcacatgtaccctagaacttaaagtataataaaaaaattaataaaaagtgttcttcaaacaactgtgagcaaagatggactagtagatatagctcccctgaatactaaccattaatatgcaaagaagattgattttgacaatgtcatggacaacttttcagaagtttccaaaacagaaattgtagtgttattattattcatcactgataccagcctatatgtaagaataagtttttccttttttcaaaaatacactaatgtgattaaaaccttaaaaaaaataaaaataaaaaaataataaataataaaggaaagaggttgtttaactgactcatagttccacatggttggggaggcctcacaatcatggcagaaggcaaagaagagcaaagtcacgtcttacgtggatagttaacaggcaaagagataacttgtgcagggaaactccctcttaaaaaccatcagggctcatgagacttattcactatcatgagaacagcagggaaagacccacccccatgattcaattacctcctaccaggtccctcccaccaatacgtgggaattgtgggagctacaattcaagatgagatttggatggggacacagctaaatcatatcacgtagttgatctgttttcaatttttattccactgaaaggtcaattcagatttgctaaagtatccttgattgataggatatacctggttggacacaataaaaatcagttcctttactggaaacatgtgcacttaaaggagaatgctgaatcccatcaaggaacaaaactttctcccattctgtccccagaaactagtcacagaagggtttgcatattctttgtggtgagtgcatactgatgacaacttctgtttattcctccaacccacttcctagagccaggatagctttgtgcatctgattcttatgatgaaaattgttagattatttttggggaactgctgtgtatgaggcagtatgcttggtcctagaaatgtgaagggtataaaaacaaaaaaatatatagaatgcatttcttgtctacaaaaaaagacgattctggttgaaggaactggatgcaaatggttgagcttttagagataatggggaactagggagtactaaatcacagatttggtcccatttttacttatccaagacgaacataagaaattcaatgggaaaggaattcacctggggctctttgagaaataatgagctaaatgtattggagacgtaagtgagaaaggccagcagtcagcagttctgtgctcatcaaattcaggttatgcacagtccttttcctagatatgtatggtagtcttacagatgtggcacatctggtctccagagatgcacctctcccaacccatgagccatataccctgtattcctgtctttgtacagtcctctcccttgaatctgggctgcctccgtgactcacttttggcaggtctaacgtggtgaaagttatgccatgtgactttcaaggttaggtgagaagctttgcagctccttagggtttcttggaatgcttgttcttgggatgctgtctcttggaacccagaaaacaagctgtgagaagctcaagctatacacagcggtcacatgtttttctgtggtcaccatccccagctgagctaccaggtgacagccagcactgtctgccacttgggtgagccatcatggatgtccagctaagatatccagctaaggcttgaataaggcttcacatggcagccccagcagctatctgactgttaccatgtcagagtcctcaaatgaaaactgcctaactgagctcaatgaatacacagaaccataagataataagttgttcttttaagctatcaagttctgggagagtttgttacacagcagttgataactggtacaaaatgtaatttatgtcttaaatatcagcaagcttttaatttttttcacagttgttatgtgacattttgaagtctccatttttttgtttttgcttttcttacttttgacatactataaactcgatcctttcaaatagctttatggaataatattgctgttcattagtttttaaatcataaccttacagatgaaattcttaagtgtattgtcaacccttttgtagtctggtgaagcctacggaagtcttttattattaagtgaataataagaaatttgtagaatcacagaagaaaccaatcatgtgggaacacagtttttgaaatactttaaaacccaaatctgtggtgtagtaatatatgtacatctgtgaacacattaaataacactattgatgggcacaattataattttgaagtaccaataaacataatcattttctaacattttgtaacattttagcatggacatttttaaacatgcagcaaagttgatcccacaaagaatatctgtatactcactgcctagactctcccattaacattacttatgctgccgggcgcagtggctcacgcctgtaatcccagcactttgggaggccaaggcgggcggatcacgaggtcaggagatccagaccatcctggctaacacggtgaaaccccgtctctactaaaaaaatacaaaaaattagccaggcgcggtggcgggcgcctgtagtcccagctactcgggaggctgaggcaggaaaatggcgtgaaccctgcaggtggagcttgcagcaagccgagatagcgccactgcactccgacctgggcaaaagagcgagattctgtctcaaaaaaaaaaaaaaaaaaaaaaaaaaaaaaaaaaggaacattacttatgcttgctttatcatgttatctatctaaccatccgtcatcaatcttaatgtttttatgcattttccatgtaaattgcaaagcaaattgcaattctctatgaataattcagtgtgtatataattagctggaagatggacttaagattgtgattgtgatatatgtgaaaatattgtaatctgatggaaaaatgttggtgattcctattgctgacattactaggtattgctgttatcactgtggcttgttaccagtattcatattttaaagcaatgctaagtttcagtcagaagttactgaaaataaagatgtaaatttgttcacattcaagttcatgaccctacctattaatcgaccccatagggtccacgatctccaagttaaggagacctaataaatgaaatgtgcagatagtctatgaataagttaaaattcaaggcaaatatgtaaactaatataggcatactttaaaaatcaagccataggccaggtgtggtgcctcacgcctgtaatcccagcactttgggaggctgaggtgggtagatcactagaggtcaggagttcaagaccggcctagccaacatagtgaaaccccgtctctactaaaaacacaaaaattaaccaggcatggtggcttgtggctgtaatcccagctactcaggaggctgaggcacgagaatcacttaaatatgggaggcagaggttgcagtgagctgagatcacaccactgcactccagcctgtttgacacagcgagactctttctcaaaaaaaaaatcaagtcacaaatataaattctgacatttttccctttaacattttacagtgacattaatgaaaggagcttggaatactccaaagagtcatggaaaaggagaagggagtgttagtgatttgacatctgtattagctagggctggtgtaacaaaagcaccaaaaaatggtgtggtttaatacaacagaaatttactgtctcacagctctgaagcctggaaattcaaaaacagggccaggcgcagtggctcacgcctgtaatcccagcactttgggaggccaaggtggacagatcacctgagcccaagagtttaagaccagcctaggcaacataacaaaaccccattcctacaaaaaatacaaaaatcggctgggcacgatggcacgccctgtagtctcagctacttaagaggctgagttgggaggattgcttgagcccaggaatttgaggctgcactgagctatgatcatgacactgcactccagcctgggtgacaaagtgagaccctatctcaaaaacaaaacaaaacaaaaaaacagaggtgttactggggctgtgctattgctgatgattgtaggggaggattctcccttgcctactccagcttctggtgtttgctgacagtcctggcaatgctcagctcctagctgtatcactccaatcacgtgctgtcttctcctgtatctttacatcatcttccctctgtgcaggtctgtctctgtgtccaactttcctctttttataaggacaccagtcatattggattaaggcccaccctagtgacctcatttgaacctgattacctctgtaaagaccttaatttctaaatcaggccacattctgaggtcctaaggcctagaatttcaacacagctttttgtggggtcataactcaaacccataacaacatcagaacattgtaattcaaaggaacacaaattcaggtttactttgaaactaaatatttctagaattaaatttgtccagagttacatggtctagtcttactttcatacaactctcttctaacacactgtgtttgtgctggatatccctttatgagttttaagaactctgaaatgtgaaaagtacaaataagtaatctcttgcattcctattttagtcaaaagatcaggctccaaattgctttattcatctttgagtagtattgcagaaaattttaactgaaaattatattcaaaatactgttttcaatttcctaatggaactgtaaccaattagtcaaccacaattattgaacaaccatgagtactgtattccctgaggagaaaaaacatagtttttaggcaactatagcaagatgcagcaaatgagatttatacacacacacacacacacacacacacacagagatacccagtagatgcagaatcaaggcactcttttatttaaaaaatccttttctctgccaggcgcggtgcctcacacctataatcccagcactttggggggccaaggtgggcagatcacttgaggtcaggagatcgagaccagcctggtcaacacggtgaaaccctgtctctgctaaaaatacaaaaatcagccgggcatggcagcacatgcctgtcctcccagctactcaggaggttgaagtgggagaattgctttaacccaggaggcagagattacagtgagccaagatggcatcactgcactccagcctgggcgacagagcaagactccatctcaaaacaaagaaaagtaaagtaaaaaaatttttctccagttttgtgtctattttaatttttcttctgattttgaactgattaaaaatttcatatctgcaactttagttgtaatatcaagttttgcttttttaaaatcaaatgctggttaatactgcctctacccccgaccccctccccagcaaaaaaatccagaatcattcaaaatcaatcttacgaagttgtcttcatttttttttcttgtttttttgttttgtttttttttttttttgagatggggtctcactctgttgcccaggctggagtgcagtggcgtgatctcggctcactgcaagctccgcctcccgggttcatgccattctcctgcctcagcctcacgagtagctgggactacaggtgcctgacaccacacccagctaattttttgtatttttagtagagatggagtttcacccagttagccaggatggtcttaatctcctgacctcgtgatctgcccgtctcagcctctcaaagtgctgggattacaggcatgagccaccgcgcccggccaaagttgtcttcattttgagtaagatttttaaaaatgtaaaatacttaccacagagaacattttcagcaaatggtagctattataattgtagatgctggatggatggatggcacagagttatcagtggcttaagcccctgctgatagcactgatatttacgtgacgtttagctgtgtggccccctttagttgttctatcctttataaaattttactccaaaatatgttttttgaggagtcctggaacattattatttttaaaataagtaggaaccataattccaaagaattcttagacacataagggcaacatatggtcctttaaaaatatatagatgagcaattcttttagagtaggttgaaagagactgaaagaaaaaaatccagatgccatttgatttcagtgagagaagagtctaaaaagcactcctttgacttaatagatcttttttgagaggtatatgacatctctgtatcttaatttccttctctttaaagtttttttcttttttctttttctttttttttttttttttttttttttttgcctcagcctcctaagtagctgggactataagcgcgcgccaccatgcctggctaatttttgtatttttatagacacggggtttcaccgtgttggtcaggccggtcccaaactcctgacctcaggtgatccgcccacctcggcctccgaaaatgctgggattacaggcatgagccactgagcctggcctccttttctttaaagtgtttatgttaatacctatttcccagattgcttgaggctgagtatatataaatgtctttgtgcatataatagaagctcaagaaaagtgacatccagtttctggctccctctgtcacctcccatcacctcaatctcttggtcaaagtgaccattctcccaggaagaaaaaaactcaatgaaataaaataataacatgcatttcttctgttgtaactgacctttcaatctaaaagaacatcagaatttggaagaaaaagtaaaaagtgaaatagatggttccttccacctctatttgtttctgagcagcttctggtggccaaatgttttcttggtagcatattccctccagcagaaccttccagaatgcttcactccggtgaagagaaggacaacaggctttctaatcacacggtgttgcttgctgagggggaaggcagaggtccgcctgtataatccgatttcatcaactcacactaatcactactgatagtagcaaaatttagcctggatctgcgctgttaatctagattgacaggaggtaaaaggagaggaacgcaagggcacaggaacaaagggcggagcgccagcactcatttccagccttgctcttccgtctggggcttctaatttggtcccctttggggcttctatttttcttaccttataaacaaatgtccctggttgttaggataccagcctttcatggagcggtttcatcaacaacaggtgcgcagtgagcttctggaactgcagggagagcgataacctacgtcgtgaggctgcgcagaaggtacttacaggtactcattgtacctgagactatgtattatttattgaaactgagccctgaattatctttatcctctgagcggcactagtgcctcctaaaatggatgccaacagcagctaatctacaagagctcccacatgctccttgctctcattatttttcttattagtaattgtaagtggtagctaccaagcttcttattaaagcttggagagtaattgggaattgcaattgaacagccgagagaggaacacctctgtgattttggacgtttccacgtggactgaagttttaattttttcaagggactactccacttcggatgttgtggctatacagaagataacatgttgcagattctgcctccatagtgatcagagtagcaatctgtgatgtgtgtgttcacgtgcttaatgcccagaaggaagatgggctatgggaaggttactttcgctgttacttatgatatctgtgtctggcaaaccagagaactttttgcatttgggtaacaaagacgtttggaaatatactccattggattttccatgttggtgaaactattgttgaccgcttcagtactgtatgttgccatgccaaaatcacctaagggcaaaaatgtctcctgggtaagtagatgttgattttatatctcttaaaaagtatattttaagcagaaacacatgctttaagaacttaaagacatctagttgtttcatgttggtaagagtatttggaaaaccttcagaaagcatttgtcttagaaaagcatataaatatctttgtaagtgttagaaatcctttggcaaagtcacggtggagtgcttgctaaaatatgaactataagacatgtaaacactcagtttgttttgccatttttaggtttttaggtttgcttcacctttgcatacacacacagaatttaaagtgcattcatacaaagtcaaggttatgattttaacatgttttcaactccaaaactgtttgtgttgagtaaagattgcctagatttcttttttggggtaagtcaaatgttaagggtagaatatgtgattttcattattcagtgatattgttggtgtgttccttttttccttggaaacaagatagcatagctgtttcttaattttacgtatctaagtaattgccctcaatcaatgatagacatgtataaagtttaacatttcagtaataacaacggcatgttaatcctaatcaaatttgactccttaatattgtttcaaggtggctgggtgcagtggctcacgcctgtaatcccagtactttaggaggccgaggcgggcagatcacgaggtcaagagttcgagaccagcctggccaatatggtaaaaccccgtccctactaaaaataccaaaattagctaggcctggtggcgagtgcctatagttccagctactcaggaggctgaggcagaagaatcgcttgaacccaggaggtggaggttgcagtgagctgagatcgggccactgcactccagcctgggagacagagtgagactccatctcaaaataaaataaaattatatatatagatttaaggtagtttcctaccaaaaacacaaaacctaccagattgagctcagaataacgagaacaatctgtaaactcttaaaaaataagggctttagtttcctgctatcatgttaagtgagcttgatacattaaaattaacaggcaaatggattcctttctattctgtacagaaagttgtgtgtctaaacaccaaattttttaccaccagcccatgcaacctcgaccatactcatcatagaatttattattagatcatcattatggttttttggcaataatgtaggaaaaataaataattccatctttttggtcaagagataacgtttactaccttaatttgaaattcaccaattaggttattcttactttatatgaaatagcaccatatttgtctaaaaatggttattgtggcttttttctgttatagacagttattctttaagagtacttaattaaaagaggtgtaccttagtttgaaacacaactctcaaaattatttcagaaaaattgacaaaatttttgaagttaattcgcttttaataatggatactttttgtcttcatattattgttatcgttgattcttcacttcctcttagtaaaaccaagagatatgattcaggaacctttggcctaactggtgagtttctttccctccttatacggatgggtccaagggctagttctgatgtccaaatgtgagtttgctactttctgccagcacataaacattaaagaaaagagtcgtttcagaagtacatcccctccttcatctgattaatactcctaaaagattaattctgtcaaactagtgcctgcctaatggcatgtttctaccatgaaagcaaaacttgaaacattaagctcagactctacccttgggttgggtttacttcatactcaattatgctaatattttttgaaaagttcaagttgttggctaaaaatttaggagcacttatttcaagagagtcagcatagtttcatttcctcaggttaaaaattccccggtgtatcccacactattacaaaatgcctctgtaccaggtttgtccaaagatgagttatgagtttaatgactgccatattacagagaatacagtcatttggttggtgtgtgctgattatgcagtggtccaatcattcatgttaatgactatgataaaattccttagtttgactttagggcatagagagagagactttgaaatgttgatcattgcttcagttttcaccagtcacggttttttaggtattgaatgacgtttccctgcattttttggctatgtgaagtgaaatgtatctggtcttcctgcttttgccactggccagtttccatttggatatttatttagacttgagttcaggaggagaataaaatgattccccttgtctctttaaccacatagtaaacttcccagtggtgacagaagatcatgtaactcttcctccctggcccctcgggcacgtttccgagacctgcttcactccatgtgataaacatgaacacatcttgtggaacactgcaagccccagagtggaccaccaccttctttctcctgttcatgcctggtcagagtggtatctaggcaactggttaaactgcttgacagtgtagctctctgtgcaatggaaaagatgatagcaaccagcatgttctctgagatgtgctgaggcttatcagatcatcctggtacaagggttcgacattcattcaacaaatgttcacagagtgcctcttctatgatcctctaggtaccgaggacgcagtgaaaaagatccttgagaatctccaacatcatagagcttacattctagggaagggagaaagacaaaaagcaaatacctaagtagtacataagatggtgaatgaaatagaacagggaaggggttaggaagtgccaggaattgagaggtggtgttgccaattggttggttaaacctatttgagcagagacttgaagaaggtaacagagtcagccacggggaaatgtgggactcaagcattccctgcaaaggaaaaatgctcagatgcaaaggcaggagtctgcccagaatgtgaggaatggccagaaggctaatatggctgaatcgtagtgtcattctttcagtttcctgtgtctcttgtatgtatttgcatatctttagtagttcttcatgggggattccaagacagtcctcaattcctctgttcaaatccccagagaattctgacatgtaggaacttcgtaagaaggtgcacaccagtgcctgccaatgaaggttataggtgacaggagagagggggcagagcactgcagacgcccatctcatcaccctgacacagtcaagcttcataagcagccctgaagagttgataattttgttatttttatttttttaccgatattgaggcagttttacaaatgagtattatggtgttttataataagagaagttaggagcaattttaatattaaagatagtattaaaaggggggatttaaggatacaggctaataggacacagcacttccaataacaatgcatactttttgttagaaaatggtgcacaattccaaactttattatagaatctccatatattctttgagtataaaaatccttcctgttttttgagacatgatcctgcttccacttgttcatgacaactgcatagacccctaatggctgtagacctgactttataccacactaaccaagtttgttgaaaagtcactttgccttggcaatacaaaaataatggactccacttaggatcctgatgctaggcaaactctcttgctgttcttttaattctcaggaactgaaatcagtcacactgaacctcccagtgttccatatctatggtcctacatataacaatgattacttgtatatggtacatttcattggttgttcttaatgttttttattatgtgtcataagacactaataccatttaagaaaatgaagggaagctgtaaagaacataaatgagtgacttaggttcacataacaaagaatgctagagattaaataagaactcagaattttggagtttgctttctgtttcttgattgagatactcctagcaaatacattaagtatgtgcatgttattatattataaaagtagatgttactagaaattggctaaaagactaacaatgacaattaaacatactgcatagacgatgagacattgactcatttttgaaggggaaaaggaaagggttctgccagggacagaagtccatcacctttccttggtcattgaatgttatttccatgtagatgtctctctccagttgtcaaaaatcactattctttttgcgtgttttttttttttttttttttttttttaccctccgtgatcactgtatctgtcttgatgaatttttttcaaactgaatggctttaagttatgactttatcagagatctatctcttgttgcttttacctaatttgatatgcaggtttcactgcaacatctagattactggtctttccgacaataacagtttctaaaaatatctgattttatatttttcttttttattctctgaatgtttgccactgtcatcagaaagagctccctgttgttactctcctttgttccctttctggattacattaggtttactgaacttgttcaaacatctctgaagattttaattttttcaactttactcacacttgacaggaaatcatagtgtgtctggtgatacagatacgctatttacttacgctcacagccatgaagatttttccagacactcatacgttgagagagtattttcttctccaataaattaataagcatatagatatattttttttaatagataactctatgtctagggaaacctgagagatcacaccaggtggcttcagtgaatatgaatattcactagccagccataaagcattaggaagtatgtgtttgtatacagcctgccactaccgattatatttaatattcaaatgtgtaccttttaaaaatcaaagttcaaacttacagggtacttagagatttaaaagggaacaagtcatcagttcctatctcaaaactggcccatttacccttctttcctctttctcatttctgatcctggaaacaaaattattttctcatacaacatcgagagcattgcagacaatgtattatagtgagaaagtatgtgcggtagaggcagattctgagtttaaatcctgattctgctagtagttgttgactttggacaaattattaaccactaaggtttccgtcattcatctgtaaaatgaggataataacacttttcctgtaggagtattttttaaaacaacatgtaaaaagtatgtattgtagtgccagcgcataaaagtaatttgttaaaatcgtttcctccttttgtctgccctttcttttccaatcctactgctataacatgaattcggggatttatcgtcttgtatctactagacaccatggcagccttcataccaattgctaacttcccttctccattccattccaagcacttctattcaatatgtttcctttaatccagattttcatcagttttgaagcacatcataatcctttaaaaattcctcaggccaggcacaatggcagatttctataatcccagcactttgggaggccaaggtaggggatcacttgagcccaggagtttaagaacagcctgggcaacacagcaagaccctgcctctacaaaaacatttagaagaatttttttttaatagccgggtgtggtggctgtatgcctgtagttccagctactcaggaggctgaggaagaaggattgcttgagcccagaagttggaggctgtagtgagctatgatcatgacactgcattccggcctggatgacagagtgagaccatgtctttaaaaaaagaaaagtttctcaccatccatagataattaaacatttccaggccgactgaattcctccacggagaagacaggagagggattcagaaccaacctgagcccagggctgctccactccctgctctctaccttcttccccttgggtttgagcccagattttaggtgagatgagctttcagctggtggaacatctctcttccgttttgctgtgataacaactctagttcttatgtggagggagggattaaagtgcattggagtgcactatccctccacagaagtgcttcaccctgcagcgcaaatgtgcttcctcctgggttgggcatctagcccaggtatttctgagtctgacgatcatggagtgaaggccgaagaatgtggataaagaaagggaaggagaatcaaataatgccccccaagttactaagtgtcttgctgaacttttgctttttctatgtgggtgaaggtaaaaagagataactcgagacagtgcaggaaaaatatcatttaaaacctaaccttgaggctgggcgtactggctcacgcctgtaatcctagcactttggaaggctgagattggtggatcacctgaggtcaggagttcaagaccagcctggccaatgtggcaaaaccccatctctactaaaaataccaaaattagctgggcatggtggtgggcgcctgtaactccagccactcgggaggctgaggcaggagaatcacctgaatccggtggggcggaggttgcagtgagccgagattacgccatttcactccagcctgggcgaaagagcgaaactctgtctcaaaaaaaaaaaaacctaaccttgagatcactatatccagactaaacaatgaagagaatgtacagtgtgaaatttctaggagaaaatgttgatctatgtcatagatcattttaaatgccacaggtgaggccgtaagggcccaggaatgggagaaccagttgtgaatcattccctaaaatcaagaggtgatacaatgtgcaatgtgttaccaactcatagccagttccaagagatctgggtctatatccggtttggggattttgtctccactactccagccttagtgcaggctggctgtgagttgcagccctggtggacattagatgtcttgaccagcaggtcaccggacctttcagagaaaacatgccaccttcttgtagttcaactgcactgtgagaggggcagatggataatccctcatttaaaggtaagaggtaaagcagaggtaataagaatggcgggtttcttccactctgcaaaaactgctgtatgggctgtgtgggcacacctttgagctcttagatggagacgagctcagggatagtgcctttggagaaaaggttggagagattgcactgtgagaggcttcaaatcaagttaccaagtaaataatgagtgcagcacaccaacatggcacatgtatacacatgtaacaaacctgcacgttgtgcacatgtaccctaaaacttaaagtatactaaaaaaaaaaaaataaaaaataaaagaaaaaataaaaagaaaaaaataaaataaaaaaagaaaaaaaaagttaccaagtaaatattaacccttttgcaagaattcattaaaactaggagcaccagaagtcgcatataatgcctcttgcccacaattcttaatagttctctttctttctcagaagtgttctggattggacaatacatggcatgctcactctaattgtcataacagagtacgggtggatgatcatggtgggaaggagtaggaagaagtagggcctgggaaagtgtgagttttcccaaggaaaagctccactgtggttactcagaaattcagtggagaaggggagcgggagcgtggctgcacctctggcctactctggctttaggcatcagttttgtgactttggatatactaattagtctctttgaaggtcactttcccagcctgggcaacatggtgaaaccccatctccacaaaaaatacaaaaattagccaggcatggtggcatatacctttactcccagcttctcaggaggctgaggtgggaggatcaattgagcctgggaggttgaggctgcagtaagcagtgatcgcaccactgcactccagactgggtgacagagtcagaccctgtctcaaaaaataaaaataaaaaaaaactttcttcacctgcaaaatggagatcattataactcatgttgctgatggttgtgagaatgaatcataagaatgcaaagaatatgtatattgatgataagagatgtcacgagaaagagcagctgggattatgctggaccatgctacttaaaatcacctctgatgccaatctagatttcttagtctggccttcaggaacatctatagtcagtctcaatctaaatttccgaccctgttctccaccactttcataggtagagcctctacccagtgaatgcatgttgcatttctttttttttttttattttgagacggagtttcactcttcttccccaggctggagtgcaatggcactatctcggctcactgcaacctccacctcccgggttcaagtgattgtcctgtctcaacctcccaagtagctgggattataggcgtgcatcaccatgcctggctaatttttgtatttttagtagagatgaggtttcactctattggtcaggctggtctcaaactcctgacctcaggtgatctgcccacctcggcctcccaaactgctgggattataggcgtgagccaccacgcccagcggtgttgtgtattaatatctctgtatgtctgttgctgtgccttgggtaacaagttgactcctacactcctgaaatttcattgctgctacttctactaagccaagataaaaagtaagtcttatcagcaaaagtgatgtgaaataaagagatcattggaaatactatcaccttgtctaaaatacatttgtgtttatgttactaaaactaacagaacctattacagcaatgacaacgtatttcaaaactctaggtgtttgttatgccttttggcaattaacacctttaaaaaatgcaatctgacgggtgaatcacgaggtcaggagttcaagaccagcctggccaggatagtgaaaccccatctctactaaaaatacaaaaattagccgtgcatggtggtgggcacctgtaatcccagctactcgggaggctgaggtatgagaattgcttgaacccgggaggcagagattgcagtgaactgagatcgtgccactgcactccagcctgggtaacagagcgagattccatctcaaaaaaataaaaataaaaagcgcaatccaaatcaacaatgatgcattgacttctgggaaaaaaagtaacagaatattcagagtactctggggaaaaaagaaagataggatttcctaaggactagtgtcagttcccaagaaaatgagtgaggaaagaacgctattttaacttgcatgttacccaaaagtgaaagtgagatggagactctcaaggtagagagaaaaccaccactccttttcaaaaaggggactcgtgttcggaagtgcaaacgtagcagtgttcctggcaccacagaagtttggtgattttaatcctgacaccatttgctgtttctgaacttttacatttatcgttgttattaacttcccaagtcaaaccaggggagtgacgtgagctgactttgcgctctctgatagcacgaaggaaagccccaacaggtgaatgacatggttctggcatcttttctgccttgataaacaagctccacagtaatcccagcactttaggaggctgaggtgggaagattgcttgaggccaggagtttgaaaccagcctgggccacatagcaagaccccgctctacaaaaaaacacaaaaattagcgggacatggtggcacatgcctgcagtcccagctactcaggaggctgaggtgggaggatcatttgagcccaggagtttgaggctgcagtgaggtatgattatgacactgcactccagcctgggtaacagagcgagatcctgtcgcaaaaacaaacgaaacaagctgttcaggtaaatccactaagcctttctctcttttttttttttttccttttttgagatggagtcttgctctgtcacccaggctggagtgcagtggcacaatctcagctcactgcaacctccgccttctgggttccaatgattctcctgcctcagcctcccgagtagctgggattacaggcatctgccaccacgcacagctaatttttgtatttttagtagagacggggtttcaccatgttggccaggctggtctcgatctcctgacctcgtgatcctcccaccttggccccccagggtgctgggattacaggcatgagccaccgcgcccagccgcctgtttctaatacataggaaggagatgaatatgtcacacttcctggaacccaagaaaataacccaaattatgcattctataaaagtaaacatagccttaagaaagactaggaggaaaagtcttaccaagcagaatgaagaaatagcatagtaattgatttatcaaaattgcccacatcaggcctcccaacttgacgtaaagaaatcaaaatgaaatcactcatttagcagtcaaagttgtagaacagactttgagatattgtcccagtgatgcccagaacctgaatagcagcagtccagggaagtttgatggggtcaggggtgggtcggggggcgctttgttgctgtagcagtcttccaagctgcttgcagatctgcagcatagcagcagcagaagcgatagcgcctgtatttaaatgtgaatgacattatacaaaatatacttgcatgcacgtttatagcagcagaattcgcaattgcaaaaatgtggaaccaacccaaatgcccatcaataaacgagtggatagagaaactgtgcgatatgtacgcaatggaatactactcagacataaaaaggaatgaattaatggcatttacagcaacctggatgggattggatactgttatcctaagggaagtaactcagggatgggaaaccaaacattatattcatatgttctcaaccgtaagtggcagctaagctatgaggatgcaaaggcataagaatggcataatggactttgaggactcagggggaaagggtgggaagggggtgagggataaaagactacaagttgggttcagtgtatactgctcaggtgatgcgtgcaccaaaatctcacacatcaccactaaagaaacttactcatgtaaccgaacaccacctgttccctaaaacctatggaaataaaaaataaaaaataaaactaaaatgcaaatgacaggtgtgcagtagacttttctagacttgcaggcatattgcagttttgtgtaatctgtgctgaacagagatcgcatctctcttcataaagctcttttatagtttcacacctgtaatcagctgtcctttaaactctgaagcttcacgggggtctccttagactcgttagtctcatggtggcactcacagtggaggatgtccttgttggctactggtgtcacctttggagttgaaggaatagacagtttattcttgtttttgcttttctctcatggctgtgcgggagtgctggcaaaaagataaggatgtgagaaatgtttaagaaagggagaaggccaggcatggtgactcatccctgtaatcccagcacttcgggaggccaaggtgcgaggatcacttgagctgaggagttcaagaacagcctggccagcatagtaagacgtcatctctgcaaataataattaaaagttagtcaagtatggtggtgcacgcctttgttcccagccgctcagggggctgagatagaaggctcgcttgagcccaggttgggaaggctgcagtgagccatgatcacgccactgcaatccagcctgcgtgatagagcaaggccccatctcaaaccaaaagaaaattaaaaaaaagggagaaaaaagaaacacaatccagggccacgtgtctcagatgtcacttacttctcttcataagagccagtactgaattcttagaagctgtgcaacccgtatgaaggcaacccatatgaaggttttcattttctgctactttttcagttatcctggaaaaaatactgagaggcaacacctgttaaggcaggctgtccttgggggtgcgtgtccagcgctgcccttgactagttgtggcactagttacttatcttcatgaagtctgttttccagtccgttcagtgggggagcgttaaacctgtcctacccacctcagacaatgaattgcaaagaaaatgatgtctgtgtaagagttttgacattatgcaacattatatgagattaaaatttattcaagatctagaaaaaccgccagtgtttttattttttattagtattgcttgttgagacagagtcttgctctgtcatccaggctggagtgcagtagcacagtcacagctcgctgcagcctcaaacttccaggctccatcgatcctcctacctcaccctcctgagtagctagaactacaagcttgcacccccacatccttctaatgttttaatcttttgtagagatagggttgcattatgttgcccaggctggtctcaaactcttgggttcaagcgagcctcctgactcagcctcccaaagtgctaggattataggtgtgagccacttcacccggcctaatcagtgttttcatacgtagaattgcaagtcatggtggcagtggacaagtttatttctcaatacacaatgggcaagtatattatctcaaatgaggaaatgaactatgtttataccacctaagagttgtggagcttaaaaaaagtattcagcacatttaagaaaggtattaaatacattttgtttcaaatattgcattgaaaacattgtttgtttccccaaatttccaggtgaaggataagcctgtgctctttttcactccatttttttttcccaatgtaacctaaacctgttaatatctatattcagcaaagctgccctggttgcctggcaaccaggcttcgtgggctagggaaacaccaaggcaaggaaccaaaggcagcgaacacaaccttgactttgcctgccgctgcacaggcgatcatcctctctgtattctgtataaagctctatttccaaaacataagtaaatcttgcaagaatgttagctcgatgctattaggagtttaaaacttacggtttgtgggataacatttcaacataattaaataagcatgaagaaatctctctctctgctcttccttaattaaaacaggggcggtccctttcctcacaggtcatgctgtacatttcaatcccactttttatttcctctgcagaaagatgtgtgcattattcttggaataagatgtaatggaaattgaaatgtcaactttgagaaatagaagtttaggactcattactgccaaacatatatttttgtgtcttatacaaggaagtaaaaagaagaatgaatgaaaatgatttttcttattccaattcttccatgtttccacctttatctcattccctttcttatattctcccctgtgggaacttcatcactttaaaaattaagaacaaggaaagcctttgggttacaggaaataaatgtcgtctacttcatggacagtaaatgctatgaggctgagacagaatttggaatttaaagcttacattatctattgttttattatgtcacttgtttcataaggcagcttttattggttaagttcaatattcagaggaaaagtaaactgaaggaccctgaagcagatcctttttgaaataagattggagaataatataaggtaaaacatgtaactggggctgttgaagtggagatttggctaagtatgacaaaaatgagaacagaatacagagaaaattaactcaataatatctcagcacaaatcctcgaaatctgcaatgaacgtatcttttgattcctaagtcatgaaagaagacagtctttcattattactttgccatgtaatagccatttatatcaatttcacattctactttcttctatccttattccatagctggtgtgagttagttttcaagacaaactggaagtcccaattttaagtaacacctcctaatttgtaagtgttggcttcagtaaaaattaacaacctcactctgtaggtcaaacagaacccatctggaagccaggttatgctcatggttgacatttgtgaccccaggtatagggggagaagaagggtaactgaggaattctcacgtgttaagaggctgcatataaaaatgataagtgttgggaggccgaggtgggaggatcgcttgagcccaggagttggaggctgcagtgagctatgattgtgccactgtactccagcctggacagcagaccgagaccccatctctaaaaaaaggaaaagtaaagtgataagttgtcaaggaggtcagacaagaaacagggtcctgcttcacactttgataagtaagggtgcagaacatttcaggaggaagagaagagacagccagggggccaaaacagaattcagcaagcaggcatttaattgtgatcttgggagaggagtttcaagaggatggtggaagtcaggcacagatgcagtgagttataaggagcgtgtgggtgatgaaagtagaaacaagcaaatatagcctccttctagaaggaggaagtatggccacaatcacttgaggagaagtgagttgagggaacgtgtaggtatatttgtagacacagaacaaatttctggagaaagtagaagataggacaaatacagaggtctagggtttgaaagaattaagaattagagggtagcggaacacatagataaatatgtaaagggtttcctgtggttaatgacaaaagattttgagtagattccataatggttcccatcagccttgttgcagtagaaatgaggtccttggaaaatgaagaaggcaatgtgagagaggcagaagaaggagaaagaagagtctattgtaaaataatcataagcattacggtggggtcagggtgaaactggataaagtgttatgtatggacattctccagcaatttgcagtaaccccagagaaaatgtctaacatgcttttcagggttagtagctaggagccaaagatagttaaggagtgagggcttctttgttgccaaagactgagctgttgaagttctagtccttgggaagtcagccagggagaaaagcaggtgattccgggaggttaatggactgaagacactgcagagggttagagatcatgggaaaagctaagtgtaggtttattttaaaagaagcagcagatagggtgaaaatataaaaggttgtgatctgagaaaagtgtctagatttgaggtccttgggttaaaataatatgggttaaaggcaagaggcggtaaggatgatgtctgtcagttcctggttaggaagtgaaagttcctctagaagaggaaagacaaggtccaagggtaaaggcaggattttgtatttcacatcctgattatggcagagaaaatggtggagaaaaaaaaaataagctaggtgaaatcgtgtttaaaaaaccagaggaatacctcaaaagttggtaaataaatgccattcttttagggccggtcacgtggctcccgcttgtaattccagcactttgggaggccatggcgggcagatcacgaggcctgaagtttgagaccagcctagtcaacttagtgaaaccctgtctctactaaaaataccaacattagccaggcgtggtggcacacgcctgtagtcccagctactcgggaggctgaggcaggagaatcacttgaacctgaaaggtggaggttgtggcgagccgagattgcaccactgcactccaacctgggcaacagagcaggactctgtctcacataaataaatataaatgcgatgctttttccttcatggcatttattatatgtaacaattgtttgttttttaatccccacttccctactaaattgaaggcagactatattttatctattttgttcataccaagttcccagcacagtgatggcttataaaggagacatgtccaataaatatttgttgcatgaattaaaagacagaaccaaggatgggaaagtgaacatataatttgatgccacagacttaaaaagatgtgaggtcactgaataaaataaataggaaatgttctggcaatggaacaaaggagcttatctcttaataaaaatagaaaaacataaaaatgttcaaatcaatgataatgaaagaaatataattaattcaaacatttgcttaccctgcagaaggcaagaaagaagaaggtgctttcatttttctgcgagtagcatgtgtgtattacactgcttcagtcagagaaattaaaaggtaggataacttaagtctaaaataatatatgccaactttttttttttttttttttttttttttgaggtagagtcttgctccgtcaccctgggctggagtacagtggtgtgatcttggctcactgcaacctccacctcccaggttcaagcgattctcctatctcagcctcctgagcagctacgattacaggcacccgccaccatgccaggctaatttttgtatttttggtagagtccgggtttcgccatgttggccaggctagtctcgaactcctggcctgaagtgatccgcctgccttggcctcccaaattgctgggattataggcgtgaaccaccacgcccaagctttaccaacattttctttttaaaaatgttcacgttcaggggtacatgtgcaggtttgctgtatagggaaggattgctatcacagggattagatgtacagattatttccgtcatccacgtaataagcatagtgccctctaggcgatttttcaatcctcactctcctcccgccctccgctctccaggggaccctggtgtctgtgttcccattgtagtgtcctacagcaaaattttctattcttcacatttcttgaaagatcattgtaaaatggcaagtatattttaaaatggcaatgctgtaaaagcactcacagtgatttcttgggttaccactcagcttccccacaaggtcactttcatgagatctggctcttggggtcagaatgaattgtaggttggatacgcatcagcctgccaaaaacaaccccaagtgtgccaagtatgggagccagcaacgttacagaaggcatacggtatgcctgacacctttggctcttggcaaaatgagccaagggtatgacttgacaacttttttgggtgaacaagttgtcccttttgtatcaaatgtcatcagctcactgatgtgtatttgctgatgtcagccagaaaatgaagcacttgcaaaaaatgcaattttaaagcagtcatatttgaatactaacttccactgattctcatttgggtttggaagcaatgcacaattgcccttaaaatagaaaaaaaaaacttattcctcggaagtgatgctgtccttctcccctcgtcgttaccaattttttcactaaaatgaatattgtcaacaatgaagtaaaagtgaagctgtcatttgatatgtttctgaaattttaaaatattgaatggttattttcagactaaatatgttatcttattttttatatgtttaaaggtagcaggaaaagtgactcttgtatttatgacgggagaaagaggggacaattcagaaacagagagggagaccaatagagtcaaaaatgtctccaacagttacataagcaccagactgccaagaatttttacactgaagccggagcttgactgggaagtagaggtacacatcacatgagaacacaggtggttgggtcggggctgcatggtgcagttcaggtcttcaacagggtagactcttcagaaaatgtggatttttcttttttcctttttttagtttagtggagcctcgctctgtcgccaggctggagtgcaatggtgcgatctcggctcactgcaacctctgcctcccgggttcaagcgattctcctgactcagcctcccaagtagctgggattacagtcccgcgccaccatgcccagctaatttttgtatttttagtagagacagcgtttcaccatgttggccaggctggtctcaaatctcctgaccttatgatccacccgcctcagcctcccaaagtgctgggattacaggtgtgagccacctcgcccagcccagaaaatgtgggttttatttgatctggtgtatttctgtttgtttcagaatagatgtccggataaacagtcacctgagaatgaggaaggtgtgtgttttcaaacctgcacataataaaaagactattgataagattattagaatggagatagaaaactaattttaaaattaacattattttgccatttagaaatgaataaagttatttctgataccagttatttgaagaaatatcatcagaggacttaatttatatatccaactaaaaatgatggcagtgctgctgtttctaagctgtgtgtaaatactcagttacagtttcttaatttggtctcaaatagattttttttttcaacttgcgtgctacaggtttatttttctgttgtattttcagcaatgttttaaaactcattctttgaaattctaaaatttgtcaattaagattgggtttcgtagttcttaacatcttttatcctctctaaaattaagtctactttgatggtaataattaggtttactgtgttgataaactaaggaaagcatacaatttaaaaaagtgattttttaggctgggcgtggtggctcacgcccgtaatcccaacactttgggaggctgaggtgggcgggtcacctgaggttgggagttcgagaccagcctgaccaacatggagaaaccccatctccactaaaaatacaaaattagctgggcgtggtggtggatgcctgtaatcccagctactcaggaggctgaggcaggagaatcagttgaacccaggaggcggagtttgtggtgagccaagatcatgccattgcactccagcctgggcaataatagcaaaactccatctcaaaaaaaaaaaaaaaaaaaaaaagtaaaaaaaaaaagaaaattataaagaaaagaaacccacccactgggttcgagcaattctcctgcctcagcctccctagtagctgggattacaggcatgcgccaccatgcctggctaattttttttgtatttttagtatagatggggtttcaccacattggccagggtggtctcgaactcctgacctcaagtcatccacccaccttgtcctcccaaagtgctggtattacagacctgagccactgtgcccggactgttttctttcattttctgttttggtttacaaacctccactttagtcttcaaatacattcattttattaattatgctgaccattgaatttttttatgctggcaagtatattttaatttccaaggacatttcattgcctcatcagtactttttcatagctttttgttcttgttttataaatgcaataatctcttgactctctctgaagataccaatttggattttctgcttgtttaagtttgcttaagttccttgtatttttgtttccctgaaattggtttatctgcttattttggaccttttaggctcttctttctttttattttccaaatatctgcttttacttatttgtccatccatatttgtgaatgattgactactttggttcattataggcaggtggcatgggttcctctggaatcttttagtcttgttttcttagtagtcttctcatctctaaatgagagggcagctgcggctccatgtagataggtaggagtatagacaaaccttgagcaatgtggcggttaggggcgttgacccattgcacagttggaaatccatatacaacttttgactccccaaagccttactactaatagcctactgttgaccagaagctttaccaagaacatcaacagtcagttaacacatgtgttgtgttgtatgtactatgtactgtattcttacaaaaaagtaaactagagaaaagatgttaaaaaaattataagtaaaaaaatatatacttactattcatgaagaagaagtagatcatcataaagttcttcatcctcatcgtcttcccactgagtgggctaaggaagaggaggggttggtcttgctgtcttgggtggcagaagatgaaggaaatcttcatacataagtggacccacatggttcaaatctgtgttgttcaagggtcaacggtagatggcacttagacttccctataaggtgtgtagtcagggaaccgcctggtagggacccctacagtcacctgacttaggaagtgtgttactcttggggatggagcacttcatttcttttactcctgggcagagctgacttttcttctccaatgatagtccccttctatacttctgggtatgtcagtatttactttaaactactctattcctctttcaatcccacaccttttgaaatgcatttatatatttgatgcttcttatcttttttaagcctgtaagttgtctgactaacagaaatttcccaagtaggtaaatcttaggaaacaaattaaaatgataaatatggtgaaatttaagaccttctaaatgattaataaagtatataaaattcataagtttgcaacttaaaatctcaaatctaaaccaactactcagtcacacattttaaattggaattaaatgactgatctgtttctattgagccgaactctcttaaacactaaaaatatgtaaaatgtgaaatatgcacaagctcctttacataaaaaaatattatttatatttgtttagtcattgaaatagctctgcttttaattataaatttttctggacttgcccacaaaggaataatttatatcatcctagctcagccagttaagattatataacagccagaaatattggcccagatgctgaataaatccttgtcgatgactataaggagatacacagagctctgttaaggtcactgtatcagtgtcctttaagtgtgtgtgtttgaaggtgtggggtggcaggatgcagggaggaagagctgtgatagcccaggtcattcagatccctaatctgctcttttctgtcttcatacactgaattagatttggcctttctttagcttttaagatttatgtgtgccttttccatctaactctaaatacctttgataagtcctgtctcctttgcctgtattttttaacacttaggactacagaactcttgggggcgggggcattcaaatggcatccagagttttagtgcgttctcctgacattgacttttttagccacatttcaaggtcatgctactgacgattacggaccaagagaagagcaagtgactgctgacctctagaggatactcaatgcaataaatgattgtttttctgtgctaataatagcactgacatcatatggttgtaataaatttgaacaggatgattgaagcaaatgtacagcgcctagcatgcactaagaatttggtgactgtgatcattttttatagttgcatttagataaagaactgtccctaaaaattattcatcgttagatgagaaagaaacctttaagcagatatttagataaggggtgttttcttttatatctccagtatattcccactagcactgagcaatattttatgaatctagtatcgcaaaaacagtttagatttatagcaggttctcagcctcagcaccgtggccatttggggctggatatctcgttgccgtggagccgtcgcgtgcatggtaggatggttagcagcgtccctggcccctacgtactagacgccagaaacactcctctccaactgtgacaaccaaaaatgtctccagaacctgccagatgtctcctgggaaaggcaaaattaccaccattttataaccatgccaattgctgtgtatttttttaaatctgttttcctatttgcttctctgaactcagttcctatctttggagctttctatcttttgacctaaaagtggcatggaatatctcaacacttccttttcctccccagctcggggtctaaagaggagaatgtaattaagattaaatccaaagctttatttaaataaataatcaatctattaaggggaaaatatgctccactaaagccataaagccatcggctatcactccttcttgtgagcctgacttgctttttcggtttgtcgctggttaagagaattgcagatgtattccattgaggaaagcggtatgttcccacactagcgaaaaacattgtattcttctagttaatcattttcaaagagctgtttctatttctggttactacaaaaataatggcctgcaggtcatctatttatgatcaagtaaattccgcttcattgaaatgttgtagactttagaagaaagaaagaaaacacactaaaggcttctggacagtcaaatattttaacttggagtgtgaaacactaaattaatcacacagtaacttcaggctgttattagccttttatggtcaatgaatattgattgttgagtgaatcaatgattggacacacgtatacatggattttatcacttggaaactctataattatcatactaaattcccgatattgtggttaatagctttctagaaaaaagagttgttataaaaccataatgtattactgttaaaagttgggattcggggaaaagtaagagctgtataattaatccacctatcaaaaaataatcctaattaatatttttattgttagtgaatttgaatgttagttgaattgttcattttggataaggagattacaaagatgtttgactctgttcacaacatggggaaaatgattgggctatctgagactgagttatcaatagagtatactttttgtttgttacatcagtaaatatcagggttttttttttctgtttttcctccttcttcaagtctgaaaaattatttgcctagaaggggaaacatattcagacaattgaaattccacagttcatcttcccacatttgtgagaaaaaaaaaacgtgagccaccataaagtaactaaaacagctaaatcagtctattactgttgccctcagttaccattcaaaaactgtctgccatacagcaaaacattttttcatacacatgaaccctacagtacccactgtaacaaatacagcaaaaatattacagaataaaaacgtctccaaggtccaataaaagatgtttgtttgatacagtagcaataccagtgcacctgaagagtattacttcatcctgaaaacctcttaaaatctgcaccaaaagattaaaaaacacttacactaaaaacttactaactcagaaaaactcatgggaaggacaattggaattctagtggtgtttcatttctttttttaaaaaatacttgcccttagaaattcacatactaactctaacctagtaagttagatagacatgtacaaagtactttctaattcagagataaaaacagtgggaccaggcgccatggctcatgcctgtaatctcagcactttgggaggccaacgccggccgatgacctgaggtcaggagttcgagaccagcctggccaacacagtgaaaccccatctctactttaaaaatacaaaaattagcagggtgtggtggcacacatctgtaatcccagctacttgggaggctgaaacaggagaattgctcaaacttgggaggtggaggttgcagtgagccaagatcacaccactgcactccagcctgggcaacagagcgagactctgtcaaaaacaaaacaaaacaaaacaaaacaaaacaaaaacaaaaacagtgggccagtcactgtagctcacgcctgtaatcccagtgctttgggaggacaaggcaggaggattgcttgagcccaggagtttgagatcagcctgggcagcaaaaagagaccttgtctctatttaaaaaaaaaaaaaaaaaaaaaaaaaaaaactttttttttttttaattagccagatgcagtggtgcctgcctgtggtcccagttgctctggagcctgaggtgggagggtaacttgagcacagaggttcaaggctgcagtcagctatgatggtgccactgcactccaacctgtgtgctagagtaggatcctgtcccaaagaaacaaaacaaaatgaaactaaaaagagtggtgtgttggtaaatgtttaatattccactatccaaaaaataaagaagaaaataagttctgatgtgtagcgctttccaatttccatggtataaatactcccaccatggacaacttcaagctacaacatcgcctcactgaatgcagagctgaaagtcatgctgctgacaccattctgcagtttccatcatagacgtaatgaacttcggagtacagacagtagcaaaatcattaggaagttatgagttttgagtattgtctttgtttttagcataatttatttagtcacaggttttagtaacttctagtaatggctgtatttgacaactgactctccaaattcccaaaattttaacagtcaggcaggccagctccaggagcacacctctgagatacattatatatgtgtgtgtgtaatttacatttacatttacatttacatatatatgtaaattctctaaaggttaataggtacttgaaacatctatttcccaggtgttttaaagtaattttttgcagtattagcatctacttattcaattccctagttctagtatctaaaacaggagctggtataaattaagttctcaataatgttgggtagctgcctagtcctaacaatgtgaaataggcctgataaatcaaaggaaagttcagttagcctgtattatctcaaattatctctgaattaaaaatctgtattgataactagaaaaggtctttctttttttcttcccccctctctttttttttttttaagacagagtctcgcactgtcacccaggctagactgcagtggtgtggccatagctcattacagcctccaacttccaggctcaggcaatcttcccacctcagcttcctgagtagctaggactacagatacatggcactatgcctggttaaattttgtattcgttgtagtgccaatttcaccatgttgcctcagctggtcttggacccctgggctaaagcaatccacccacctcagcttcccagggtgctggaattacaggcatgagccaccagacctggtccctaggaaagatcttaacctactcaataagcctataagaataaataagtggcttcctccaggttctctgtcctttttgtattaggatcctgcaaatcttagcactgtcttagccccagcagaccttgccaacttacttcatccttgggtattctttttataattaccctcaaggaagccatgcttcttaggagagtggagaagagaaaaggtaagctcctattacaagaagaaactttgctttttacctctaccaccttcacaatccagcaagaattgaaaggaaacacattcttacctcccatgcactcataaacttacagctgtctccccattccccacaccaccccctgccccccacacagaaaacctactttacaaaaactgtcctctcaaaggtctccagaaaccttctccttgcttaatctaatgacttccttttggccttcatcctaccaaacttttccctagctttttttttttaaatcttttttaaaagtttagatttgggggttacagatgcagatttgttacatgggtatactgtatgacgctgaggtttgggcttctaaagatcccattgcccaagtagtgaacaaagaacccaatagatggtttttcaccctttcctacctctccccttttgggactccagtgttcattgttctcttctttgtgtccaggtgtacccaatgtttagctcccactcgtgagaacatgtagaatttgattttctgttactgtattaatttgcctaggttcttggcctctagctgcatccatgtggctgcaaaggacatgattttattcttttttatggctgcatagtatcctgtgggtgtatatgtatcacattttctttatccagtgcaccagcaacaggtgcctgggttgattcctcatcttggctattgtgaacagtgctgcgatgaacatatgagtgcaggtgtcttttggtagaatgatatgaccctaaggaacatccattctttcttgaaaatttctgacatttatttattcatttattccatacatatttattgagtgctcctctgttccagccattgctctggacattgggaaatcagctatgaataaagaacatgaggtctttatgctctaaaagaatctattttaacctaggaatacagcttacaagggacctgaagtacctcttcaaggagaactacgaaccactgctcaagaaaataataggacacaaacaaatgggaaaacattctatgctcatggataggaagattcaatatcgtgaaaatggccaaactgcccaaagtaatttatagattcaatactgttcccatcaaactaccattgactttcttcacagaattagaaaaagctattttaaatttcatatggaaccaaaaaagagcctgtatagtcaaaacagtcctaggcaaaaataacaaagctggaggcataatgttacctgacttcaagctacactacaaggctgcagtaaccaaaacagcatggtactggtaccaaaacagacatatagaccaatggaatagaatagagacctcagaaataacgctgcatgtctacaaccatctgatcttcaacaaacgtgacaaaaacaagcaatggggaaaggattccctatttaataattggtgctgggaaaactagctaaccatatgcagaaaactgaaacaggatcccttccttacaccttatacaaaaattaactcaaggtggattaaagacttaaatgtaaaacctaaaatcataaaaatcctacaagaaaacctatgtatgggcaaagactttatgatgaaaacaccaaaagcaattagaacaaaagccaaaactgacaaatgggatctaattaaactaaagagcttctgtacagcaaaataaactatcatcatggtgaacaggtaacctacagaataggagaaaatgtttgcaatctacctatctgacaaaggtctaatatccagaatctacaaggaacttgaacaaatttacaagaaaaaaacaaccccatcaaaaagtgggccaaggatataaacagacagttctcaaaagaagacatttatgaggccaacaaacatatttaaaaagctcatcatcacagattatcaaacaaatgcaaatcaaaacaatgagataccatctcacatcagtcagaatggtgattattaaaaagtcaggaaacaatagatgctggtgaggctgtggagaaataggaatgcttttacactgttggcgggaatgtaaattagttcaaccattgtggaagacgatgtgggaatttctcaaggatctacaaccagaaataccatttgacccagcaatcccattactgggtatgtacccaaaggaatataaatcattctactgtaaagacacatgcacacgtacatttattgtggcactgttcacaatagcaaagacttggagccaacccaaatacctattaatgacagactggataaagaaaatgtggtatatatacactgtggaatactatgcagccataaaaaggaatgagatcatgtccttttcagggacatggatggagccggaagccatcatcctcagcaaactaacacaggaacagaaaaccagacactgcatgttctcactcataagtgggagttgaaaaatgagaacacatggacacagggaggggaccaacccacaccagggcctctcagggggtggggggcaaggggaaggatggcattaggacaaatgcctaatgcatgtggggcttaaaacctaggtgatgggttgataggtgcaacaagtcaccatggcacatgcatacctatgtaacaaacgtgtacattctgcacatgtatcctggagcttaatattttaaaaaataatataaataattaaaaaataaaaaggcacaacaaagggaaggaatttaatttttgaaaaagaatattttgtaactgagaaagatagtaaataaacaaaccaaataaactgacaaattaaggggaagtgtgagcgttttgcagtagagtgaaggactctctaatgaggtgacctttgagctgagacctgtatgacaaggaaatgccacagggtgagctaaggtggagagagttctggacagaggcaagtgcaaaggccctgaggaagagtgagtctggtgggacccaagaacagagaggccagggcagctggagtggaggccagtggtgaggatagcagcacgtgagtccagacagaccgggagggacagattcactgtcttcctcctatagctttgctctttggctccttctgaaggcatcattccaccgagtatcaccttcccctccaatcactccccgatccactttcatgccgaccccgccaccccaaggacctgtcagctcctccataaactgatatctcaccagttcgaattaatttccccctctttgattcacacgtcaaactctgttgacccttttatacccaatcctcatgtactctccaatttttctaccagattggaagctgtttgagcacagggagcttttgtcttactcatcttcagtgagggcaaagtcttcgtagttgcattgttatgtttgtttcatttgctttgctttgctttggttttgtggtctatgacatagttaagtacgaaacaaattttttttcgtttggtgaaatgagtgaacatatatttaatgaatgttgttctggcaaaaattttgaaaaactagtgcttaaaacatagcttagaattaagtctttgcatgaaaaaagacacgattattagaggcagtagaatgtgatgtttgagagcacaaagtctgaatttagactgcggggacataatcccagccctgccacttactaactgtgatcttgggccagttacttaacttcccatgccattgtcatctcatctgtagaatggggatagttgtatgtaacccacagggttgttttttaggttgaatgaataaatgcatggaaagaactagaaaagaacatagttagaactgcgtaactattggctattatttacttattgatgggctgaaaaagaatatacttgattttcacttcctgtccagcaacatttgtctgatttttttgcacattttggatgctctcaatagtcatttcattacaagtagaataaccatatccaagaaaccaaggatttgaaaaagaaataattgtcttacttaactaacttgatttgcaggtagaactactgatgataacatgcaaggggacagaaagctcatatttttccttctaaggcaactattagtaaatcctttatttcacacaccacaaactgaagtatttctgaagtgcagtccaggaagaaaatgtgtctcttagaaacagagaattgagaaagcagaaatagaccttctaggtgaagctgaggacttctggtgcatccctgcaggccatgagacattttctcagataagtgggaagttgatattgagcctctgattactctgaacaccttccctccacctccaactgatggcatttattgattagatcaacttggggtataagtgcagtgatgtaactagactttgagagattgtcttaggttatgttttgactatgcatgtatttgagaataccacagtacttagaaaatttaatttatttcaccagctaccagaagtatgacaaattagtgattgacaaggcaattgctagtgggaaaaaaaaatgaataagacctactgtttgacagcacaatagggtgactatagtcaataataacttagttgtacatttttaaatcacttgaagagtataaatggactgtttgtaactcacaggacaaatgcttgggggcatggacaccccatgctccgtgatgtgcttatttcatattgcatgcctgtatcaaaacatctcatgtaccccacaaataaatacacatactgtgtactcacaaactttttttttaaaggagagaaggcagttggtgtttggtattttaatcacctcactagtgtggatatgtgacaatcataggagccattacctcatattaggtcctggcctgttgatgcatcttttgccctctgcccctctttttgaattgtttttgggattcatgggttgttggtagggagaaacctttctaagccaggggtggtggctcacacctataatcccagcattttgtgaggccaaggtgggaggatcacaagaggccaagagttcaagaccagcctgaacaacatagcaagactctgtctctacaaaaaattattaaaaaattagccaggcatggtggcgcatgcctgtggtcctagctactaaagtggctgaggcaggaggatctcttgagcccaggagttggaggctgtggtgagctatgatcgtaccactccactccagcctgggcaagagagcaagaccctgtccccacaaaagagagaaacctttctaggatgttaaaatccctcaaacagaaatcttagaaatcagagagtattaactctgatttccaaattaacatcttggaaatcagagaatacagctaatgacaagaataattaaaatgagctgaataacactcaaaaaagaatgcaaatcaactttcatggatgaaatcgcatgatttgtaaaaagcaggcagtgagcagatattttgtggttaatgtttgttgattaaggttctttgctgttcaccaacacaatcagtaatttgtttttgttgtttttatatgtaacaagtttgttgtcctacaaaacatcccacatttccataattttacaaaattaccctgaatgagatggaataagccgattagaaacaaagatctgagagcaatgtgatatctctaattatatgattttatttccttttaggaaaatggagtagcttttaatgttctattaatctctgatttcaaagtgaatatgaaagaaataatgactatatttgtgaaactaaggtagatgattgtcaaaacatgacattaaaggaataaattcttaaagtatcttatttttgcgttagagaccacagctggctaagtcatttacattaatagacttgtagtgcttttacatgtgcagtagtgatagtgtattaaatttaaaggtcttacttcctgcctaaaaacatcaagaaatatttttaatttttttttttttggaaatgagatgcctatagaaaattgcaagaaaaatgatagccactaccttaacttttatggtgatattctttttttttttttttttttttgagacagggtcttgctctgtcacccagactggagtacagtggcatgatcatggcccattgctggcttctcctcctgggttcaagcagtctccagcctcagtttcctgagtagctgggactacaggcacatgccaccacacccagctaatttttttttttgtagtgatggggtatcactgtgttgcccaggctggtcttgaactcctgggctcatgcaatcctctcgcctcagcctcccaaggtgctgtgattacaggcgtgagccactgctcctggcctctccttgtttttctttattatttttccatatctttacacatccctaagcaaagtggagtgattttgcctatttttgtattttgtatgtaaatgcaatcatattctaagtatatattttttgagggcttggtttttttttactgaatattacatttctgcatttggtctgtgatatttgtataatattccattttagaacctatatcacaatttatccactaaatgttggtgaacatttagtctgttttttaattttggaacactcatcgaatcatagtatagtaatgttcataagtatgaatctgaataatcaaaaaaagattcacttggattccatatttccagtgtaagattgtatggaattagagattattctccccagaatggatctcaatgtgatatttttgagcagttaagagtgagtctcaatactggaaaattcacttacttggaatgtcctaatgaaaagagataatcacattcaataactacactgaacagaaagcaaaaagttggaaagctttatgttgttaatagattttcctattttctccatccagaaaataagtagtgagcttctttcaggcatgttttaaactgttacaatatgattacacttctttgaacacattgaaatgagacaacataaattcagtcatctccatcttaaagtcatttgtagaaaatggcatgttatattccatgaatagcctgctgatgtacaacagataaaacattacacaaaatgataggggaaaataccattttaaacatctaactgatcatacgaatgagtgtaatggctaggaaggcaaatgaatctttgatgatacacttgcaaggaatttaaaaaatcattcattcactcatctgtcaactattaattaggtaccatctatgtgtttctgttcatgaggagcttcggcattacagggaggagaattatatattagataagtatttgcatacatggggtggctggtgctattataaacaatatgcaatggataatgaagagaagctttctctctagtaaggtcagggaaggcatctgaaaggaaggaaagtttccattgaatttaaaatatggattggagtttgccaggaagacaaagagggaggccatttcagaatgcagaagttttggtagccttgccagtcgcaaatacttacagaatgaatggatgatattggtaaaggaatgtgcaaagagacataaataagccaattgggaagtccataatatggaatgcaaagtaacagaaataatatgttttaaacagttaatgtttattcaaaacttacctgtggggttgggtgcagtggctcacgcctgtaatcccaacactttgggaggccgaagtgggtggatctcttcttaaagtccagagtttgagaccagcctggccaacatggcgaaacctcgtctctactgaaaatacaaaaattaactgggtgtggtggcatgcgtctgtattcccatctactcaggaggctgaggcaggagaattgcttgaacccaggaggcagaggttgcagtgagctaagagtgtgccattgcaccccagcctggacatcagagcaacagagcgtgactccatgtcaaaacaacaacaacaaaaaccttacatgtgccagacactatacttagcactttacatatgttacttattcctcactcttacgccatgaaagatgtgctattagtattagcttcatgagcatgtcgcctgtgctgagaagggctccacacttggattactgctctgctattattctgctgtgatccttcataatttggaacaagggacaccacattttcagtgtgaactgggtcccccagtcatgtagccagagctagtccagagcatccccgttttttagttgcagaaactgacctacaaagcaaagtcatttgcctcaaacctagttggtttttgtctttttagggacaggatcccactttgtctcccaggctagagtacagtggctcagtcatagctcactataaccttgtcctcctgggctcaagggatccttgtgcctcagcctctcaggtagctgggactacaggcatgcaccaccatgcccagctaattttttttttaaattttttgtagagatagtgtcttgctacgttgccaaggctggtcttgaactcctggtctcaggcaatcctcctgccttggcctcccaaagttgctggtgttacaggcttgagccaccacacccagatgaaacctagtctgtctgtctttctttctctttctttcttccttcttttcttttccttttcttttctttctttcctttccttctttttctttctctctttctctgtcttttttctttctttcctttctctttctttccttcttttcctttctttccttctctctctctctttctttctctttccctccctccctcccttccttccttccttccttccttccttctctctctttccctttccccttcccctcccctttcttccctttcctttctttcatctggctctatcacacagcctggagtatagtggcataatctcagctcactgcagcctccacctcccagactcaagccaacctctcacctcagcctcctgagtagctgggaccagaggcgcacaccaccatgctcagctcatttttgtactttttgtagagatgtaattcctccatattgcccaggctggtcttgaactcctgggctcaaactcctgggctcccaaagctgctgagattataggcatgagccactgtgcctagctgaaacctattttttcttcatgttgattcctacggtgttagtcctatgctaacctgactctgttgtcttctattttcaagataaatcattaacagaagatatgagctactacagttattcagagttagtgtacagaaacagaaaaaaataaagcagttttaaaaaggaaaaaaatggactgaatgattaggaataaataaaacatgcaaatattaccttgagtcaaaattggaattccaaaatgaataattagtagatgtaaggcattcctccagtgtacttcatggcttgaattcaaaatcatgttccaaggtaaataaatctgctccatcttgtttatccaaagggcagtttggtgttgacttagttctgctcttttttggtaacttattcaagaaaagcaaagagcagaaaattcgtggtgttttaatccagggagaaggagcgggtggaagtaaacagagttcctccttcatcagacttcgtcagaactgctatgccctctgactgcattagattaaatactgcaaataaattggatcccatttggtacttaataagcacagctcacttggaagaagttttacttcaagatatcttcacttttctttggaatatgacagtttacccctctgaccacatgaacctcttcaaaattttatttatgctccttcatgttaattcagaaagtagaaagtaataatttttttgagacagggtctcactctgttgcccaagttggagtacagtggtgtgatcagggctcactgcagacttgaccttctgggctcaagcaatcctcccgcttcagccctccgagtagctgggactacaggcatgtgccaccatgcccagcaattttttgtatttttggtagagacgggtttttttgccatgttgcccttgctggtcttgaactcctggactcaagtgatccgcccacctcaacctcccaaagtgctgggattacaggcgtgagtcactgcacctagtgaaagtaatgatttttttttaagcattcccataggccacccttccttgaagactgataagtcaaatttccatgatattaaagaatggtatcctagaacattccagattggttttcattctgtttgacttaaagatttgaaatatgttctgatgttattccagagcacctgtggatttgagggtccaagaaaagtgaccacaaaagagcatacctattaattatataaagaacatgttttttgtaagtatatccattatattttcataataaaaataacatgattttatttctatttatttcttcagcctccaaaaatatcagatatacctaaatgctcttttgtagaaatatgcacatctggaaatcctaagttgcccggtcatttttgtttgtttgtttgtttttatttgttttgagacggagtctccctctgccacctaggctggagggcagtggagtgatctcggctcactgcaacctccacctgctggactcaagcgagtctcctgcctcagcctcctgagtaggtgggattacaggcgcatgctaccgtgcccagctaatttttgtatttttagtagagacggagtttctccacgaaaccaggctggtctcaaactcctgacctcaaacagtctgcccacctcggcctcccaaagtgctgggattacaggtgaggcatgagcctccacgcccagccccagtcatgttttcaatgaccacatttataccctgtattctgctgaagacagaaatttaaggcagtatccgactaacctcttcttacagatgagcagggtttggcacactagagcctctggagctaggactgagggttggggggtgtcctggcagggctagttcaagacttcagggcaaggggaagttttgtcaaatgcctgaggaaaggcagagtggaagttgaagacatatcagaagtgtcaaattcttgaagcagataggatatgagaagatgggctgccttaggggtaagtggtgagcttttgtagccagttctggaaagaggacctgaaaagatccaacctctatgcagtgctctaagaatcttagaagtcatcaaatgctgggtttcgtggtagaaattcaagagctgccagaattcaagggtcaagactgaacaatgatgaaccatgcagagaaaagaggagaatttacatggccctaaaacaataatttgctaccttggccacacattagaatcatctggggaactttaaaaaatccacatgctcaaccaagttgcatcccagaccaattaagttggaatctcatagggtgggattcaatagttggtataacttaaagctccctgtgattccactttgcagcaaggctgagaaagactggtttaaagcaagaaggaatgcttacctgggtacttttggcctggtttatccacttaggtatcatactcattatattcatagttagaataattcactgttctataagtataaccactattatacttaagtataaatatacttaaattgcacttacactgtttgtctacacaggcacttaaagggtcctgcttactagggttcaattcacatcatcaaagactgaaacttctataaagttttagtccccctaatttaacaaaccagtgtagaatagcaagacattcatcctaaagagacttgtacattgaagtcgatgtagatttgggactcaattcaatgaactgctctttcatcaggggttggttaagcaagcttcagggattctgagctatttgtgtgaaccaaacgtaaccctaggtcagagatttgtagaactgtatatgatttcactggatatgtagagaataaggaaacacaaaacctccacatctcccaaagactgtatttatgttgggggtatatccagtttttcatttgatactcagagaatagttttgactttgcagacctcctgattgctctcagggctctcagactacacttggagaacccctcacaagaggcatatgcatagtgaaaggagtgagggctgcaagttcatggatgcattattttctcgttttcgtttgtagggaaatacatgctctgtcattgacttgcaaggattttctttttattcttaattgcctccctaatcctttctccactcagctgtggtactcaatgcactcagattaaatgtgtgtgttcttctgggccaggaaggaatagatagcattgatgtggaccctcaactgtattacagaatagggtggtaaacactcaggagaaacattctccctggtaaagtgctaagcaattgttaaacagcattttaaagcatgaatgaacgtcttgcttgtacattccaaagttccacaaacaaaagaaaagttcttattctaaaggagcaggagatgaatcctgccgataatgttttttataatgtggctgtgaatattttttcccagagttggtaatcctaaatcacctcttacaagtaaaaaaagaaaaaaaaaaaaaaaaaagcaggataagaagaaagatataagcttaaataatgggccattgtagtcaaaatcagggagtagccaattatttttgcgatttgcactaagtgtgcgtttagaaagttggattaatctcactacttcactgcagaaattaatgagatgagatcacatggtagaaaccagtgctttgtacctcatgatctcatttttagcaatcttgtatgtcctcgttttatagtacttttatcccaaattcattgtttccaataaaatattttatgtttattttatgctattatatttatagatttatgttttcttgttgttgtttgtttggttttcttttttgagatggagtctcgctctgtgtcccaggctggagtgcagtggtgcgatctcggctaactgcaacctcctccacttcctggtttcaagcgattcttctgcctcagcctaccaaatagctgggattacaggcacgcaccaccctgcccggctaatttttatatttttagtagagactaggttttgccatgttggccaggctggtcttgaactcctgacctcaagtgatccacccttctcggcctcccaaagtgctgagattacagttgtcagccactgcacccagccagatttatgttttaaaaattcagatatttataaagataacacaaagaagtcctaaaaatcgcattcattatttaatactcaaaatatttgacagacttcatatacgtaattacacattagtcacatatcatgcatatgcttatgtaatctagtgtgaatacaattatcgggtctattccttccaaaactcatgacatcaacaagctttagtttaaataaaagttagatggccaggtgaagcagttcatgactgtaattccagcactttgggaggctaaggtgggaggaacactcgagcctaggagttcaagaccatcctgagcatagcaagactctgtctctacaaaacattgaaagattagccaggtgtagtggtgtgttcctgtgatcccagttacttgggaggctgaggtgggaggatcatttgagcccaagaggttgaagctacagtgagatgtgattgtgccacttccctgggtgacagagcaagaccctgtctccaaaataactaaaggttaaaattaaaactaaaacttttttttttttgagatggagtcttgctctgttgcccaggctggagtgcagtggcatgatctcgactcactgcaacctctgcctcctgggttcaagcaattctcctgcctcagcctcctaagtagctgagattacaggcccccgccaccacgcctggctgatttttgtatttttagtggtgatggggtttcatcatgttgcccaggctggtctcgaactcctggcctcataatctgcccacctcggcctcccaatgtgctgggattacaggtgtgagccaccgtgcccggcctttttatcttctgcaccatgcccggccttttttttttggaaaccgagtctcactctgttgccaggctggagtgcaatggcgcgatcttggcccactgcaacttccgcctcctgggttcaggtgattctcccgcctcagcctcctgagtagctgggactacaggcgtgcgccaccatgcccagctaatttttgtatttttagtagagacggggtttcaccatgtcggtcaggatggtcttgatctcttgaccttgtgatctgcccttctaagcctcccaaagtgctggaattacaggcatgagccaccgtgcctggccataaattttttttgattagatgatgctgggcacaatggcacacacccattgtcctagatacttgggaggctgaggcaggaggatcacttgagcctaggggtttgaggctgcagtgagctatgtttgcgtcattgcagtctagcctggagaacatagctagatggcatctcatttaaaaaaaaaaaaaaaggatgggggggtgaaaattgcacaatttcttctgacttttttttaacttaaattaactgagaagccctagagattataactgttacctctaactgcttgagattcttgcataaagtcttgttcctccaacatgttactagaataacagctccagaactgttggtttgaagactaagtcactagcctccctctaggtgatgagttgaacatcctctcataacagcagaagactcagagtctcaggcctatcaagcaacttagccagttagttaatggcaacagagccgggcctagctcagatctccaaatctaaatctggtgtactcttcactgtactgaatgaacttcaaggtttccctggattgtgggccaaatcatatcactctaaaagtaccaagtatgttcatggtggcagccatgcaggagttgattaggggcgcagggtgggggcagtgaggggaaagcactctaagcagatggaagagaaagtgcggaggccccaacacaggaatgctcttggctcagtccgaggacagcaggacaccaatgtggctgcagtgtggggatgaaggggcagagagaggggagaggacgtctgagatgtgagtggaagccatatctccccaggccctgcaggccacagttatctcagctgcagcaagacatgagtagaggactttaattttaagcagcagggtgatacaagctgtctgtgccttataaagacctctttggctgctctatggagattggacagcgtccaagagatgagctggggatattgctaaagggagtggtggtgagaggtggcaagggttggatttgcgaaatactttggagttagcatggacaggacttggtaagtgattagctgggaggataggggagcatgtgggtgctgtttgctgtagtatgaggaattagtagctctttcggggacacagaaagatcaagaagtctattggatatccatgcagagtcatcaaattggcgttaaatgcaacaatctggaactcaaagaccttaaatatttaggaaaatccaacctcgcagaaacaaagagtattccaggactacagaataagtattctttcagcataggtgagaagtgaacatttcaggaggaaatctcttcagatggcaggtcagagaaaggctgggagaagaggattaggaaacagggtgagagggggtatctaaaaaacacagtgggacaaaaatagcactttatgtaacctccctagtccctagcacaacttgtattagtctgtggaaattgtattaaggagaaatattgaaacattatacataatacattgaattagttagattcatttaactactatagaacataatcagcagttcatttacagttaactctgaaaagatgtttaattcattttaatggtatgaaaaagagactttaccatgttaaatgcaggttacaagtaccaaaaaattgcaagctatgattttcagtgtcaaatttacaatacaacagatctatggggttggggagtaaaggggccaaaaaagccaccaaaataccctttcctcccattatttctagaattgcttgaagtggcagctttcatgaagataaaattgctatgcctcttcattaataacagtaggttctcattttcaagtgtatctcattcagcgatagggatggggggatggggaaaagtccttttcagtttttgcagttagtcgtaatatgcttgaattcaacgcgctttctcaaaaaaggctcatttatttgagtggctctgatttgaataaagtctcaccttatctgaagctgctgaattgcaggcgggattgatcatggcttcttagagggataaactctgaggaagggatttccacagtacaactacttgccttaaatagtacagctttgggacaaaagcactttgctcttctcagtcaatagcaatagctcagttggaaattttgttaatgttaaaaaaaaaaaacctgttagagacaacatagattgctatgttgaaagaaaattctattatgtctgtgactatttccatcttgtttttttactatggcatgtgaaattgtttcctacttttattttttgagaaaagcatgtgttggctgttatttaccaaaaacacatgtgagccttcgtgtgtacacacacactagagttttgttttgctgttatgattcactgtctggctaacacgtaccataattatccatatttgtacacatagcatggtcttgtataatcaaagatgacactgttgaggcataaactctaaattggggtgtgatcaagggaattttttcacaatcctctatggttggataaatagactggactttgaagtctggacggaccacttgaagtatgtgacctccaaaattctgcctttttttttgtcgtctcctggcaacgtaacatatttatactttggccactacctctccttccagaaaggtctgctgctgttttaaagtttaaaacaacaaatgagaaagttgtcccgattgaaagttcagaattcctgaggttctcctctctgctttctgtttatgtcgacagataatagcaatgcagactacaaataaatcaacagaaagaacccttctcttttcagattagtgagcatgcatctagttataatgtcattttcattaagcccttttcactgtttagcaaagacaacttgggggcaagtgacgggagcaggggatggaaggaagttggaaacaagctaaggacaaatgttccacggtgtgaatacgagctgggactgcagaaacctcaggtccttccatctgcaatctgacacccagctactccagtggcgtctgtgcgcttctcccagaatcacagaataactgggcacttaactgagatcccaggagctgcttttgagacccacgggggtctggtttttctcctcctgcattttgcctctccagtcttctgtcctactttcaagcaatctgaacaagatggagaaagaatttgaatttcacattctgggatcttaggttatacttgaaagcacttcacattgacagctttgacataaagggcaccttcatttctggccagtttctcattctcagcactatggacatattgtgcaggattgttctttgtgatgagaagctcccctgtgcattgtaggatgctgagcaggaaccctggcctctgcccactagattccagtaaactcctcacccctccccatcgtggcaagcaacaatggctccagaaattgcccaatgtcccctgaggggtcaaaatcacccccattcgagaaccactgagttacagcaaaggaaatcaacatttatttggcaattctggtgtgccagatgtgtactagatgttttatgtcattctggcaattatcttttgaagtcttatcctctttttatagattagaaacctgggagatgacaaggagaagcattgttttgtttcgtgctttcctttcactgattttctggtactcaacaatgaaaatataaccagaaaaattatttcataactaggaaaaaaaccgtgaaaacatgctattttaatatatttatcccataatatgactatacatttcagacattcgttacctaagttacagacatctaatgtgaaaatttgtcagaagtatgaaaagtaaaaaaaaaaaaaataccgttggatatggacttaaccacttaaattaagatagcctttctttttctattctcttaacactggcaagtgaccaaattgtcttggatttcttatttcttctggtgtcaggcatgacaaattatctatcatctaaaccatcactttcacagggtgtgatggctcacacctgtaatcccagcgctttgggacgccaaggtgggcagatcacttgaggccaggagttcaagaccagcctggcctacatgttgaaaccccatctttagtaaaaacaagcagacaacaacaacaaaaataattagccaggcatggcggagcatgcctttaatcccagctacctcaggaggctgaggcatgaggattgcttgaacccaggaggcagaggttgcattgagccaagacgctctccagcctgggcaacagagcgagactctgtctcaaaaaaatatatacatattaagtccatcacttcctgtcttacatgaacctcaattattcttttttctgggtttcaatcttaggtctgtttctcactgatgcatacattttttccttagtttttcctcattagtttttctctatatgttcttaccaaggacctcaacaaaatatctctcagtcttgtttgacagcaagaaaacacacacacacacacacacacacacacacacacacacacatacacacacagttatttagtagtagaaaatttacagaagcttggaaaggcattgaaattcctatatgttccatttagaatttccatcctcatccttctcttcaaacctcagttgctttggttacccaaaatcattattagttaacatttttctattgtaaatatgttttggtggcattataaattaaagtgggctgggtttggaaagctgatactcaaatatgccattgtcagaagagagaggaactatggcttcaaatttaaaactggcatctaaatataatgtttccaaactttcagaacatgtctttcaaacaaatatagattgaatacaggccaaattttgtttttaattcattaaaggagccagcatggttaagccagtttgaaagattatgggaaaggtttaagtatttatagtcattgaaagaaagaaccctgagctatgaattgttcaattagatacaagaactggttaatactccccagaacaataaaatgacgacttagggtgggccagacatggcagctgatgctgtaatcccacactttgggaggccaaggtgggtggatcacctgaggtcaggagttcaagaccagcctggccaatatggcaaaacctcatctctactaaaagtacaaaaattagccaggtgtaatggcgagtgcctgtaattccagctactcgagaggctgaggcataaaaattgcttgaacctgggaggcggaggctgcaatgagccaagatcatgccactgcactccagcctgggtaacagagagagagactccatctcaaaaaaagaaaaaaaaaaagatgacttaggggataatctttcctacaagacagcaatcatttgcatttctcctagaccaatttatttatattggacgaattcatttgcatgtctgtcagcttttgacaagttaaagtctatcctcacagagataaaaaatatcctaacccataataaatgctgagttaaacaaagggttctaatttccctagaaaattagataatccttggttgcgtgttagacacttaaactttatttgaggttgaaaagtaataccaacccattgtagaaagtttgaaaagtactaaattttttaaaaggaaagaaaaaataaataccctcaaaccactacttagtaacccacagccactgttaatataattcatatgcttccttacaagtttcttctaaatatttttaacagtggaatctttactgtaaaaacaaattggtagtccacttttttcttttgctttttgcttttcttttctcttctttcttcttcttttttttcttctttctttgtagacagggtctcactcttgttgcccagactggtgtgtagtagcgtaatcttggctcactgccccctcgacttcctggagtcaagcaatcctcccatctcagcctcctgagtagctgggactacggacatgcaccactatgcctgaggtctttctttattgcccaggctggtcttgaactcttgagctcaagtgatccgtccatctcagcctcccaaagtgctggcattacaggcgtgagccaccatgcccggcctacttttttcttttatttactcttacccattgtagcatttgttatgtaatggaagtgtctcataagcattttaatggccacagtggtctagcactttttgtatcaaaaatttttaacagtttttcctaactttagacatttatttattataaattatttcagaatacaaagaagcatagaaaatattataatgaccaatgatgtaggtgtgatctagttttgaaaacatattactgataaagttgccccttcccctcactaacgcttccaaatatactcctctccagacataaccaccatcctggatttggcattcattattttcatatttatttttttacatgttttaccacctgcataaaatatatagtatttctgcatattttcaactttgctgcaaatcataccataggttctttttaaaaaagtctctatatattaaggtgtacaacatgatgttttgatattcatacacacagtgaaatgaaactggatcgttatcttataccatgaacaaaatcaactcaaagtggattaaagacctgaaaccataaaattcctagaagaaaacattgtggaaaagctgctgaatactggccttggtaataatttttttaaaacatcacaccaaaagctcaggcaacaaaaacaaaaataaacaagtgagattacaccaaaccaaaaagctttctcatagcagaggaaatagttatccaaatgaaaaggcagcctgtgggttgggaaaaaatattttcaaattacatacctgatacggggttaataccccaaatatataaagaactcacagaacggaaaaaagacataacctgattttaaaatgtatgaaggacctgaatggacatttctccaaagaagacataaaactctggccaacaaatatatgtaaaggtgtcaacatcactaatcatcagggaaatgcaagtcaaaatcacaatgaaatactagtttactcttgttaggatggctgtgatcaaaaggacaagagataacaagtgttgttgagggtgtggagaaaagggaacccttgtacacataggttctcaaggtaccttaaagttccaaaacttgatttttctatcaacattgtgtttgtagggatttactcaagtaggtaacttccagacccttcactttcactactgaatagtatccaaaattttatccacttttctgttgatatgcatctaggttttttctttccttctttcccttccttccttctttctttctctctctttttctttttttctctctccttccttccttccttccttccttcctgacttcctgccttcctgccttctttccttctttccttttttttttttttttttttgaaagagggtcttggctccacccaggctgcagtgcagtggtatgatcatagctcattgcagcctctacctctcaggttcaaatgatcctcccaactcagcctcccaagtagctgggaccacaggcacatgccaccatgcctagctaatttttaaatttttttgcagagacggggtcttcctttgttgcccaggctggtttcaaactcctgggctcaaatgatcctcccacctcggcttcccaaagtgctggaattataggcgtgagctaccatgcccagcctgtttcccgttttttactacagcccctcggtgtagctagggacatttcattcatgcacctccctgtgtactcatgtgagggtatccctgggtatgtactgaggggtgggatgccaagcctgagtacttgtgcatcaacagtttcattatatcctgctaaatatctaatgtgactgtaccagtttatactcccaccaacaggctgggcacagtggctcatgcatgtaatcccagcactttgggaggccaaggcaggcagatcgcttgaggtcaggagttcgagactagcctggccaatatgctgaaaccccgtaactactaaaaatacaaaaattagccagctgtgatggcactggcctataatcccagctactcaggaggctgaggcaggagaatggcttgaacctgagaggcagaggttgcagtgagccgagatcgcgccactgcactacagcccgggcaacacagcaagactccatctctaaataaataactaagatattctcccaccaacagtatgtgaaagtctagttgctctgcatcacaggcttacaaaccttttctgtaaagggccacgtaggacatatttaaggctttgtgagttacatggtctctgttgcaatgactgctcttgtaaagagcacaaaagcagccatggagcatacgtaaatgaacaagcccgtatgttccaataaacatttatttaagaacattgatttgaatttcaggtaattgtcatgtgccacaaaataccattctgttttttattttttccccagtaatttaaaaatgtaaaacacattcttagtttgtaggttatacaaaacaggtggctgactgagcttgactgtgggccatagcttgccatccccttcttgacattttcaccaagatctgagattttcagattttttaaaaatatttccaccatgatggatgcaaaatggtaaactgtgatttcagtttgtatttcctgattagaaaggaagtcctgtgtattgaccactagaattttatctcctatgatttatctattcacgtcttgttttccatgttcttttagttgtgggtcttttggttgtgagccttttgatttataggagttctatttcctggatagtaatacctatatatatacatatatgtgtgtgttgcaagcatgctctcagaatattgtgtttattatttcaatgtttaatgctgtcttttaatataaagaagtttttaatttacaaaaggtaaatgtctccaagtgatactcatttgactgtgaaaaaaattagattttccatacacactgagaacttgaaaggcaacgaaaaaagaaagatatcactttcttgtgtgcaaaagagaaaatatttcttcagtgggtgggagtagaaaaatatttttacttttattgcagactttcaagacagtagtttctttgaatgctaacagcttatccagttatgcaacctgttgttctgttctgaagaaaggattctcgagcagggctggagtcctggctgcctggagggacctgtcgcatctgatactaatgaagtgttactgtactttgacaagtttgcaggcgtctgtcttccaagccagctgacgtaattcagaggagaataagaccctcccacttgcgtttgttaattgactttgatgagctcctctgctctgcctaagtggttctggaacagagagctgttgtgatccgacgaactttagaaagtcacactaactaagactacacaccccaagccagcaagaaaaaggaaagcagttgctatgctgttcagcaaagcaagacttggctgccttttagctagtcctgaattcttgctcctgtgaagaaaattcctgctggagtgctgggcgcacttggaattggtctagcatgcttgacagacgccttatagctcctcaaactaaatacattattcctggggtaagcatacgggagagaagccggccagatgcacggtgcggtttaaagaaaacaggaatgcatagaactgttgccgagcttgagctaaaatcatactagttacttaactttttagactttcttatcttgccagaaatgttgccattcacagtgttattactttaatgctgtggtgatttaagcaagtgaaactgtaactctggttttaaactgtatgttactgagcttcatttagtagcttagggagagagtcccggtgcagacaaatttagtggaaaatgaaaatgctttttccagctatagaccagcacttgtcttgagtatcactctgacagcctagccactgacttcttgtgtgtctgagacctatctgtgtaaatcaggatggtctgacttgctgtgttgctgcaaattaagattcttttactattcatcaactttagaaattttgaatttaataaaatacaaacatgacagtctaaagtttaaaatacttaaacataaagctttgccacacgaggactgactgtttgggtcttcggatttggtttagaacttttaaagaaaagactttattattatttattggtgcctttttaggaaaggatgaaaacatgcacaaaaaaaaccctgaacctaaaactaaaccagagcccgtaaaaataaaagtcataaagttacaaatatctgtgctaataggacatgaaaataccattttaaaattaatagtttgtctaaaaattattttaagtacttcttttgtttctaattgttccaacctatactaaatttagtataatagagaaaaaaatgcttgctaggaaatatctttgtggtcatttcttctatgttgtatcatataaaactggaaactgagatactttttatgtgattttgatgattcttttattagattttactttaagttttctaaagatacagaattttacttgctgagttggccctcattaagtattgtacgtgacaattctatttctttaggttctgacatggctggcaatgtatacactaattatcaacggtttctgggcattagatatgtcacgcccacctatcaaatgctactcatgtccaatttagaaattattctgtacctgtttgagtacatctggaatcatttcctgtaaacttgcttgctttttaagaatattatcaaacatgaaataactgctatattttttcctgcagcggaattctgtgaattacgaaaacatgtataacctaaaatgcaaattgccaaatacattccattggccattttgaatattttcagcaacaaaactggtcacaattatgtcacagttatttaataagaatgacaatctatatgatattaaatagtcacgaggccaggtatggtggctcacacctgtaatcccaaaagtttgggaggccaaggtgggaggatcgcttgaggccagaagctagagaccagcctgggcagcatagcaagatctgtgtctacagaaataatagttatcacatgaataatttatcctacaattaattttagtcctatctttaagtatcatggggaatctgcacagggatgtttagtcttttaaattacttctttcctaaaaatagactttttgtttcctatggcctggctacctctcattttaactaataagtatgcttgaatagggcttataaacacatggatttttggatttttgaatggttaaagtttaaaacaactctttttaaagtctttataaccattcaacactttaaattcagtctttctcaaagttctccaataatgacagaaattctttcaagtttggacaagaatataaatggagataattttttaaattatacatatgtatatttatatatgtatatttatatgtgcctgtatatgtattatgggatagttgtttagaatgctgaataaactgtgtggtctttatttttgttctaatcgcaagtatgatttcagtttttatatcagtttcagtttatttcagtaccttctaaagtcattccaaacctcaaatgcaggaaacacatttagaaattacccatttaattctcattgtgcattaaaatgaaatcaataaaccaatgcaatttggtgtaattactttctaccgccaaaggcaaatatatatagatcagtctaactagttttaagtgcataatttatttatgaatcctggtatcattgcattgtaaatttcttgaacatggtatctttaataactgcaattgagtgccattattcttagacccagatggtcacttcctctctatcctttcttcccttcctccaaataacaatgatctctctgatttgggcaggtttttttttattattattgttacccgtaatttttgttttttctgactgtggttaagagaaagtatttggatccagtcagacttgacgttgaatactaaaccgtcccctaaataatggtgtgatttggcagattttatcttctctgagcctcagtttcatcatctgtaaaattaggaataataataactgtgtttcaagatacttgtgagaattttttaaaacgatcagagtacatgcatagaatataattatatggatggcttagcatagttcctagagttattcagggaaggtgtatgccttcctatattttctgcaatagctaggaatgaaagaacttagctctgaaatcccaaactgtgatacttctgataggcagcaaaggaaagtgatgagttgagtttttatttgcatattggaggacagggagagagattaaatgtcccccttgtgaagtgtgacttctaattggagacctgtgggtcagctatcagcgggctgggaggggaaagcaaatacaaacgctctaaaactgtgtgcaaatatttcagtctctgcatatgtgaacattttctagcttctgccaattatcaaagtggtcctcaacttctaaatggtaataaataaataaatctgagtgggcgtaaacctgagacaacaaataagatgatgatgatgaagtattctaagaaggctagtaattttgggtcgattattttttcttcctctttaattttatattgctcaagcatttatcaaaaaaaaaaaaaaaaagaaagttagcatgtgactgtgtattcctgtatgttataagacaaataatgatctaaggctgcaggcttctacatcactcttcagatataatttgtatttaaatgtaagtataatgtccataaggcctggtggctaatgtatgtacatggagatgctggcttcagcatcaagaggagccatcctgtttgattttactttgccccataaaacgatcagtttgtggaaagagtcattttgtgcagtcgcaatagagatttgcagttattttcattattaaaattgacaaaacttttttttttttttttaaacagagtctcactctgtcacccaggctggagggcagtgacatgatcttggctcactgaaacctccaccttttggttaaagtgtttctcctgcctcagcctcccaagtagctaggattacaggcgtcctccaccaaccccagctaattttttttgtatttttagtagagacggggtttcaccatgttggtcaggctggtctcgaactcctgacctcaggtgatccacccacctcggcctcccaaagtgctggaattacaggtgtgaaaagagctctatccttcaaagtaattaaagtttttaccactaaaaatagaagaaattggctgggggcagtggctcatgcctgaacgacaccagcctgggcaacaactccgtctcaaaataaaataataaaataaaataaaacagaagaaatattaaaggaatgtgggtgtaggaataccccacaagctcaccatgctgtggtcagatatttttatgctggcatattgtactgcagttcttttctacaagcatacatatttttatagttgtaactgcagtgttcagacagttgtgggttctgccttttttccttcaaccttattttgagatcactgtttaatcagatcactgtttaatcagcataatataacatcgtgacgatctgccattgattgtccaataaaatggtcatttatttttggactttttaattgattttataattttgttttcatagataaatctataacaaatttgaacatatggttttcagctccattaaataacttatttgagataaattatcagatgtggaattatttgcacagtgagtgggtttgaatgttcttataagtccctggctatgcttttgatatctttttttccaaattctaccagtggacaatgccagtattattcatatactaattttatcacaatgtatgcagtattatgtattaatgattgcttttcatgtaaatagttatacagcattgttttaatttctgtttagtggattactactgaaggtgaatatttatatactctctgtatttctgtgcgaattgtttcattaggcttcctgcatttagattaataagttactttttatttgttggatattaacaggctttccctctctcaccttggaactcccatccgtctgtctctgtatgggggagcttcttccttctttctttcctattaaacacactccgctccctaaaacaaaacaaaaacaatccttacagaattaactgtggaatagtttttcccctatccaatactatgctatcaaaatactgtctttcatataaatttatcttaaatttatattctaataccctactggtatctctagaggttggcttgaagaaatagagtattcgcataattagaaatcaacagatagactagtcacaggattaaacctcagtttcggaatgtggagcaaaaagcttttgactttattcagatatctcacttatttttgacagggagctaataaccattacggagaataaggaaaaggtcacatctgaccgaagcacgcttagtatgaaaagtgcattctgtctcacctttctgttcatagattttacattgtcaggggcagcacaagccaacatatcatcacatttctgttgtttcagggctggcagggcctggcagagaccctgtgcctttgtagcttcctgcagggctccccctccagtggccattcagagatcttccactctcctcttaagaggtggagaactggaactttcttttatttgtttgaggtggagtctcactctgtttcccaggctggagtgcagtggcgcgatctcagctcactgcaacgtctgcctcccgggttcaaacgattctcctgcctcagcctcttgagtagctgggattacaggtgcccgccaccacgcctggctaatttttgtatgtttagtagagacgggctttcaccatgttggccaggctggtctcaaactcctgacctcgagttccactcgcctcggcctcccaaagtgctgggattacgggcgtgagccactgcacccggccagaactggaactttctatatggttttctggtaagggatctgctagtattttgatcttaatgtaatatcatgtcatttgttaattcacaaatagtcatcacttttccttcaacctttgttcagttacctagctttgttaatgttagtggcttttttgggggaggaggggagctcggggggcacagggtctcactctgtcgcccaggctggagtgcagcgatatgatctcagcttactgcaacctccgcctcccaggctcaagccatcatcccatctcagcctcccgagtagctgggactacaggcatgtgccaccgcgcctggctaatttttgtgtttttcgtagagacaaggtttcactttgttacccaggctggtctgaaactcctgagctcaagtgatccaccctccttggcctcccaaagtgctgggattacaggtgtgagccactgcacctggcctgttagtggctttttggacatcagagaagagaaaaacctgacccgtgaaatcacatctaagatccttaattgtgctgccaacacacaaaatagacctgctgctgtcagtcagaaggggccatactcattgataaaagtgcaccttttagaaagtctgtttcatactgttctgtgccgcctagtcttcttaatagaagaaaaaggctttgatttgaaaacatgataggatggacatatctgactgcactgaaaggacaagaacaagattttattttattttattttatttttgagacggagtttctctctgttacccaggctggcaggctggagtgcagtggtgagatcttggctcaatgcaacctccgcctcccagatgtaagcaattctcctgcctcagcctcctgagtagctgggactacaggcgcatgccgccatgcccgtctaatttttttttttttttttttttttttttttgtattttagtagagaccaagttgcccaggcttgtcacgaactcctgagctcaggcaatccgcccaccttggcctctcaaagtgctgggattacaggcttgagccaccatgcccagccaagattttattcttaattctagcactggctccttagtttttgagcaagttgattaacatctctaggcttttttttttccccctatacaatgaaggcaataatttttatctctctactgctctgtctggaaggctataaaagcctatacaggtaatgcagtatccttaaagcatctgagaatagctgtccctagttttgtctttactttgaagcctgagtaattacttaaggaatgtaccttgaatcttgagaccatgtttctaacaacacaggtatttctgcaacctgaaatctgatgagcctgagatcctttctgttggacccaggttgaggactattttcgtgacttcgcttaatgagatttaatgttcaatataaacacttgaaaggaatttttcaaggctaaattctacatcagaaggttttgagcgtcgtgcacagctcaacttccaagtcttttacagtgggctgtgaataattaatgctgatttgatatctgggcattcttttaaaaaacgtgtatatccacccaaatataacaatatagaaaaaagaagagcctcatgatattgcccaaaattttaatgactcacatgtgatatgctgagtactatctaggtgaagttaaatgtggcctctgttgacgaaattgccacttacttggataacataacaagataaaaacacgtttgcaacgatgtacattttgagaaatcatgaatttctgcattgtagacataaatatttaaagaactctccgggtaaaagatcagttgaaaatttggaaattgtggaattcagttcaatttagaatacttactgaatgacaacaattagagaataattttgtcaaatgtctctttaaaatgatttaattaagatacatatgtttggcactgtagctggaatacagaggcccaaggtggttatatgggctaaatttgaactcagaaaaaggatggatggacggacggatggacagatggatggacagacagacagacagatagatggatggataggtggatagatagattgtttgagacagagtcttgctctgtcacccaggctggagtgcagtggcctgatctcggctcactgcaacctccacctcctgattctcctgcctcagcctcccgagtatctgggactacaggtgtgcaccaccatgcccggctatttttgtatttttagtagagatggtgtttcaccagtttggccaggctggtctggaactcctgacctcaggtgatccacccgccttggcctctcaaaatgctgagattacaggtttgagccactgtgcccagatacaaagtttatattttaaagagacctcagaactaggccaggcaagatggctgatgcctgtaatcctagcactttaggaggccaaggtgggaagatcgtttgagctcaggagtttgagaccagcctgggcaacatagggagaccctgtctctacaaatatattttaaaaatcagccacatgtggtggtgtgtgcctgtgatcccagctccttgggaggctgaggtgagagatcacttgactcccggaagttgaggctgcagtgagctgtgatcgtgcttctgcactccagcccgagtgacagaatgagtcccaccaaacagaacaaagggacctcagcctttcttcacttctttgttcttcatatgaagggtgggcattcacaggacattgcaggaggtgtgataagattcagagttccccatacagcctccacttgaccgcttctatttgaaggatgtgatgctgtggctggaacaactggttggtgaaaatgttgttgaaagtcgtttgtttaaagagacctaaaaagaaccgttttcccggagctccggcatactacaatgacctaagttaatagaccacagcgagtgtgaagaataatgggtccaattgttgatgcagtatctgcttttaggctgagaaaatatatattggtttaatttccacaactgagtttgcctgacttctctgggaccattttccattccagcagcataaacctggctcaaaatgccattaaaattgatgacaatctgctaggtgagatgagccagacacaaggagacaaatacagaatgaccccacttatataagggacctagaatagactcacagagtctagaatggtggtttccaggggctgggagaagaggggagtggagagttagtgtctaatggggacaaactttcagttggagatgatttaaaaaaaaaaaaagatcctggagacagaagatggtgatggctacccaataatgtgaatgtattcaatgccattgaactgtatgcttaaaattggctcaaatggtaaatcctatgttatgcatattttgtcacaatgcttaaaatacaatttaataaaaacccacctgtattgcgcacgtatgttgcatgaggccaaatgctttatatctattattattatttttaattccgtaacagctgggtgcggtggctcatgcctgtaatcccagcacttttggaggacgaggtgggtggatcacctgaggtcaggagtttgagaccagcctggccaacatggtgaaaccctgtctctactaaaaatacaaaaaattagccaggcatggtggcgagtgcctgtaatcccagctactcaggagggtgaggcaggagaatcgcttgaacccaggagatggaggttgcagtgagccgagattgtgccattgcactccagcctgggcaacaagagcaaaactcagtctcaaaaaaatttttttaaaataataaaaataataataataattctcataacaacccagtgaagtagacacatgatcatctctagttggcagataaagcatctcagcacagtcaagtttgtcactagcgtggggtcccacaggtgtccgtggaaaaagcaggaattggaagcaaaagggcagcctcttccatgcacgcagcccacacagcactgcctgtgcctccttgttgtttttgtttgttttgcctctggtgactgcactttctaatggccccagctgctagagcagccgacgttccctcaggagtagcgctttaggttcccttaatcttcacccaggggtacctccttgaccttgaaccctgcaggtcctgtagcaggaggtgagattgcccatcagccctccaggagtccaccagacctggcaggccttcatgcagcagaacaaaaggccagctgtttatttcctaggcagagttcatgaaaatcaccccatgggtgtgataccaagatcatcttaaaattaacttgtgttttaaaaaccattttctgtttggttttttagtggtggtggttgtttttgagacagggtctcgttctgccgtccatgctggagtgcagtggcacaatcatagttcactgtggccttgtactcctgagctcaagccgtcatctatcacagttaaaaaccatttttaatcttctctaaacaagtaacttttcttaacatagttttcaatcttctagaatgatcaactagaatttttttaaatgagctgcttttttcttattatatgccagctactttttggaaaaacaatagcatagagtcattctcacaggagaatgtatataaaaacaaagtaaatatatttttataaagatcacatgtacaccctttcttttctttttttttttttcttttttgctaaaatgtgtatttataaccagatttctcatcaggctttcttgggatctttaaaatatgtttcttttgcaaatataggcttaggactaaatatattctgtatcccgtcatcatgttgtattacagatgagaagacaattaattctgtgataaagtatcataaggcaagaaagaaggtgcttggggaaattggactgtgctagagatcttttctgattctgcaatatactacgtattcagtgatctgctatatacaatgattactgtctctttacattcttctacctatattttttaattgggtgagatgatgaactggaaaatgatttgctacatccagaaatttcaaagcattcttaaggattttgttgaaaacacatgttattctattgttaccgttttctgcctttttcactctaccatggaaaaccagatggtctgtacaagccgagagaaataatttccaacccagtgtatttgcataatttcctctctgcccttaatctggaacaaaaggaaacaaaatgaattgagttcagcataataaactagattggttcttaattacagaattaggaaagtttttcacataatttaagattctttggttgtattgctttcaaagttagagaaagtctcttttaaagtgtgatttctattagaggctttttttcctgatgaattcattgattcaacaagtcaaaatgggtgacagtttttgcaaaccaaaggaagagagtgatgacatttaaaacacatatatagacatagagaatttcaaatgttctacactcctgctgctctctcaaggcgtgttcagagtctcctaaaaaggatgtttgacctgtttgcagagctctgacagatgatattttgacaggtctatttcttctgcgtgttcaatgcaatgcccaagatgaataggcattcaacctaaaagtacaacttaaaagtacatttttgcatccaagccagcctctgcgtacttcattcttatccttatataagggtaagatatttgatattctgataatcctgttacctttctgatcgcatgagttgagtggacttccacgcatcacgtcccatgacagggctcctctgtgaagcagggaaaaagcatggcatctgatctccttaattcttacaacaccaacagaacataattactttatcatacagggctatgaagatagcacatgtcaccactgtatgaaagctcttaggttgtggaatttagtctaatgttatcatggaagagtactgaaatagggaacagtagggttgataaatagagaaagaaaagagaaaccaggaataatcagtgaatgataagcaagtaacatggtttaaaagcattccaggagttccatttttaagcactcttgtttacttagttttgctacccacttgttgctttggaagagtttctattaattagatgtcatttttcaaaagtgcgtacttaattgttatatgaattacaagggactgcataggtttcgttgcaaaaatgtttttcaaggaacacttagaggaaacatgcttcgtagcatttcatagtatatgacatttttaagggagaatgctttacatgtaatatgtagcacaatttggaattattagtatattggattttctcatgttctgggcaaatgaaggaacatatatgtttgtatcaataaaagctgtgaacagaatatgtgagcatattttgaatccatcaaatgtattacatcacctctagtaaagctataaattatagaatactttaataaagttatttttcttattcatgaaatattatgtctggtagcaggaaaatgtgatctgttcagaaaaaggataatgaaagaaatcttttattagagaaatatgattgctatacaataatgtggcctacatttaattctacatgttttaaaattagaattgggctttaaaaatttatggttctatgccaggtgcggtggctcatgcctgtaatcccagcactttgggaggccgaggcaggtggatcacaaggtcaggagttcgagaccaccctggccaagatggtgaaaccccatatctactaaaaatacaaaaattagccgggcacagtggtgggcacctgtaatcccagctactctggaggctgaggcaggagaatcgcttgaacctgggaggcagagtttgcagtgagctgagattgtgctgctgcactctagcctgggcaacagagcaagactctgtctccaaaaaaaaaaaaaattatgattctatatgaaacgtacgtttgtatggacttggaaaagtcttagttaaggacataggccttctcaactctttttaactctgtaactttatgatataaacaaaatatgtaagcatttcttcacagttcgccgatctacgttgattcagtataaggtacacatcaaagtaaaattaaccaaagactctaatttgagggaataataaggcacatggttgataagaaagaatacaatattccaggggttatgaactattagcatttctgattcatggcaatccaatttgagagtataaatttggattaccagcttagttctgaaaaactttctttatactgctctatggcagctgagggcttccggttcatcacatgtatctgtttagtctgctaactctgacaaaagccattatctattttttttgcccaaaggcattataaggaaatagtatgagcaaagttttctttctagtataaacaataaatcttactagccattgggcaaactcatattctggtgaatatttgaaaaagcttggcactcattaataccagcaagtgtccagtagcttgatgagtactttatagtatttaaatggaatgtatagtctgtcaaaaaactatagtaggccttaattagctgggtgacattggacaaattatccagagtcaaatccctgagagtcaatttgcttatcttttcatttggagtaataatgatgtatgacccctatagacctcaaggctcaaatataatttgaaaatcttaaaaatagcaaagcactgtatgataatgaggtattaatcatttaacaaacacttgttaagtgttagctcctttttttcctcctgacttgggcccttaaactgcttgcctgtcttgggaagagtctccttggtgaggtcctatgagaactttccactgtgcctggtcccaaccaccacccaactctccacccttccaccaacttgtgctggccttgaaaaggtcagaaggctgttggaagagtcctggggagagaaacatggcagccgagcgcaagacagttatggtggggcctagagaggagccagatgtcatggtgtggttgattgtgttggatgaagctgaggtcacagaagatgaaggctgaaaggaaagctagggttattttgtggtgtttttgttgttgttgttgctgtttttgcttgtatgtttgtttctcaattacaactatagggatgggggaactatctttagaggagtctcaggacccagcaggcccaacaacagaggagtggggacttctgagaagtctggcagagcaggtgatgggcagtagcttttccggttctgaaaatatctgcataatctacacaggggtcagcagggttcagagaattaacctaaagcacaaccataaaaccatgtgtggtttctttcttcaaagtcacatctgaagctcaatattacaggttgagcattccaaatccaaaaatccgaaatccaaaactttttgagtacttacgtaggctagagacacctttgcttcctgatggttcaacgtacacaaactttgtttcatgcacaaaattatttaaaatatcatgtaaattaccttgaggctatatgtataaagtgtacatgaaacattaatgaatgttgtatttagacttgagttccatccccaatgtagctcattacatacatgcaaatattccgaaatccaaataaaatttgaaatctgaaacacttctgtcccaggcatttcaggtaagggatactctgcatgtacactctaagtgtttcagggtgcttaacatagtacttctatcatttcttgttatttgagctttctagattttggagttctggatgagaagcttatcttttacaaacattacttgtagttattcttttccaggtataaacctaggtagaaaaaagttgttataatgaaaagaaaaatgtatcgtcgtttttttaaaaatgggacttctatatgtaactaacgatttggtgttagtgtgagctatgatttgttctcaggatcatgaatgatatcacacaaatgattacgacacttgaataaatgtggcctttatttaattttttgatgctattgcagagctgctgctaacattcagtcctagttataatcacaaaagtatctgccataagcccagctgattaggctctgcaagtttgatctgatttttctcttttttttttttttttatttttttgagacagagtcttgctctgtcgcccagggtggagtacagtggcgcgatctcggctcgctgcaacatttgcctcctgggttcaagcaattctctgcctcagcctcccgagtagctgggattacaggtgcctgccaccacgcctgcctcatttttttgtatttttagtggagacaggatttcaccatcttgaccagactggtcttgaactcctggcctcatgatccacccgcctctgcctcccaaaacactgggattacaggcgtgagccaccatgcccggcctctgattttttattctcctctgtaatgtccgagtcaactaacatgcacataaaatatgcaaaaaaccccacaactttctggaaggtttctgtaaggattgctccacggagactctggcaccccaaggctgcaggcccctggaggtcccaggagacctggatctctgcccactgccccatgcattgacacagccctcccttcccaccttccccgctgtaatattgcttacccatcttgattccttcaaggatgaagctgccataggctgggcctctgctcctgcttttttctgatgcttcattcatgcaactatcccaactgcccagcacccactttgcatcacgctagctctgggcaccatcaggaagcccactgtctataccctgtgctctgtctcactccacctcatcatcactgcttattttcctcactttctccagcaagccaacttctttccacctttctggtcttgctggattattattattgttgttgttattattttaaacctggaatattcctccctgccctttactttgatcctaaacatctctgtggttctgcagaaaagcttttcctgactacattgcacaaaggagcttctcccattattcacatcacccagtttgcttcgtataaatgtaattatttgaccagcagtttacattttgatcctctctcctctcgtctctttttctccttcatttttttttttaacagagtcttactctattgcccaagctagagtgcactgacatgattgcagctcactgcagccttgacctcgagggctcaagcaatcctcccatctcagcctccaagtagctggaaccacaggcacatgccaccatgcctggctaatttttttatattttgtaggggtgaggtttccccatgttgcccaggctggtctcgaactcctgggctcaaacgatcctcctgcctcagcttcccaaagtgctgggattacaggcttgagccactgtgcctggcccagactcaatttcttttttttttttttttttttgagacggagtttcgctctgtcgcccaggctggagtgcagtggcgcgatctcgactcactgcaagctccgcctcccgggttcacgccattctcctgcctcagcctcccgtgtagctgggactacaggcgcgcaccaccatgcccggctaatttttgtatttttagtagagacggggtttcaccgtgttagccaggatggtctcgatctcctgacctcgtgatccgcccgtctcggcctcccaaagtgctgggattacaggcgtgagccaccgcgcccggctgactcaatttcttttacctgtatttcagcactcgtcctttatcatcctgaagtgaaatgtatagttaatgcaaacaaccaacacacaaatttttaaaaaccatttgggtcaaaatactgacccaatgaataaaaagattaatttattctctggtaatgtgtatttcaatgggttattatgctggcataaccacactagaaaatgtgaggaagcagttccatggatagggccactgcatggacggattagcggtgatgtacacctacaggtgtgcggctattaaagacaatagttaacaatttggtaaagttccaaacaaagtacaatctttcattgattgtcacagtactttcatttctggaaaattcagtatattttacaactatgcgaaaagacttgtactcatatccaaaaaaagatttagattctaggttcagataattttatatttttcgcccacatgaattccagcaggatagtcaaagatcgtgagaggaggtgcacatccatcttataatcacataggattgctgtgtaaaatgcaaacaggtgtattcctagccactgtgtacaagcatcctgtaatgcttctcagtcattgaaacaaccaaaaatccagcagtacctttctggaacactccttttggggacccattagtttagacgataaactccttaagctcctcctgcatggcgggcaggaatcatatttgcctcatctactatacaagcctcaacatccagcacatcattgtcgcagtgcatggcaaatatttaaagaaggaataaacgaatgagtgaatggaaaggaatacgcagaaacaggaaaacacattcatccattcaattgattgattaactggagacagagtctcactctgtcacccaagctagagggcagtggcacgatctcagctcactgcaatgtctgtttcccaggttcaagtgattctcctgcctcaggctcctgaggagctggtaccacagacacgcgctaccacgcctggctatttttttgtgtttttagtagagatgggttttcaccatgttggccaggctgttctcaaactcctggcctcaagtgatccacccacctcagactcccagagtcctgggattacaggtgtgagccaccatgcctggcccatctattcaatgtataaatgtttactgagcaactagtatatgctacctgctgttctagaacctaggaatacagcaatgaatgagggaaattccttttctaatgagcacgctctctctctctctctctctctctctctctctctctctctctctctctctctctcgctctctctctctctctctggaactgctttgtgattgcagtatgacatctggttttcctatacaggtacaaggtggctgtgcttgagacatgccaagttttttttaactcagaatacttaccatataaatagagcaatagagtatgatagacaaagctggctaggaaataaaaagcagtggaaggaattcagtttgatgacaaagaagtgtgaattgcccttaagaaacaaacaatagaataaaatgagagcctgaaaataaataacttggttatttatagatttcttgtgtctgtcaatacagcatcacagaccaaaacatttaaattcaggggttttgttgttgctgctgttcttttcataaatatggccatattagaaaaactttacatggcgtttttctcttatgcaatcttttttatgtagcagtttcctgggaaatgttatgtcagctttaatacaggcctgaatttaactggcaaatagtgacacaaattgtcatgatggaaaagtaacatgttgggggttttaataaccactgaaatactgatagccattttcttttttttttaacttctacgttatttagggacctattttgcagacataaccttaaactaaaatatcccgtgtccattgagaagcctacccccacaaaaataaataaatagatgtgggaatgatatttggagtttgtgagtaatgtttgttttgttttttgtttgtttgtttgttttgacacagggtctccttctgtcacccaggctagagtgcagtggcgccatctcggctcactgcaacctctgcctcccaggttcaagtgattctcccacctcagcctccagagtagctgggactacaggtgtgtgccaccatgcccggctaatttttttttatttttagcagggatgagattttatcatgttggccaggctcgtcttgaattcctgacctaaagtgatccacccaccttggcctcccaaagtgttaggattaccagcatgaaccaccacacccagcctgaagcttataagtaacattctgttttgtttttttttttctttttcatactttaagttctggggtacacgtgcagaacatgcaggtttgttgcataggtatacatatgccatggtggcttgctgcacccatcaacctgtgatctacattaggtatttctcctaatgctgtccctcctctagccccccaccccccagcagtccccagtgtgagatgttcttaaactggcatgtttcttggccacatctcttgaattttaattattgtactttgaattattttgatgttaagattaacttttatgcttatgcttattgctgtcgtgagtggtactaaagagtcctgggttgtaaattgagccacgagtgcaaagaggaaattaaactattctatattcaaattaagccataaacataggaactggactctatactggggagggcgggtaagaacagtacaggagcatagggtgatccagcgtcacacagagcaggtgctcaggaaagacatcaataaactgccgatgaatcaacattgtaagaacaggggaatgaactttgaagtttctttgacatcagttattccaacaacctcagaaataggtgctgcctcctctcctatataaaggaggaaactgaggcacaaagagttcagtttaggtttattttaagagacagagtctcactctgttgcctaggctggagtgcagtagagcaataattacagcttactgcagcctcaaactcctgggctcaagcgatcctcttgcctcagcctcctgagtagctgggactacatgtgtgcaccactatacctggctaattttgttttttgtagggatggaatctcactttgttgcccgggctgatcttaaatcctggcttcaagggatcctcaggcctcagcctcacaaagtgctgggattacaggcatgcaccactgcacccagccttattttgttgttaaggcaatatttatgctgtgtttctaataattcacttatcactcacaagagtcctgtgaggcagacctattgtttttatttcacagagaagaaaactgaggcacagaactttaagtggcagctttgatcacggggctaagatatggtggccacacatagtcatgagtgaggagagcaggctccataacttgtcctcttagacgacttgctggctgtatattcccctgcatctggggtgtcagattatgcacctgctgaatacacagccagcaaggagcagaacaggactgtctgatttcaaaatctatgtcctttcccctatccttagctgcaaaaccagtgatattccctactcactgtgggaagaagcatgaatgccttcctaatcatcaaagccaagaggttttgtccacaattcaaattcctgctgacctttcttttctgttcattgttcatccctccttcatctcattgtggtttttttcctgcctcctacttctctgagcatgacctctcattcttctctgacttttcccccatctactaaatgtgtgtgttcccttaagttttatcttaaactctctttattcttttatctgcttggagcatctgtgtcttagcattctcctctacttcccgggctcatccattacctttatgtagccatcctaaagtagacttttcaaaaattccacctgtaatcccagcaactggggaggctgaggtggaaggatcgcttgagcccaggagtccaagaccagctggcaacttaatgaagccctgtctctacaaaaaattaaaaaaaaaaaaaaaatagctgtgcatgatggtgcatgcttgaagtcccagcaacttgggaggctgaggctggagaatcgcttgaatccaggaggtggaggttgcagtgagccaagatcgcaccactgcactccagcctgggcaacaaagcaagactctatctcaaaaaaaaaaaaaagaaagaaagaaaaaacaattccagtcatataagtccaattgcttatcatacatttctccacggttgttatattactgttatcctgtctaaggtaaaattctttttttttttttttttcgaaacatagtcttgctctattgctccggctggagtgcaagtggcatgatctcagctcactgaaacttccaccttccgggtcaagtgattctcccatctcagcctcctgaatagcggggattacaggtgcatgccatcatgcctggcaaatttttgtatttttagtagagatggggtttcactacctaggccaggctggtcttgaactcctgacctcaagcaatctgcccgcctctacctcccaaagtgctgggattacaggcgtgagccaccacacccagcctaaggtagcattcttaattgctgtttcccaaaaccaacccctgtttctaacttccatattattactgctacacatttttttatattttttatattttgtagggatgaggttttcccatgtcgcccaggctgatctcaagctcctgggctcaagcaatcctcctgcctcagcttcccaatgggtagcagatataagacaatttgtttaacaattaacactcagtttatctagcagtggttcacctaatgattgaagcctctttcgagtgtttttgtatacatgcatacatcctattcttttcagccatattgtttttcttgttaaggacttcttaaacatgcttattaaaacattttcaacttaatttgtatttctaaaaagtcatgatgaattttgtttcagttatagctattaagggttttctaaagatcctctcttcaaaatgttttgttaggagcaatagatatttgtaaaatttatgaaaatttgactagttttttctaattctttacattgtgtgattactgtttcctccttgtttttttcccccaagtgattatattagtattctatttttgtcattttagagaatggacacagaagtcaccataggtgaattgacttaaaatcttttaagtataagaaaaatagcaaaaatgataacctgcgaagtgggtgatcaattttttaagtccataacgtgttaaaagtccataacaaatattgccatagaaaatgcatgtagaggctgggcgccgtggctcacgcctgtaattccagcacttcgggaggtcaggaatttgagaccagcctggccaacatggtgaaaacccgtctctaccaaaaatgtacaaaaatggtggcacatgcctgtagtcccagctacttgggaggctgaggagagagaatcacttgaacccggcaggtggaggttgcagtgagctgagatcgctgacactgcactccagcgtgggcgacagagtgaaactctgtttaaaaaaaaacagaaaaacaaaagaaggaaaaggaaatgcaagtagaatgttagaccaggtcttcattaagtgacttcattaactctgggctaattggctctacctgtgagcaaaagctgattgtctgtgttgaagacagtttatccacctgtctctcctctctgtcatagtcacatgttgcctctcccccatcttctctgctcacacatctcagaagctcctaaccagcttttcttcccatgaacagtaaaataggtttcctaaataaagattttgacatcccagccccttgtgttaaaatctgggatggctcattatttacaagatcaatttcaaaagtattagcctggcgttccaggctctcaacaggatggatggctcaggcttggcttttcagacataacacctatggtttctgtacaagcaccaagcagcacgtctactcacttgaggatgtcttgtacccagtcacccccgctttcttcctggttgaaatcctgtcgccccatggggccttctctgttccccatggaagcttcatcctctgatcctcagtgccatatggtatttgttgtgctggttatttcttgacatgtctgtcttatgctttcaaagagtgtgcactctctgaaggttcagcatgaaactaccagtaccttccattcccttcagtcttctattctagtaagctcaaagctagcagttcaaagctagtatttaatagcatgtttaaaatatgtatatgactagacaatgtggccaaaggaagtgtctgagccagagggtctgaattcaggtctttgtctaacatactcattatagctgtgtgacacttggtatggcacctaacctctctggaaatcagttcttttttttttttctttaaatagtaaggatagttataccaatcaaataggtttggtttaaaaacagatcattttggataagtgcattctatatcataaactgctttaaaaatgttaatactggcaatatttttattaatgctgttgcgaatagtagggtcttgaaggcagtttaattttttttttttttttttagatgatgttttgctcgttgcctaggctggagtacaatggcacaatctaagctcactgaaacctccgcctcccgggttcaagtgattctccagccttgcctcctgagtagttgggattacaggcgcctgctaccacacccagttgattttgtattttcagtggagatggggttttgccactttggccaggctggtcttgaactcctgacctcaggtgatcaggtgatccacccacctcagcctctcaaagtgctgggattacaggcatgagccgcggtgcctgccttctacatgcgttttctatagcaatatttgttatggatttttaactaattttttttttttttctgggagatagagtcttgctctgtcacccaggctggagtgcagtggcaagatctcggctcattgtaacttccgtcttccgggttctagcaattctccagcctcagcctcctgagtagctgggattacaggcacgcaacaccacgcctggctaatttttgtggtttcaatagagatgggttttaccatgttagccaggctggtctcgaactcctgacctcaagtgatccacccaccttggcctcccaaagtgctgagattacaggcatgagccacttcgcccagccaaggcagtttaatttttttcttctggtcttgtcttctctttctttctacatttctcaccctcttctttcatctcctgcctgttctacatctgttacctctgacgtgcatttgttgccaccgtttcttttgtgtgtatcaatttactttcctctccttgctttagatatctttcatcttcattcccaatcttcctctttctgccaaaatgtcattttccatgcgatatttcttccttcattattctttagcttactttcttgttagtatgtataatagggtttaaaagtgatcggagattaaagaattatcataaaatccagaagtccatacaatttctcttgcacttaggatagcatttttttcaagtgctgttttatttgtaggcacagaattttggaatgttagtagtagaaagaggtgtataaattaatctaatccaatctacttgggttaaggatgaaagcagatgtctagagaagttaaggcacttgtcttggacctcagagttaattactgactgagttgatagttaagaccatttcctgagttcaacttactcttgtctcattttttgctaaccactgtattgtgtttcctgcccctgagtttggttaagggcaccatctgggagttagtttgttttcagcatgcaatcaagctgattggctttgaacgagttatttacccctctggccttgacattctcatcagaatatgagaggacaatatagagattctttaaggcctctttttaattttcaacctttcttcatccatatttgacagttatttggtgacggccaattatttacaaataaaagcgatttggactcttacattcagtttgccttcatgttttattccaaatgccacccaagtttgggcttcttttgggcattactgtattttaatctatacaacctcataagcttctccaggatttgtttaaattatttctaattaaaacatgatggctttctgggcagaaatcctgtccttgtactacaaggatgtttggcaaggttattgttattttttaagaggctgaaggaaaattaaatattttgctgaaatattttctctggattataacgttgggacagaatagtgcaacatgcttagtgtatactacctgaatgttgaaaaagagagcctccattattccttatttggagaacagtatagtattaaccattcattgatttcagtgaatactttctcacacaaattattcacaatgtgaaggaaactcagatcaagaaagaaaagaaatgtatagaactatctttgttgaggatgtaagaatctgtcaatttggcctgtggagggtaggaattccaggaagtttctgagccctctcacttctcacaaacactcacattcccttcaaattcatagaaaaccattctacccatttaaataaacaagaaataagtcttgcttatttcattctggttcattagggttcttttcccatctacctggctcactggaatgttggctggttctacctttcaaatgtaggagcctttccacatctaggtctgggtcatgtaaataaacagaaacttgaatgaaattctcgctgagggcggtggctcacgcctgtaatcccagcactttgggaggccgaggcgggcggatcacgaggtcaggaattcgagaccatcctggctaacacggtgaaaccccgtctctactaaaaatacaaaaaattagccgggcgtggtggcgggcacctgtaatcctagctcctcaggaggctgaggcaggagaatggtacgaacccgggaggcggagcttgcagtaagccaagatcgcgccactgcactccagcctgggcgacagagtgagactccgtctcaaaaaaaaaaaaaaaaaaattatcctggcccagcactttctttggtttattttgcttttaataatcaattaatatagtccatcgaagactgattttgggctgggcagagtggctcacgcctgtaatcccagcactttgggaggctgaggtgggtgaatcacttaaggtcaggagttcaagaccagcctggccaacatggtgaaaccccgtctctaaaaatataaaaattagccggaaatcacttgaactcgggaggcagaggttgcagcgagcggacattgtgccaccgcacactccagcctgggcaacaaagcgagactccgtctcaaaaaaaaaaagctgattttggctgtttatggaattttcagtcagtttgccagagcatcatttcctgaagtgcttacaaatagtcattttttgtcttttggtgtctgagagcctattttaagagcattgccaagcgtgggaaactagtatcactatattccagctgtggaaactgtatcactgtcataatgcacttgaacttcctatgaaaggatttcttagcggacatgctgagaatttacttcgaggtgtgtacgaaacatgtactacgatgacgatgagccttctgaagtggtaagaaacatatacccattgacatctgacatttttcatcatttttttaaccatttccaagtttgtttttaaactttccactaaagtgcttgttgtcactaacagtaatataaaacaaatagtattttttttttttcccttagggactagcacaaatgttgaaatactttgggacaaagtttgaaatgaacacattttataattatattattttgttatatgcggaattattttttgtgcttgaacttggattttaaatagttttcaatatcttcacacgtcttctgaaaaggtatttttaaaaggttttataagtgtaactatagacagtttacattcttttttaaaaaacttgatttcctagtgaaattatatctgttaaatatagttaaaagtaattgaattgagaattgtatatgttataaaactttggatgatttgtaaatacttagtaaactgttagtgaaacctcactgtaagaaatgtttctcttaaatgtttaaaaaagtatttaaattaagagtatataactaattaggattctgtattgttctcaagacataaaattatgtaaaaattcacatttatcaatacacatagcaaaacagacagtaaatgtagtcacctgttccttgtatgcaaataaaagatgaagctaaactttaagagttagggatacatttttgaaattgtagaaagctatattaaaccatatacttctttgaaatagtatataattcaattcaaatttaataattatgtttctgcttccttaatatcttattgaattgtgatgtaatttaatttgattttagaaagacttaagaattctaagtttgactgttaagaaacgaacctatgttaaagaatatattttggccgtctggtcatattctactgaaaacgaaattccctttttaggtgcgtttgggggtacagtagaatgagattatttcactttttgtcatatggccaggaggaaagaaatttcttgaaaagcaactgagctctctcctgtaaacacagcaagttgaaatcgcacagctcctaatttggtgtctttatttcaatctttggagtaagattatgaacaatagctataattccattctgagagttaaaagttttcattgtaaatttcaaaatggtcatttctactaatatgggcattatttttccaaagacccacttctgtctcttgtttttcgccctcgggtcactggcaatatggaaaaaaactttcaaaagagtaggatatgactccattccagtgttcccaggaactgaaagtgattgcaaaattataagctttcagaataacacagagaaaacttctacgaaacaagtaatgcagaaatgcatccaatatttaggccttgctctctatttttattgcctgcatcacatgtggctcatacagaattttcaaactatttaagagttgcatttaagcatatgctaccaaaaaggaaaaaagtattttgaggaatggtgttaacattttagggaaagcattcctgaaaatgagttccaggttttgttatttttttaataaaagaatgtaaatgtatacagaaattatttcctagaatgtacttgaaggagtattttaggaatacaaacattcattaattaaccctcatgtgtttaaaatatacacctgttatatatgattatgcacaaaagccagtttttcatgaataatttgtgtcttttttacataatttcagaaaccatatgctctataatgaagaaaaaatatttaaagtatgtaatcatgttaaacagttacagcatgagtcactctatttaaaaaaaaagagagagaaccagtctgcacgtgacaacaagaacttaaaggatctggtgttcatttgaaatgtactggtaatttaacatcactgtaaattcattaacttaggtcattctggttattgagatcaaatttgaaatttttcttttgttaagtattcaaatgtttaaaagccctgtaaaccagatcagagtattaggacataaatttgagtgtgtttattccttaaaatgaggtctacataactgttttaaaaattgcctctggtaattcttctaagtcttacagtaaaatttgccagaggcgtactatttaaattacaattaagctatcaaatttaaaaattactttttcatttcttttagttctgtttttctccccgtgaatcaaatattgtttgtgctactaataattttttgtggatttgtcattatttttgaatatttaaaatatcctgtactttgctgtagtataggtggcagtagtctaaaccttgatctttttaatgcattcacatcaggatttttatttttgtgggaaggtaaaaatcattattttcccctaaggtcagtgatgtggtcttatttttaagaagaaacatgcatcaataagaaacataaaaataggctgcctttgaaaggactactttatttaagaagatatatttccttattgtgtcttgttagagggtggaactgggccattagtggacaaaagggataagagggtcgagcatggggtttcacacctgtaatcccagcactttgggaggcccaggcaggcagatcacctgagatcaggagttcaagaccagcctggccaacatgatgaaaccctgtctctactaaaaatacaaaaattagccaggcgtggtggcacatacctgtagtcccagctactcaggaggctgaggcaggagaatcacttgaacctgggaggcagaggttgcagagagccgagatcatgccattgcactccacccttggcaacagagcaagactctgtctcaaaaaatcaaaataaaaagggacaagatatatctcttttctgttcagaaaataataagtgagcccactgataaatgacctgccaacctcccagttctggaagtcttttgtcctgcttttggcatgcactagtcaacactgtccaatagaagtttctctgataatggcaatgtttatatctgcactgtccaatatggttgccactagccctgcctggttattgagcacttgaaatgtggcaactaaacaattgaatattgagttacatttaaatagccacacttgtggcttctactagactcctttctgtacaaaatgtgctccctgcaccaggagtgccggcattaccgtggagcttgttaggaatgcagtctcagaaaccacatcttttttcatttgtttttttgaggtagagtcttgctctgtcacccaggctagagtacaggggcactatctgggtaggctcactgcagcttccgcctcctggattcaagtggttctcttgcctcagcctccccagtagctggaaccacagacatgcaccaccatgcccggctaattgttttgtatttttagtagagacagggtttcgccatgttggccaggctggtctcgaactcctagacttaagtgatcctcccaccttggcctttcaaagtgctgggattactggcatgagccattgcacctggccagaacccacatcttaacaagaaccccaggtgaattaataaactcattaccatttagaagtcctcatagggctggggagcagccttgtagagctcatgcttacttaaaatttccatcattctttaggcattaaaaaagtaatccaagcttacatatcataatttttaaagtactctttataattaaactttctcccattgttgggcatttaggttgttttacacatacacgcaggcacatatttgtatagatacacacatatgtgtatatatttcaacatctatatctcgatatgtaaatatagataggtacacatgtatatgtcacatggtgaacattctcttacctaaatattttacgtgcatctttttctttcacaaagattccagaaaaagataattactgagtatttacttttaaaagagtaatatgtattcatacactgcttttcagaaaggttatactaaatttagacttccaacagccagcaatgtttgagttccactgtattactattatttaaaaatagttatttgatagacaaaaatattatctcattcttaaacatgtgcatatttctgattactgttaagtttactgtttttattttgttttttttaattatactttaagttttagggtacatgtacacaacgtgcaggtttgttacatatgtatacatgtgccatgttggtgtgctgcacccattaacttgtcatttaacattaggtatatctcctaatgctatccctcccccctttccccgaccccacaacgggccccggtgtgtgatgttccccttcctgtgtccatgtgttctcattgttcaattcccacctatgagtgagaacatgtggtgtttggtttttttgtccttgcgatagtttgctgagaatgatggtttccagcttcatccatgtccctacaaaggacatgaacttttttatggctgcatagtattctatggtgtatatgtgccacattttcttaatccagtctatcattgttggacatttgggttggttccaagtctttgctattgtgaatagtgccacaataaacatacatgtgcatgtgtctttatagcagcatgatttataatcctttgggtatatacccagtaatgggatggctgggtcaaatggtatttctagttctagatccctgaggaatcaccacgctgacttccataatggttgaactagtttacagtcccaccaacagtgtaaaagtgttcctatttctccacatcctctccagcacttgttgtttcctgactttttaatgatcctcattctaactggtgtgagatggtatctcattgtggttttgatttgcatttctctgatggccagtgatgatgagcattttttcatgtgtcttttgcctgcataaatgtcttcttttgagaagtgtctgttcatatccttcgcccacttgttgatggggttgtttgtttttttcttgtaaatttgtttgagttctttgtagattctggatattagacctttgtcagatgagtagattgcaaaaattttctcccattctgtaggttgcctgttcactctgatggtagtttcttttgctgtgcagaaggtctttagttgaactggatcccatttgtcaattttggcttttgttgccattgcttttggtgttttagacatgaagtccttgcccatgcctatgtcctgaatggtattgcctaggttttcttctagggtttttatggttttaggtctaacatgtaagtttttaatccatcttgaattagtttttgtataaggtataaggaaggggtccagtttcatttttacttttattttgagatggagtttcactgttgtcacccaggctagagtgcaacggagtatctcggctcactgcaacctctgcctcccaggttcaagtgattctcctgcttcagcctaccaagtaactgggattacagatgtccgccactatgcctggctaatttttgtatttttagtagagacagggtttcaccatgttgaccaggctggccttgaacttctgacctcaggtcatccacccgccttcgcctcccaaagtgctgggattacagatatgagccactgtgcctagcgctgttttcatatttttaagccatatttccttcttcctcatttatgtgtccttggataagttatttaaactatctgcactttactgtcttcatcttaagttgctttgtaaggtcgctgaagaccaaatgagttagtatatttcacatactgggaacagcaggtgctgaataaattcttagctactattactcttagtccttggtatgacttttgtccactttctcagttgagtagctgagactacaagtgtgagtcaccacacccagcttattttttttattttattttttgtaggaatggagtctcactatgttgcccaggcaggtctgaaactcgtggcctcaagcgattctcccaccatggcctcccacagtgctaggattacaggtgtgagccacagcacccagccccatatttccctaaagactagcagaactcacctcaggctgcactgtcaggaggttgtaaagaagcctctttttgagggttcctattatctgtgttagaggcagaaacttacccctctcctttcattcattcactcagcagggatttattaaacctttatgaaatccaggcactgctttctgctgctctgaactcaatgctgatttgttattgattctactgctatattttggtctcccaaacaaggtaggacagctttccttaagggccttcaacccaccatgatgatagcagctattatttattgaatatttatggtaaggcattatattaagtgatgtacatatattattccaaacaatgtttttatatgcaaaatttacagatgaggaattcgaggcttaatgagtttgaaaaatgtgcccaagatcacatagttcataagaggtagaaccagaattcaagcttgggccagccaactgcaaaatccaagcctcttcattgctttactctgttcctcccatgaagtcaccctcacaatttctcatttgttctctcaagcctttgaggttagcctagatgttccttcagatttttcattagtatttttttgatttatatttagttaatgcataagatgttagaattattaatgcagttgctatgtgatttgctttgggggaagtatttatccagtagatctctactgaagacattggtgcttgtaccggttctctctccaagacaatactgatttccacacttccaaaacaaagttaagatgtaaaaacagagaatacagtgtgggaggaaatcttgaagacttgtgtagaggaatagaagcaaatgtaaacaaaataaataaattagcctccctctttcacactcccatattgcattgtaacactgtactgatttagagaaaaaatattataattaacagcatatcagggatagatagaatggtagaggaagaagaagctatacagtgattaaagacataaagtactgttttgattgaggtggaaaagcctgcagagatgattcacaaagctataaccagagcactggatgagcaagaaaagatttgaacatgaggtgttgcctctgaagtttccagaacagggaaggcttaggagaaagtcagtggatgaagagatgccaagtagaccagagggaaaaatggaatcacaagatcacctttcaaaggccgaagagagagggattgatcctgaattaataagaaagagaggtgtcccctgtgatgagtataaaggggaacaggtgacctgagagctgaaccagaggcaatatcaaattagtcaaggcaaggccgggtacagtggctcatgcctataatcccagcactttgggaggctgaggcaggaggatagcttgagcccagaagtttaagaccagactgggcagtatagtgagaccctgtctttattttttaaaaaatagaaaatttaaaagaaattagtcaaggctaaggtggtgtaatctgaataatcttttgaagtcctttgtcacctagataggctttttgtattctccacagtagttcaacactctgcatgatgtatgtagcatttcatgtcctgtgcaacagcagaatcacaatgtagcactaaatgccactttccttatgcacacccactgtccttaatgtgttacttagcatcagctctatgcatagggtacagcctccttcccagttttcagataaagaaactcagccttagaactgtaatgtaatttgtccagtagcccctagactctcagatttagtatttgtcagactaccccctaaagacagggtactttagtaaaagcaaaagcctgtgtccctaagatttagcctaaggagaaagttctactttctctgtttgttaaaacttgaaaatgcacacggcaacatggcaagaccccatctctacaaaaatttaaaaaattagccaagagtggtggcacacacctgtggtcccagctactcgggaggcaggaagattgcttgagcccaggaggttgaggctacagtgagccatgatcataccactgcactcagcctgagcaacagagcaagaccctgtctcaaaaaataaaaaataattgggaggtgaatgtgtccaagtgtcttcttctcttttattttgtcctatgacttctccctcccaatcctgcaccaatgccatagggaaaaagatacatgtatctttattaagataaagataatctcaatgtgctaatggggatgaagtctgttgttaaattcatcattttctaagtcttctgagaggtagtatttactctttggattgagctttcagacctatgcattgggaaaatgtcaggccatttaaactagaaaaagtagcttttaattgatgaagacctttgtatttattttccctgagtagcctcttgttccttaaaaccgggaaatagaaggcaatatttgtcacaaaaatacttctagcaagcaattgaaaatttaatttttctaggacccttattggggttgtgcaggagcccattctctgagtgacatctctgataatcgtaggcctgagcatgtttattcatacatctgaagcccagagagcaaatgcctgaacaaatggtattgcctgtgtctacagttgaaggatggttcaatgttaccagtttgttgatacgctgaaaaccaccaggaaattgcctccaaatacctttgacatagatttggacaacagaaatatttttacatcagttgaggtaactggatttaatcactggattaaaaaccacctttactaaccactatagagaacagatggaggttgctcaaaaaactaaaaataaagctaccatatgatctagcaatccaatttctggatatatacccaaaagaaagggaattagtatttgggagagatatttgcactcccatgtttattgcagcactattcacagtagccaggatttggcagcatcttaaatgtccatcagcagatgaatggataaagaaaatgtggtacatttacacagtggagtactattcagccataaaaaatcagtttctgtcctttgcagcaatatggatgaaacttgaggtcgttatgttaaatgaaataaactaggcacagaaagacaaatttctcatgttctagcttccacttatttgtgtgaagctaaaaattaaaacaattgaattcatggagatagagagtagaagcatgtaccagagactgggaaaggttgtggtaggggcaggcattgggggacaaggggatggttaatgggtaccaaaaaatagttagaatgaataacacctagtctttggtagcacaacaggatgactatagccaataattgtaagagttaatgaaagaggaaagaaacacaaaatgtggctggacagttaaagagagaattattttagataaaataaacttgagaggggcttctggccaattttggtcaggagcactttctcttacaggcttagagtggttttagggtgaggaggcttatcacaagcttagaatgtttctgtgtgagggagaagttttatggtggggttggactatctctgcctagaggggaggttatcttggggcagacatctttccagctcggaggagggttatcttaaggctggcatcttcccagagggtttatctcagggctagcatgtccccggtcagggaggagtttggaatgtttctgctgggagatgttatttggtttatagtcatgctgaccttagccattaggctgatgccctttggatttaggcagtttttgattacggtgaactttagaatgagcggcttgtccaagatggcgatgttcctgctctgtcaataataatttaattgtaaattttaaaataactaaaagagcataattgaattgtttttaacccaaaggataaatacttgaggtaagggatattccatttaccctgaagtgattattatatattgcatgcctgtatcaacatatctcatgtaccacataaatatatacacctgcaaaaagaaaaccaaaaaccacccgttctaagataccagtttaagtgtaaataattttaattagtgggtatgtgagaaggggaggagatttcttgtactacatagatggcttctaaagttaaactcctccattacgtttatagaaagaagaattggagtaaggaatgacttgataccaatattaccaatatgtgtattgacatcttgtgagctatataatattatgtctggtgtatcctgtaatacagaggttgacaaagtttttctgtcaagggccatgtagtaaatatatttggctttgaggccataagatctgtgttgcaaccactcagttctccataaaagcagccatgaacaattcgtacaagactaagtgtggccatgttccaataaaattgtatttagggacactgaaatttgaatttcatgtaattttcgcaacatgagatgttcttcttcttttgattgatttcaactacttaaaaatgtggacatcattcttagctcaagaaccatacaaagaggcagtggatcaacttaggcccatgagctatagttggctgatctctgatatagtctgtgtggttagagcggggaaggtatttttataccagcaaaaacgttatgctttctccacaagcctggtataaaaattgggaatgcgctacagatgccacttggtagaaagctgttttattaaggtttctgaaaattagacttgccaacacaaacattaaccttcgctccctttattcagatgttacatttaaatttttacccagacctgggaactgagtaaaattataattatgatagacacagggcccttgaactctttcttttggctgttttgaaaggtcgttgtcttcatgttaattaggagccaggaacattctgcttcagctgcttgttgggaaggcattatcattagggaaatgatctaatcaagagtttgcatgggaggtggggtgtgggcctggaggctaggaaacctgagaggttgaattacagggacacgcaactgataattataataaacttctccctagacctgaatgcacagcttggaacctgtcagttttcacattggaattattatactcaaccaatgacagtgtatttggtgatatgtcaacattttcattctgaatgagtgttaattgggtattttagtgcttgaaattatttgttaccaaaaacactgacacagcctgacattctctgctttttataattctgtagcacctataaaatttctttctctagatttaattgctttatacaaaatatgtacgtcaattaatcagagctgtaattattagactccacagttggccgggcatggtggttcatgcctgtaatcttagaactttgggaggctaaggcagggggatcacttgagcccagaagttggagaccagcctgaacaacatagtgagaccctgtttctacaaataattttttgaaattatacaggagtggtggtgtgcgtctgtgatcccagctactcgggaggccgaggtgggaggatcggttcagcccagaaggccaaggctggagtgagctatgatggcaccactgcactccagtctggggaaaccctgtctcaaaaaatagaaaatagactccacggtggcctgacggttaagtatgcctaaatcagccattcacaggtcagggggttctgaaaggggctcttcagaattataaacttcaattttaaaaccaaaaattacctcccttcctctttctgctcccaactccttagaacaaatttgagttgagtgcctgccagcccagggctgttctaggtgctgggggccaacagcacagaccagtgttccaaagccaggaacccgggctttcttccagcagacttttattgtaatgcatccatttgcttactagagagaatttcttctgtgtgtcagttttttattgtaaattttgaggcttactcttgagttctccacctgaaatcaaatttggctttgtcttttcttaaaaattattttattgtggcaaaacatacataatataaaatttgccattttaaccacttctatttatttttatttatttattttttgtttgttttgagacaggggtctcactgtcatccaggctggaatgcagcggtgtgatcttggctcactgcaacctctgcctcccaggttcaagcgattctcgtgcctcaggctccctagtagctaggacaacaggcgttcaccaccatgcccagctaatttttgtattttttggtagagacatggttttaccatgttgaccaggctggtctcgaactcctgaccgcaggcgatccgcctgcctcagtctcccaaagtgctgggattacaggcatgagccactgtgcctggccccattttaatcacttttaagtgtacagttctacagcactaatccatcacattgtcgtacaaccatcaccactacccatttccagaacattttcgtctttcctggctgaaactctgtgcccattaagcactaactctccattctcaccactccccagccccagcacccaccattctacatttctggacaaggggacagggtttcactctgtcacccaagcttggagtgcagtgatgcgatcatagcacactacagcctcaacctcccagtctcaaacgattatcccatctcagcctcccaagtggctgggactataggcatgcaccacctcgcctggctaatttttgtattttctgtggagacggaatttcaccatgttacacaggctggtctcagactcctgggctcaagcaatcctcctgtcttggtctcccaaggtgctgggattacagctatgagccaccacacctggcccactattctaccttctgtttctatgaatttgactacactggggatttcatatacatggaattatacagtaggttcccttttgtgactggcttatctcagtttgcataatgtcttcaagatttatcagaaactttacattcttaaaaagttttttcaatgtaaatttttagttttaattcaatcaggttaaaggtcatatctcaagaatgaacagtgttcctcattccttcttaaaatatttttaaaatgttttttgaaccaccaaatggcattttcattttgttttttcttagcaaaaaaataaaaattaaaaggtcttattggttgaaaacccttgaatattacagtctaactaggagaaccaaagtacattctttgcataggggtcaggaactattttaagaataaattcttctttactttctaaagtaaatgagaaattgctaacttgaaacatgtgtttttcttttttttttttttttttttgagatggagtctcgctctgttgcccaggctggagtgcaatggtgcaatctcggttcactgtaacctccgcctcctaggttcaagcgattctcctgcctcagcctccccagtagctgagactataggcacgtgccaccacgcccagctaatatttttatttttagtagagtcagggtttcaccatgttggccaggctggtctggaactcctgagctcaggtgatctgcccacctcagcctcccaaagtgatggggttataagaatgagccaccacgccccgccaaaacatgtatttttgaggttaggtttagagaaagatgcatcataatattcttaatttttcagcgcattaaagaaaagatgaataggaaaggagataaataacatcccaactgggggatcctacttttaaagaaaatgtgtagacttttcaccatgcgatcctcatacaatcttgatcttatattaattagcatatttcccctatgtgcggaaatctgtaatgcccttcctctgtggtgggctgccttgctttgaaaacaccaccaggagcccctctgaagaatgacagcagcaggtgttctgagagaaagtagtgagatggacagagctgtggatactaactgcagagaccaagtctccagacacagggccagctggggaaattctactgctggctgccattccttggttctgttgtcagtaatcacaggtcacaagcctcgcctctcctgcctactagatggttcattttggccgggtgcggtggctcacgcctataatcccagtgctttgggaggccaaggcctcccaaatgtatgaactctcgtacattactggtatataaattggtaaaaccatttggtaatatacctattaaggctaagcatgtgtatgccctatgatccaggtgtcaaaagacatgtataagaatgtagcagggcaccgtggctcatgcctgtaaccccaaaactttgggaggctgaggcgggtggatccggaggtcaggagtcaagaccagcctggccaatatggtgaaaccccgtctctactaaaaatacaaaaattagctgggcgtgatggcgtgcacctgtagtcccagctactggggtggctgaggcaggagaattgcttgaacctgggaggtggaggttgcagtgagccgagatcaggccactgctctccagcctgggcaacatgagtgagactccgtctcaaaaaaaaaaaaaaaaaaggttcattttaatgtaacttagttgactgtagaatttggaatgtgaagggataggattgtattaatgagtgttgtgttcgtatattacatcatgctgtacccacagaaacaggtcctaagaaatgctattctctaacaatacacattcatgatgtggctcacccagagcaccaaaaccctgctggccatagcaggtagggtccacttatccccggcatcgcctgggacatcatatggacatgttcttttacttggttcttcatgacaagcacaaaagcataacttgagaaggattgaacttacattagaatgagacttttatgtatttttataatatcgtcatcttaagcaaaattaaatgtgttataaatgatatatggtggacctctgatgttcatgtgtgtttttcacctcaccgaagaatgctaaaaattaatcttaaatatagcaaaattacagcaacaataataataaaatatacttgctcagaatggatcttgtgtcctccagcattgtctagaattttccagatttttcaggagggctgtctcgtctcataactctgtgaatgtatatcactccagaactgccttttttctctgcttagacagttgtatctttctttgtattgagtattcttcggtgagttagctcagtgcctctttttttaaaattttttattttcattttaagttcctgggtacatgtgcaggatgtgcaggtttgttatataggtaaatgtgtgccatggtggtttgctgtacctatcaacccatcacctaggtatgaagcccagcatgcattagccatttttcctaatcctctccttctcccttccccacccaccaacaggccccagtgtgcgttgttcccctccctgtgtccgtgtgttctcattgttcggctcccaattataagtgagaacatgcagtgtttggttttctgttcctgtgttagtttgctgaggatcatggcttctagctccatccatgtccctgcaaaggacatgatctcattcctttttatggatgcatagcatttcatgatgtatatgtaccaccttttctttatccagtccatcattgatggacatttgggttgattccatgtctctcctattgtgaatagtactgcaatgtacatacgagtgtgtgtgtctttgtaatagaatgatttatattcctttgggtatatacccagtaatgggattgctgggttaaatggcatttctggttctagatctttaatgaattgccacaagcttggtgtctcttctgtgttttcctagcccacaggatggcacgggtgctgtttcactcatgatggcatttcccactggtaggaaatatgcatgttatattatatgtgacaaaatccatggaacactcaccaaagccacagaagttgtatttttacctgcttaacagccggtgtcatccaaggtttgatgtgacagacacatactttattctgttagctacaaatatttattctggtacaggatgtgtttaaaggcataggcaaaggccacattatacaggtaaggagcatggattttaagtggaatagaaagaaattgaagtcttctagatagaggaatgaaacgatctgctgtatgtctgaagatgaacctggccactggaatatagaggggctagcagaagtgggtataagcagagagactaattacaaaggcaccgtaagagtctacgcagtacaggtgagtgacttgactagggttgtggtagtggagtgggaagagtgaggcttgttatgttcatagaggtgtataacagagcaatatcgtcttcatgtgccaagccctgtgctaggtcttggggattcagcagtgacagaggcaacacaaatccctactttcatgaagctttcatattagcagcgaggggtaaaccataaataaatacataagtatgtagatggtgcaccagaaggttggggagatattaagcagagaagaggaatacagagtagcgaatagagtgccattgtttttttttaaatggaatcttgctctgttgcccaggctagagcacagtggctcaatctcgactcggtacaacctccgcttcccggattcaagcgattctcccgcctcagcctccagagtagctaggattacaggcacacaccaccacgcccggctaatttttgtatttttagtagagatgggatttcactatgttggtcaagctggtctcaaactcctgacttcaggtgatctgcccacctcggcctcccaaagtgctgggattacaggcatgagccaccacgcccagccatagaatgctgtttaaaatgccacagttatttatgtaaaatctgtgatctttcacattgttaggagaaggtaaaaagtgcatccagaagcaaggttatcagggccaaagaggcaccgtgttcccaaggaacctgtagtcactggtagagtcagtactgagactcccgaagatcaataggaccagcatatggtgtcttggccatatcatcacgatctgtggtcatgttttgagggcaacttgaatatttttcatgataaaaatatagtgtacctctttttctgtaattgaaaaacaatttccaagtaatggctgtgtatattacgtgaaaaattaccacagaaatcgagagtggagaaaggtatcccaagtctttcatagaaaatgacctggaaattttccttttaaatgtctctttttaaagtagtatgaatatggttggccaggcgcagtggtttatgcctgtaatggcagcagtttgggaagccaatgggggtagatcgcttgagctcaggacttcgagactaccctgggcaacgtggtgaaaccctgtctctccaaaaaaagaaaaaaacaattagctgggcgtgatggtgcacatttgcaatcccagctacttgggaggctgaggtgggaggatcacttgagcctggaaggtggaggttgcagcgagctgagatattgccattgtactccagcctgggtgacagagtgagaccctgtctcaaaacaacaacaacaaacaaaaaacaaaaaaaacccacaaaaccaaaaataaagtaatatgaacatggtaaaaaaaaaaaaaatcaagcattacaagaggttacccagtgccaggttaagtccctcccatctctggctgctggttcctcagttttcttccccacaagcaaccacggtgaccaggttcttggtgtcactctggcattgtggttctcaaccttggctgaacagtagaatcacatgcagaactttgaaaagaacagttgccggctgggtgcggtagatcacgcctgtaatcccagcactttgggaggccgaggtgggtggatcatctgaggtcaggagttcgagaccagcctggcaaacctggtgaaaccccatctctactaaaaatacaaaaaaaattagctgggcatggtgacggacacatgtaatcccaggtactcgagaggctgaggcaggagaatcatttgaacccgggaggcagaggttgcagtgagccgagattatgccactgcactccagcctgagcaacagagagagactctaagaaggaaaaaaaaaacggttgccttatcccacctccagaggctctaattaaattgcttttgaatatgccatagagatttgtaatacccccccccctcgccccccacaggttttaaaaatgtgcagccacttaaatgttctagagctagcctacatactcataaatgtatgcattctttaaaatgcacttatcaaaaaattagctgggcgtggtggtgtgtgcctctaatcccagctactagggaggctgaggcaggagaatcgcttgaactcaggaggcagagcttgtggtgagccgagatcgtgccaagccgagatcgtgccactgcactccagcctgggtgacaagagtgcaactccatctcaaaaaaaaaaaaaaaaaatttattcaaatgacagcaaaacggtgtatttctaccaatgatagaaaaatactctctgatggttttttctttttctgatgcttttttctttttaacctgtaaaatacatcttggagattatttcacattagcatgtatcgctagagataacttatttttttatatgtccaaatgatatgccatcatatggatgcaacataattttatcagtgccctactgatagttatgttattcaaagtaatctgttatcacaaatagtgccataacaaatattcttatatatatatccttatgtacacatttgtatatatctataaaagtcccagaatcagaattagaattatggatcaaaggtaggttttcagttttgataaattctaccaaattttatccataaggggcaatgtgtgagaggaccacactaacagtgcattcgctttgcttgtaatctttgccaataaaaattaaaactagtgttgtctttgattttgccctgttttaacatcaggactaaacttaggcattttccattagcttaaaaccgtttctttttctgggaatgtctctccttcccctgcttttttggcctatttttctagtgggttgttggtgtttttcttattgattataagatgtattaatatatgaaggcatcaaacttttgtcagcatatgatgacatattctgtatatatcatcagtatatgagcaactttactgttgctcttttatttatgatttttttttttttttttttttgagacggagtctcactctgtcgcccaggctggagtgcagtggcgccatctcggctcactgcaagctccgcctcctgggtttgcaccattctcctgcctcagcctcccaagtagctgggactacaggcgcccgccaccatgccctgctaatttttttgcattttttttagtagagacagggtttcaccgtgttagccaggacggtctcgatctcctgacctcgtgatccacccatctcagcctcccaaagtcctgggattacaggcgtgagccactgcgccctgcctttatttatgatttttaatctgatatagtaaaatgtatagcttttatgttttggagtgtttcaagtatcagttggtaagagagctaggtactggaagctattggagaacagagaatatgtcatctatattcttagatcctcagtgcccagcacatggtagataattgttgacagaatagttggatgtaaatgtgatgatgatgatgaaggatcatgaaagttgatcccaggtattcatccagaagaaattaaggcagtaacagtattatcatcatttaattcccttcataattaaacgctccagcgtataatcacggtgtataatacttctggtataaactgaaagtactgagtttcagaaggcagatctagctgagtcgtctcagagccgtcatcttggtcactaagctcttgctccttagaaactcgaagatcctccaccccttcccattggtctttctgcctcggaatgttgttcccttgcctgtatctatgactgtttcctgccagctgcaaaacacagcctaaatatctatttccctttagaagcttcttctgagtcccatcttcatctccctgccatcttccctcatagtgtcccatggctttcctttatagtagttatcagaactgtcataaaataatgttttgtgttacagcctctgtgatgtgtctccctcactcgactgggaaccccaatcacttcttcttccctcatgtccactgggagtgctctgggattggggaacagaggtaaacaaaaaaagctccctgccctcctttgagtattacattctactgtatatatgtgttgggaaaaggagataataataatactgagttgtgcatcatttccaatgattgtcatttaaatgaagcagaaaagccagtaggtgcatttttggcttggagtatctgagtctggtttgtgtcttaatagtagaaggatctagcacataacatatgcatacactaccaggctgtgagactgtggtcaccctcgtgcaagtcaacagacagctgtcagcatagtcaccgagccatttctttctctctttttttttttttagcgacaggctctcattctgtcactcaggctggggtgcagtggtacaatcaaggcttactgcagccttcacctcccagactcaagtgatcctcccacctcagcctcccaagtagctgggactacaggtgtgtgctaccatgcccagctcgttttaaaattttttgtacagatggggtctcgttatgttgtccacattggtctcaaactgccgagctcaagcaatcctcctgcctcggcctcccaatatgctgggattataggagtgagccactgcacctggcccaagccatttctcatccttaccaaaatgtattcttaccaaactgtcaggccatttttgccctgcttgatggaagttttgctatcattaaagtccattacaccttcaaatgcaaaatagagcagatattttcatgcaacaaaagatgctttttcatttgcaagacaagaaataggatataaactacttttgaccaatggtatatgtccagtattttattaaacgttctgaatatagtctagattttctaatattaatattatatatctgtggcacatttccagctaaataatctaaaatttacagcctttttaaaacacagaggtgaatgaaccagattgtctctagttctgaaatcacctcctgaaggtgggtttgctgcttaagggatacattaactatattaggtccctagggtactttccagtgctttatttctgagtactccacaccactggcatttttccagacaaatccctgatggtgtagcctgtttttttaatattaagtctctctgaaccaaagtcatatctttccagaaggttagacttttagaacagtatattaatattttactaccaaattactgggtcattttggcctgcttaagtacctaacctagtaccaacaaattatttaagcaatcataggagaaaaatccagtatttcaggtagacacttaaataatcatttctatacattatacacagagaaatttacttcataatcataaaattttatgtctaagtacttttcttttaattattttcttgcctgtcataattcccatagcaacctttactttgttctctgtttttcatgtgcataaagaggctttcaggagacctggtccttgcctcccttccccatatgcaaacaactacgaaggtgaatcaattacagaaaatatgtataaatcatctcttttacaacatcaaaaatattttcagggtactttgtgagaaatttcaattgcaataggaagggccttttattcacaaacataggaacattacaggaaaagaatttaactgaactcccaacattttttgagaaaatggaatccaaccttatctcttctgttactgtttttgtttttttgagatgggagtctcactctgtcacccaggctggattgcagtggcatgatcagttcactgtagccttgaactcctgagctcaggcagtcctcctgcctcagcttcccaagtagctaggactgcaggtgtgtgccaccatgcctggctcatttttaaaatgtttttgtagagacagggtctccctatgttgcaaaggcaggtcttgaactcctgggctcatgcagtcctcccacctgggcctcccaaagtgctgggattacaggcatgagtcactgtgccttgcctctgttatttgttttacatacgtgaatgtatgtatatatagaaatgattcagttttgtttttgttgttgttttctggttttattaaatacagtcatcataaacatttgcctgtaatcatctttagtctttgtaactattttcaaggttatctaatagtctactaagcatgtgaaccataattttaaaattttcttaaactagttcctagaagtgaaattaatagcctaggtacatctaaatgcatgtctagttacacatagaaagtaaattgtcttcccaaagggttgcgtgaaagccaaaaactatcaacaaggtgtgaaagtatcaatttaagtgtgtccccctgacattgtgaattgggactttgcaaagagcattggtttaatgatggaaaatggtattgtgtttaatttaatgaggttgaacatcttttccagatgcttatggctaattgattttttcgtgaattttctattaatatcctttatttatatcaattcatttcttactgttttacttatcaattagtgtgccttttatatatgcaaagaaaatgttaaacagtaaaatatttaaggactgaagccatatcccttttcacaagtgtgtagttccctggagaacacagaagttagctgttcattcatgcctgtagattaattgttcattgccacccgggagaactcatcttggaaggaaagagcccagattcatttgtttgattgtttcgctgctcaagaaaaggcctggcacttggatgtaccatcttttgacatggcctttcttttcttgagacggagtctcactccttcgcccaggctggagtgcagtggcatgatcttggctcactgcaacctccacctcccgagttcaagtgattcttctgcctcagcctcccgagtacctgggactacaggcacccgccaccatgcctggctaatttttgtatttttagtagcgatgggggtttcaccatattggccaggctggtctcgaacacctgaccttgtgatctgcccaccttggcctcccaaagtgctgggattacaggcatgagccacggggcccagccaacatggtctttctttggtagtagagagtctattaagatattctagagttttatatttatttgtccagttattcagttgcattcctttatattacccaacattgcttgaagaaatatcttctccctgtattggcttgatttttgaaacattctgaattattataagttatatgtatagtcatattttctgctgtaaatttgaactccatctctataggaatgtcaggggtagtgcataagaagtaaatcaacagtcactcacacaatatgttatatttacaatatattcgcaaccatctgtaagaaaatttgcaagtgcattctttctagtagcttcaatttagtatactcattttacaaatgagagaattagccagagaattatttacatgccttgcctttggctatgcaatgagtcactggtacttttaggattggaactttaagttcctggaatgaagaagcagaattaatgggaaaagaagcttcacaaaaaataagttgtaatcatattttcaaaatataaagtctctcttagattcactggaaaaaggatgctaaacaaatttcaagtacaatgactgtttttggagtggcttgcttgttatgaaacatggttatttaatcaactggcctatagttgacatttgcaccaagttaattaagttggcatttgtggaggtttgtgataaaacactggggatagcttcaagctgaagcctttgttttattctttattcattataaatatttatcatccgttcatcatggaaagtcacatttctgtttgtgttttttaattaagaaagagacactagcacatttaggaatgtttaagaatgtttaggaatgcgaaaatggatcgggagagctttcttgtaaattgggagagctttaaactataggatgtaagagagaagaggttttctctctttcagtccttattcattcattccacaaatgtttgttgagcatgcattccatgcctggcactattccaggcacttgggatataggagtaagtgaaacatttaaaaaaatccatcctcgtgggtgttatatcctaatcaagggagacatatactaaacaatatcgtaagtaaattatatgttagaaggtaaaaacactaataggctgggcgtggtggctcacacctgtaatcccagcactttgggaggccgaggcacatggatctcttgaatccaggagttcgagaccagcctgggcagcatggtgaaactccatctctacagaaaatacgaaaaattagttgggcatggtggtgcgcacctatagtcccagctactcaggaggctgaagtgggtggatcccttgagctcaggagacagaggttgcagtgagccaagattgtgccactgcactccagcctgagtgacagagtaagaccctgtcaaaaaaaaaaaaaaaaaaaagaaggtaaaagcactatttttaaaaaagtagaacagggtaagtgagattggaaataccgctgcaatcaatgggggttacaatttgaaataggatggttgcagaagacctcattgagaaagattttgagcaaagacttagaggaggtgatagagttagaagggtagaaatctaggggaggagagtgtctggtacctctgaggaatatcaaggggcccaacaaggttagagccgaaagaagggagagcgaggtggcagggagagggtgtagagatcagcggaagaggacgttactaacaaaggagacttagaaggaacagccaatgggaaaagagaaagaccaagagggagtggtttcttggaagtcaagttgagaaaatgaagagaggacaggggatgatcagtgatgttaaaggctgctgattgctggagtaagatgagcactgagaatcagccatcgatgtagccttagagacatcattgatgaccttgatgaacagttttagtggagtggtaggaggaataggaggaagtatatttaagagagaacaggaagagaagagttagagggagcagagccaactttttctatgcattattttttctgcaaaggagaggggaaaactggacaagagctggcagagaaaatggagtcaaggaaaggttttcttaggaagagagaaataatcacgtgagtttgctgattcaaatgattcaatagaaaaaccctaagtgtagtgacatccatgcagtttctggagtacctgtaaccagcatgaatttctagaccaaaaattccctacatacaatttattcactccttttctcccatttcattgaattttctgcagctatgtattgagacagttcaactctcccaagccactatttttctgctccctgcctacttgttttcaatttcataactgataagatagtttgtatataaaaaattatattagcatgaaaaaattcttgtcattggctggatgcggtggctcacacctgtaatcccagcactttgggaggccgaggcaggtagatcctctgggttcaggagttcaagaccagcctgaccaacatgatgaaaccccatctctactaaaaatacaaaaattagctgggcatggtggtgggcacctgtaatcccaactactcaggaagctgaggcaggagaatcgcttgaacccgggaagcggagattgcagtgagccgggatcgccccattgtactccagcctggatgactccatgtcaaaaaaaaaaaaatcatgtcatctgtcatcatcagtagatatatattaaaggcctagaaaattttcccaaaacacacatacacatacataatgttctaatttttttaaattacttagcctatgactgaaatccaaaactcaaaataatatcaaaattgcccctctaattttaactttttcaaaatggttcctttggacaatgtcaaattttgcaaatattgagcagaggctcttctataaactgtaaatagccatcataccctcatgttaaggaataatttggtggtaacagcattttgatatgttcgttttttaaaaaaatgaaagtcacatgtctgaacttcttgcctactatttgtactttataataacttcagcttcagtactgaaaaccagcaactgttccttttgcactgaaagaagacacttgaatcctagccactttcaggcaggatgagctgccgaccagtctactgaaggccagcttgccaaagttctattcattttcagcaaagagagaaaaacttaaatagccggtgtcttggcttctattgttttccgattctaatctactttcccttgtagataagtaatgaaaagaatgcttggtgatgctgagatactctgaagtgaggaaaatttcagaggagcagccaagtctttccacaaaacagcattctattaatgaatgtaaaatgagccctcggtgtactttcgttgtgcctttttggaaagataaaatttgaaatttttgtttttccaagtaggagtctcactctgttgccaggctgaagttcagtggcacaatctttggcttactgcaacctctgcctcccaggttcaggcaattcttctgcctcagcctcccgagtagctgagattacaagcgcccaccaccatgcctggctaatttttgtatttttagtacagacagggtttcaccatattggccaggctggtctcttggccaggctggtctcgaattcctgacctggtgatctgcctgcctcggcctcccaaagtgctgggatttcaccgtgagccactgcgcctggcccaaattcgaaaatttatagatgtgtgtgagagagagcaagcgagcgtgcctaaagcttagcaaagacatagctaagcattacaaaactatcacgatgcctttatgatcgttagaaatggctatacctatgaccaacaaacagaaaaaacatatgcttttgattaacaaaaacatcagatgcatgtaggaatttgtcctagcttttctttttatgagcagacacatgcatggcacttgaaatttgactgctaaaggtttactcctaactctgtggatccaatttgttatatactcattttacaaagggaggaattagccagggagttatttatatgacttgcatttggctatgcaatgagtcccctgcttcgtggccttgctcaggtagcttctctatgtctcagttttctcatcagtaaaaatgaagataatcgaaattacattaggtaatacttgtgaatcagcacagtacctgacacagtgtaagcatttatgaaatatttgcaattattatcattaataagatgtattattatgtgcatagcctgatcttaattgattatcctcattatgagtataatataaaacaatcttcaaaacgcactcttttagcctctaagtaattgtgctggactgagaaggaagaaaatacaagaactctgtttatattctccggagacatcatgtttccagtaacgtggagttcactaacaacaacttaaatgtaactccgaattaaggaactcacacaggctgaaggagtttttctgggaggtaatcccatgttgatggagtctcacatgtgtattccaggagtgcctgagtatatatcacatgcagagtgagagaaaaagagaagggagagagagagagagactgaacaagtttaaataaatcttactaaaaattaatgttagcatgttagatacactgacctcttttcaattcctcagacatgcaagcatttcttgtacacaaggcctttgcatatgatgttctttctgcccagacatccctcttctcaatgcgttgcagggctgagttttttctttcatcgtttagatttcagcttagtgtcattgcagactgtcatctcattactctaactaaaataccatccctcccaccatcattttattatctcagctttttttcttgtctctcatagccgttatttttctggtgccttttaaaaaaaaatcagtttccttcactgagatattaagtttcatgacagaaagctttaatcttttttacagccctgttttcagtatttagctcacagttacagcacagagtttcaaagtaataagtactcaataattgcatgtagtttggggagttgttaaataaaatttaatctcttcattagtacatcctatagctatatgtttataaattttcatattgtcttgagaaaattgaaactgacattttggcttttacaggatcataaaagtatcacacagggatgaccctgcagcgatgtattgctatcacctctgttactattttgacactcagctaaatgataggtcaatcacatttgagattttcatcatcgtatgaatttgaataataattacacgacagtttgcaaactaaggtatacaatgtttatgcaactgtcccgcatcttggcacgctatgtcatttttcagtgtttagagtcaggatctctcatcagtacatagttgatgattttattgttattattttgagacagggtctccctctgtcacccaagctggagtacagtgttgtattctctgctcactgcagcctctgcctcctaggttcaagcgattctcctgcctcagcctcccgagtagctgggaccacaggcacctgccaccacgcctggctaatttttgtatttttagtagagatggggtttcaccatgttgccccggctggtcttgaactcctggcctcaagtgatctgcctgcctctgcctcccaaagtgctgggattacaggcatgagccagcatgcagcccatagtttatgattttatttatgaagaaaccagtaaagcagagaatagcaattcagatttcttgcatctacattgcaccagagaacagaaggtaattctaaactgtgaaaagagatgacaacaccatgaaaaatgaaagaattatctcccttcccccacagacaatacaagatagaaccctttccccttggtcctggcccgctgaagtctatcccattttgattgatgattgattgagacggagtctcgctctgttgccaggctggagtgcagtggcacagtctcagctcactgcaacctccacctccagggttcaagcgattctcctgcctcagcctcccgagtagctgggattatatgcatgtgccaccacacctggctaatttttgtatttttagtagagacagggtttcaccatgttggtcaggctggtctcgaactcctgaccacaggtgatccacccacctcggcttcccaaagtgctgggattacagttgtgagctattgtgcctggccccattttgctttattttaaaatatgtgggcctgaccagcaagcaatgagtttgccattgggtcagcatcgtcctatgcatgaggaggtggtctaaaatcttgaggattttgatgagttatagctttgtctagaatcagactggcctttggattcataaaaagttgattttgctcaagaacatggctttaagacttcatataaagatttcctacagaaagagaagaacacaatttgggatccaagatgccgctatgaaataggcttacaactcttatcttttgggctttaaaagagaaaaatacaagaatgctccaaaatactgatgctgaaaatatagatgactgtgaaacagcagagtacagcatcaaaacagcaaagtatataaattttttaaagcattaaagaaaaagggtggccaggtgtagtggctcaagccagtaatcccagcactttgggaggccgaggtgggcagatcacctgaggtcaggagttcaagaccagaccggtcaacatggcaaaaccgtctctactgaaaatacaaaaattagccgggcctggtggcgcatgcctgtaatttcagctactctggaggctgaggcaggagaatcacgtgaacctaggagacagaggttacagtgaggcaagattgagccactgcactctagcctgggcaacagagtgagactatctcaaaaaagaaaaaagaaaaaagaaagggtgacgctttcttgtgtgaacgttagacataaaagtggaaaaacaatgaaaccccgtctctactaaaaatacaaaaattagccgagtgtggtggtgcacatctgtaatcccagctactcaggaggctgaggcaggagaattgcttggagccaggagatggaggttgcagtgagctgagatcatgccattgcactccagcctgggcagcagagcaaaagcgagactccgtctcaaaaaaaaaaaaaaaaaaaaaaagtggaaaaagaaattgaagagtagataaaagcataaattaatccagtgatatgcaattttcctatgagcaatgaacccacaaagtgagagctctaaggataaaaggtgatgatcctgggaggaactattagtacacagtagtacaagttacattttcagaaatgtccaaatagaaatgcaggtattaagatgtagaaaaggaaatctgggtagctgaaatgtgatgcactgacaaggacaaatactgcaaaagaccagctaatcacgttgtaagagccctagagatcaagggtacattttgtaatgaacctattccggagttatggaaacgaccgccagctgttcctgactgaagactacttgaggcacgatgacccagaaagtccatatgtttccaaagataaaagcttaattagatatatcacttctaactgaataaatccacactcccacaagaaaggagattaactgtaaggcatatgtcaggagggtgactttcaaacatgcaacagcttcagatactgaaacatgctactatttaactgtggctgtctttggatgggagactttcaggggatcgttatttgtgtgtctttcaatgctgggtgcatataacttctataacgaaaaatattttgaggctgggtgaggtggctcacacctgtaaacccaacactttgggaggctgaggcaggaggattgcttgagcccaggagtttgagaccagccagcctgggcaacatagtgagacccatctctacaaaaaataatttaaaaattagctaggaatgggagcacatgcttgtattcccagctgcttgggaggctgaagccggaggatcactttcgcccaggaggtcaaggctgcagtaagccatgattgcatcactgcagtctatcaagcctgggtgacagtgagactgtcacacacacacacacacacacacatacacacacacacacacacacacaattgtttttgtgtgaaagtatatactatcagagatacaaggaatgaaggtaatccagctctttctatgcttctatgaactactctaaagatcaattggtagtcacatcctgtattataaaatagtcaagccattgccaaaagtcattgaagagatttttgtttttaactgctatttaaacctggaaacaggtctcaaagtgactatgcaatgtaaaagctccatctgaatattagcaaaggactttttatatcttattttaaaataatgaatgagaccgggaatgcgaccgcgggaatgagaccgcacaaaattatgtgtgggtgttatgcggccctctctttatgtacttcctgtcattgctgggttcttactgatagaagctttgtcttttcattgaggtgtgacttgaacctgtagcggggtgattgggtctaacatggcaagactggtgacagtggggacaggggccccttatggggtataattatgcttcctggtaattttctactgtgctgctactactataagaagccctctaggaagatcaggaatcccctaccaggtgtgtatgtgttgacacactcatttctcccttgtaaatttgcttgaacgaagagtttgcagtgcatttttatcccccatgcattttacagtcacatcataacaataggtgatctattaatttacgtcaagataccacaattgaggtacaactgatcactaactttcattctgaaacccctattctacgtattttctagtatttgggtcttgaagattatattagtgcagagtgccaggtggggagggaggaagggtagaagggaggaggagggaggaagactttttgagatagggtctcactatgttgcccaggctggtctcgaactcatgggctcaagcaatcctcccactttggcctcccagagtcctagggttacggtcgtgagccactgcagccagctgtggttcttaagtattcttaagaacacttttttttttcatttttatttgtacaaaatattctcccaccacactcaaacaaatgcagtttagactacaatgagagcattttgtttatgtcaagaaaacaaagtgtatatttcttaataagtaaacttttaaaatgtaatttcattagtacaggaaattaataactttagtgtctttccttcttcagcctcactcacctcatctacaagcagagttgggactcaattattctgtgaattttaactccaactaataaattaaccaagctttgaaatttccttgtaagtatggttataacaattcacactgctgtttatgccagtggctttatttcaaatggtagtttctcagttggagaagcagttcgaagtcattttgagctcctttaaactcaacgctttataaagcggtgattactttcgtgtcctaattaaatggccacgtcactctcttgcatcttgtttggaaagtcacaagcaataaagaactgtgctatattatgactgatgagcattatttgatttttgctatgcaatattgcatatgatatttactacctgtgaacctccttgtggtataggacacacttagtggagcaggtaatggaaagggattattaaaggaaacgatctcatgctttgtttttgagagaaggtttcatctgaaacagaaacagacacacataccacgagcccgattactatagaaccgaagagacctttccagctgtttacacttcggatgtaaaatggcaatttgacatagactaacagtgtgatgtgagcatctgcgtaaaaaggcgacatatggagcatgcccagtgtgggagtgcgtcctcctccctccgcctcccccctccccctcgagatctccaaagataaggcttgaactttgcacttgcaaatgtcactgcatacgtttttgcactagtttttttttttttttttctgcgattcttttacaactaatttcttttaacaatttgagcgcagggaagagaatgtttagggttatgagatgcattaagtttagaacgagttgatgctcggcttttgaatgcacttgtcttctttatttttaaagcaatataaagcactcgagtgtgtgttttcagcccctcctggaatgggaaaataagaatctccctggatgggagtcctctggggcagggagtgaaagccccggaggcagaaagggacggagaacaggggcttgcccagagcatggataggaaaggagctggggttctccggggctcagcgcgcactgagaacctgtgcccggggctgcagctgcggacgataaaggcgctgtctggctcatgaaggccacctggatcaggcttctgaaaagagccaagggaggaaggctgaagaattctgatatctgtgtaagcgcaagggctttcgtttgtggggagaggttattttgtctctgcttttctgttgttgcagtgagtgcaggtagagagggtggtttgatttggttaatcggatcatgattgcaggagagggaagctagggagattcctctcattttttgagctccttttcctaggttgtgattaattgccagatgagctatcccaggcaggtgttttctgtagacggctttttattaaatctaggtaaaggtattttaaaatgtgttgctggaagatggagtgaagttagctgctagtgtcttacagttttatcagagaaaatagcaggtgtataaaaaggtaaacaaggctttttcagattaaagtgggaatcatgtcatggtagtgacattttggagagttcaagtttataactcagactttctttcatgtttttgttaagcttaatgtcctcctagtttcaaatacctgctttagcatgtagattgttcttgaagctatccttgaaacccatcgttgtccttcagttctgcactgcaccatcaagctgtttaattataaaaccaacttgttctggcttccaggaaggatagttttttggaatataaagcttgggaaggaatggcaactcagtagacacaactattctattgaatgtctgcaaaccagagcatggttttctagataggttgctgcaaaatgaattattttctcctcttttcaggaaagtatagaacaatccgggaagctaactgctgtgtcgatgagacttttccaatgcaaacatcatagactgaatctactttaaaatgtacattttcctctccagggttcggcagactcctacactagccgtccatccgattccgatgtatctctggaggaggaccgggaggcagtgcgcagagaagcggagcggcaggcccaggcacagttggaaaaagcaaaggtaaaatcgtttcctccctgccaagatctttgcaagttgtgctgtgcccctgatagaccacctgtgggagtttcccctaaaggttgtttgatctattagagaatttcattgtctggttttagaaaggtacaaaaaatggagcctagtttcttcccttggtagaaaaaggaagtgtggtatgtaagactggtcttctatgttgttttataatccaagcaactcttttctgtgggtggatggcttatttggacacatacaaaaggatccttgaatttgccaagaggaaaaactgcacctaatatcaacatgttttacttcatttccacagtaaactatatctctgttaagaaaaaaaaaaaaaacagactgacttcaagctattgtttattttcttagacttgaacagtttttcccctgaattttacttcataggtgttttatgttagtatcctgtattttcaaaatggattacattatgcttttccaaaagcaacagaggattttattgatttttaaaagtttcttctcttagaacatgttcttctccattccatcttaataaagtgtgtatatatggaggggagactgcaaagcagctatgaaatagatagttacaggattcatctcaggccatgtctcatttcagtcattgcagtgatttgaattctttctcccatgctgtccttggaatagtggctatttctaaagcatagattgttcgagttgaaggtggcttggtttgtgggatactcagtcacttctcaatgaacctattttaacatggttgttgattttcctttgaaaaacttgttttgaaaaaggctaagtgccttgttgatcatgctagaaataccaggatagcatttctactgcctgcctcatctctgagatgagtaaaatctatgtgtgttgctatgggaattgtggttaggagattctggtttgaatgcatggacagcccttatgtaatacattattcatgacctctagtgcggctgccatcatagtctactgaggaactgccaggagaccttgacttctaaaaagcagtacttttgtatatcagaatgatgttcttacctcgcctggcagggaaattttctccaggactgacagtcttctctgaaaggcagttcataaatagcagatgcagggagggttttgtgatggtggaaactgataaaactggacgtggcccagttgccatcaatgaatctgctctaccaatgttagccacgtagaacattgtgaagttgaaattaaataatgaagaacattaaataatgtatgacagtctgcattgtagttaatataggttgcagctgagagtctgaattctatattctatattttgcattgtgtgtaaagaagagtacaaaaaaactacagtttgtattccgaaaataagattgttctatttgcggctaatttattcatgtaagtttcacataccaaaattgaacagtttctcgggcttatatgccatcatgatacagcccaatagactgtaggtttggttttcaattgttatgtaattggggcatttttgttcatgactctgtggctgtgtcatgagttagatgacattgctgcaaagaacttttaaagtatcttttaaccaagcatggatcgaaatgttgctcctaaatcaaaccagggtcgtgttacttgtcctacagcctaaaaagatgatagttagaaatgatgtagaggataaaagaaaatgaagagactttaaaacaaaggcaaaataattgaaaaactatttcctatgtttaaggcaagatagtttatttaatgggtgagatgggaatggttaatgggtacccaaaaaaaaaaaaaatagaaagaatgaataaaacctatttgatagcacaatagggtgactaaagtcaataataacttaattgtatatttttaaataacttaaagaatgtaattggactgttcgtagctcacaggataaatgcttgaggggatagatgccccattctccagggtatgcttatttcatattgcatgcctgtatcaaaccatcccatgtacctcataaatatacacatctatgtacccataaaattttttaaaaaatagtttatttatattttttctttaaaattaggtcaatattttaaacctttgatgtattcaaatgagacacactagggtaagtgagaatttaaatatgtctcaaaagaagatacaaagatgagcattgaattttcctttatattaaaatcatggtttggtaagtctggtttattaatcccaatatccttgaagaaataatgcaaaatagggattgtagaaggctagttccctctataaatttttattgttatctataaaaataacctcattctttgccagaatttcatcttgccttaatgaaacctacttcaaaatgaaggcttaaagtttaaaaacataacaattcatgctatttaactttaaatagttaaaaacactttgcacagccattttggaagaatcagacattttctacatttacttcgtaaccatcgaagcatctctcaaacagaaagactctacaagtcagtgcttttactcaccttacagatcacatgtaataaataagtctgtgcagatgacgttagcagtgctttcagatcctggtcctgtataaatacaaacacattatccactaattgcctaataatacctctgtgaaataacgtgattagcaagaagtgagactagagatactgtcttttaaaatttaagtgacctacaaaaggttatataacgaagtactctgtgctgtcaataaacctattactctccactaccactttgttaaggcttttcttaaccactaaactgcagtgaacagattagatgttaattttgaggccaataaataccaactgacatgacattgttttttaacgtggtgttttctggttccaaatgtgtgttttgatgttgtacagttatggcatactttgcaaatcctggtcatttcagtttgtgctatctgatattaccttaaagacaagtaatatatgaatgtaatttattcccacgttgatcttctctttgaaaacaactttattgagatataattcacccatttaaagtgtataattcagtggtttttagtatgttcagaggtgtacaaccatcactataatcagttttagagcattctcattgccccataaagaaattccaagcctgttatcagtcactctccattctccccaaccatctccctgtccccatgcgtagaaccactattcaacttttgtttctacaggtttgtctattctgtatattgcatataaatgaaatcttaccataggtgatcttttgtgattggctacttttggacatctgggttgttttcaccatttaggtattgtgcgtaatgctgttacgaacattcctgtatatatttttttgtgtgtgggcgtatgttttcatttcacatatgtatgtactttggagtgaaattgctgggtcacttgatcatctctttttaattgaaataatgattttcttcttttctcctttgatcctcaaaaacgatgccttctgccctatatacagggactctgagttgggaaatctggatgtagaaggagttgaagcagtgataagatagactcagccaggcacaatggctcatgcctgtaatcccagcaatttgggaggccgaggcgggtggatcacctgaggtcaggagtttgagaccagcttgggcaacatggtgaaacgctgtctctactaaaaatataaaaattagctgggtttggtggtgtatgcctgtaatcccagctacttgggaggctgaggcaggagaatcacttgacgctgggagggaaaggttgcagtgagctgagatctcttgctctcacgtgtgcaacagagcaagactctgtcaaaaacaaacaaacaaacaaacaaacaaaaaacgatggactcaatgtgatcttcttagccgaatagaataaccttcaatcttgagtccattgttcttttatcatcgaatatctactatattaaagaaaatgttaggcccagttggtgaataggagagactgcaaggccggagccacaaagaagaaattggcaggtcttttgcctgcaagaagcttccattgtttgttttgggagaaagttgtggtcataaaaggtggaatacaataggttgtggggaagggagggatagagaggtctgtgagcacccaggtttagactgcatcctactggcaggaagagaaaatccttcttggaggaggtagtggcttaaaagtagacctcacagcaggggttcgtattctgttaggaaccaggctacacagcaggaggtgaacagcagcagccagacaggaagcttcatctatatttacagccactccccactgctcacataaccacctgagctccgcctcctgtcagatcaatggcagcattaggttctcataggagtgcaaacccttttgtgagctatgcatgtgagcgatcgaggttgcgcactccttatgagagtctaatgcctgacgatctgtcactgtttgccatcacccctggatgggaccatctagttgtaggaaaacaagctcagggttcctactgattctacatgattgtaagttgtataattgtttcattatatactacaatgtaataataacagaaataaagtgcacaatcaatgtaatgtgcttgaatcatcccaaaaccatccccaaaccccagtccatggaacaattgttttccctggtgccaaaaaggtggaggactgctgccttagaggatggacaggtgaagtttagctcttgaagtacaaagagggaagtaaagaagagagaaatgcctcccaggccctggaatacagtgtatgcgacggtcagtgtacgtaaaggctgtgcagcaagaaaacatagaccctttcagagaaaggttagtttcttgagaaaatgtctttattctaccttcacaaattagctggttatagtattcagaatgaaaaatgtttttctgcagatttgtgaaggtttacttcatggtcttctaaagtccagacctgctgttctgtctttttttttttttttttttttttttttttttgagacagggcctccctctgtcgcccaggctggagtgcagtggtgccacctcagctcagtgcaactccacctcccgggttcaagcgattctcacacctcagccttctgagtagctggcattacaggcacgcaccaccacacccagataatttttgtatttttagtagagacagggtttctccatgttttccaggctggtctcaaattcctgtcctcaagtgatccatctgcctcggtctcccagagtgctaggcttacagatgtggcccaccatgcccggcctgttctgtctttaagtttttgatttttgtttttttaaaatctctaatattttgggaactgatcttcctttggtattttgacattttgacatgacatgccttggtgtgcacctttttgtttattgtacttggcttctcatgcattcattgtgaagggctgatcagttcagttctggaaactgcccctttttttggaataatttcttcccctatattgtcctctttttactggctctctggtttgtgcgatatttgatttgagcctctgtgtaatcatttttctcactttttctccatctttttgttgtacctgaatttttctcaacttctaacccatctgctcaaattatatttgtcaaaatgtctaatttccaagagcattcttcttttcttcatttatagcttcttgtttttattccatagccataatattttctcttatgtctctaaagatactaatttttttgaagttacctgtgctgtcactgtttattaagcttctttaatatttgatgttactttttacataatggagacttttttcaaatgtttgatttctaatgactatatttattatttcatatatttgaagtgaaaataaagtgtaagaagcagcaaaagcatgcaacttcatgaagattatgaagtggaagcacctattgtagagggttaaaactgagttatcctgtaggaagtgcaaggactacctacacaaagatcatcagaggtgaaattattgactgccttttggaatttatacatcaacaaaaagttttcaaatgaacttaaggaaacattcactatccctgactttttttttttttttttttttttttgagatggagtcttgttctgtcacccaggctggagtgcagtggtatgatctcagcccactgcagcctcttcctcccgggttcaggcaattctcctgcctcagcctcccgagtagctgggactacaggtgtgcaccactgcgcccagctgatttttgtatttttaatagagacagagtttcaccatgttggccaggctggtcttgaactcctgacctcaagtgatctgcccaccttggactcttgaagttctgggattacaagcatgagccactgtgcctggccatacccccaacttcttagctagggagtataggtgagaagacatgagaagatgttgaaaatctcttacaaacacataggtttacaaaacacaagcctaaaaccaagatgctcaggcagtgctgaaatttgctcttgggaggaaatcccagtttcatgatgtttgaaaacattctttctcttgctggatcacgtgtcatcagatagagaagggccaaaattgtagtataaaaggttctttagggatgagattatggacgcaaattttttcttcaagggaagagtattttttcttactactagttttcttcaggtttgtttattattatttttttagacaaggtctcactctgttgctgaggctggagttgcagtggcatgattactgcttactgcatcctcgagctcctgggctcaagtgatcctcccacctcagcctccagaatagctgggaccacaggcatgcgccaccatgcctcgctaacattttttaaaattttttttgtaatctcagcactttgggaggccaaggcagatggatcacctgaggtcaggagttcgaggccaggctggccaacatggtgaaacccgtttctactaaaaatacaaaaaaaatagctgggtgtggtgttgtgcatctgtaagcccagctatcccagaggctgaagcaggagaatcacttgaacccggaggcggaggttgcagtgagccgaggtcgtgccattgcactccagcctgggcaacaagagggaaactctgtctccaggaaaaaaaaaaaaaaaagtagagacaaagtctccttatgttgcccagcctggtcttgaactcctgggctcaagtaatcctcctgcctcaacctcccaaactgctgggactacagatatgaaccactgtgccctggagtttattcattcagttttgacctgtcaaacttctctacttccaacaagttcagcttatcacttatcttgactaaaagaaagcctgaaggcttgaagtttcgggaaaggccatccgctgggctgagactctgtctgactctggacaatgtttaatttttgatcatctattcataattaagaggaagacattgtaaagctgattggaagctccaaatgcagtggcaaagcttcttgacaggtcatcttgtatagggtaattggggagggactgaagaactggtaggagtgggcaccattatcttttaatctggccaatgccccagagaggactcccccagtctcctgtcttgctctattggaccgctcacaggcttttggcagttgtccaagaaaaggtggctagagtttcatcacttaggatggagatcttataattatttaatcctcctatgttcagtatgtcactcgcctttactctcagctatccttctgattgtctgaaatctcctggtcatcctctccagagaataaacctttggtcttctggaagtgaggggagagagaaagtggattctgataagtccaatgtccagtcagtgctgttttcagccccagccatacttcatccttcagaggtgcctgttacctccagttccacctccttgccagggccctgcagctgcaatcagctttctactccttagccgtcctgcccgcctcttgcaggtactcttattctaacactttctactctgctagttaattagtgcttgttcattgtgttctatattctatgtttccacatactctcatctggtttcctgttcttagtatttgtgggtttatactttttctaaaaacatattttcaggaggaagcattagttcagttgaccatgttttgttcccagtagttttcagtaaacatactacaaaaaagaaaaaatatttctcatcttgccttagttcataaatgccttacagattgagagaattcccctaactagcctttgaagaagaaagaagaaacatgaacatgtttacgtcccatcagcctgaagatagtttatttcaaaaaaatattaaacatgttttaaaaatatgtcttattgtgaacattatatgggaggtaggagagaaatatacacatatgtctataatgcgtatgttcttaaacctacaagatagactactggagaatccagagaataggtggcaggtgtgaaactagagggctacttatggggaaaaaaaaaatgtgttggctgggcgcggtggctcatgcctgtaatcccagcactttgggaggccaaggcaggtggatcacaaggtcaggagtttgagagcagcctggccagcatggtgaaaccccatctctactaaaaatacaaaaattagctaggcatggttgtgggcacctgtaatcccaactactctggagactgaggcaagagaatcactggaacccaggaggcagaggttgcagtgagctgagatcacgccactgcactccagcctgggcgacagagcaagactccatttaaaaaaaataaaaaagaaagataaaaatccagcagcgataccttatgaaaaacgcaagcacaaaatatgtcacacattcttattaaaatattttaggctgaaattattttcacaatgtacattttcatgcttcttgctttaaaaaattgtcaactctttgcttataagcatgtacctttcaagtatagttagaaaactggctgaatatgtctaatttctagccgcatgcgtttgtttattgttcaaatacgcattagcttagattgcgtttttctacctgtgataaataaaaagagtgcagaagcccgctggacctctgttaggcttctcttccctgttgacatatacttatgactgggtaggtaacaatcacacacattggtactgtcgttcttccactcacctctaatgttaattgatgataatattaataatgacaacagtaatagcacttaatgcccaatcactgctcattatagacaatttgaaagatataaaaggaaaaggcaaaatttgtgtctttgagcattttttttttttttttttttgagatggaacctcgctctgttgcccaggctggagtgtagtgccaccatcttggctcactgcagcctctgcctcctgggttcaagcaattctcctgcctcagcctccggagtagctgggattgcaggcacctgccaccatgtgggctaatttttgtattttaagtagagatggggttttaccatgttggccaggctgttctcgaactcctgacctcaagtgatctgcctgcctcggcctcccaaagtgctggaattacaggcgtgagccactgtgcccagcctctttaagcatgtagaaatatatttgagcagtcatgaccttacaatacatacagcactgatgactacactatcagcaaaatccttactctcgaagttcttgctgcaaaacaaacagatctcagcctagtggcattaagtcaccattttatttaggttacacttctctgccacacatccctggccagctttctggttagttggtgaccaggtgacctgggatggcttgtcacatgtgtctggaggctgatagctgtcagcatgtgtgtctcgttctcttccatatggttgtttatcctccaacaggctggctagggttcgcatgctggtcccagggctgcttcatgagagagcaagctccaagggggtgataatcatatctctacttatgtcatgtttgctaatgtcccattggccaaagcaagtcaccggcctaagcctggagtcaaatgggaattaccaagggtgtggattcaggtgggatatgttgcaaccactttctgcaaacaacctgccacattcatcttttttcttccttacccctttggaagaagaaatatctgcatgccttgtgaaataaacaacgctgtcctcccttctgtcctatttttttcccttctttctactgccaaccttatcaccccaggctttattctcctgcttcaatttcttccctacttactctttaacaccgtgaaactgatttctgtctccatctctttactgagggtctctagtgacttcctaatcacaaagccactgaccttttattaaacctccccttgacatctctgcaaacttcaatttgtttttcttctctgctaagtcacttttgtcttgcaggtgctggtacacacaaagtctacttctactaccactctggtggttcctgttcagtctcttctgtttcgacttttagttccctcacctgaaatgtggaagtccattcaaccaaatgctcaggccttggcctcctgatgtttgttgctttaggcatgtcattggtttccagactgagctctgtagagccccaagagatccatggattcttctggagtcactgcagaggcttagggatgcccagcaggctgtggtctgtgcgttgtacccaggattcagccagaacaatgctaccttcacatgttttattttattgtgttgtatttttattttttattttttgagatggagttttactcttattacccaggctagattgcagtggcacgatcttagctgactgcaacttctgccccccgggttcaagtcgttctcctgcctcagccttccaagtagctgggattacaggcacatgccatcacacccaggtaattttttgtatttttagtagagatggggcttcaccctgttgaccaggctggtctcgaactcctgacctcaggtgatccacccacctcaacctcccaaagtgctgggattacgggcatgagccactgtgcccagccacacatattttatgtattgggacctttatgtgcattttcctttgaatgaagggtttcacctcaggagcgagctttaaaccactgccatcttcccttctattctctcatacttctccaggcttcagccgtcacttatagttagtgtctttggtcttcgcctctctccctagtgcttggatctcaggtcctctttttggatctctgtcggttctgccacccacttaaaattgagctcccagtcttttcctttaaaccctttcttctctgcattttccatttccattctcattacctccatccttccaaatctgaaaccttcgtcgaagggtcaacaaatcttttcctgggaattatcagaagggaaatattgcaggggcaggggtcatgcattctctatgcaactgctcagaaacctggatttggattccatctctgccatggaatggctgcctgactttttgataaattacaggtgaagctaagttttgccatttgtaaaaggacactaacctctgtttgacaggattccagtgataattgaataagctgttacgtataaagcacaaggttcctggacctgtctttccctactctagcccttgtgatgggcacaggcaactggggcacacagcacctgccgtggagcagttcagggtgttgtgaggaatctgaatggaaagtaatgaaacaagtgtctttgcctcctctgtagttatgtgcggtcttacactattttacatggtcactatcagcttagttgtttgtcacttgttggtgactgctgtaaggtagatttgagatgtccagggactgcagagctgcctgggatatgactggcattgacacacttgcttgatctcacagcagttgccatggcaggtcaggttgcatccccacccatcccagtgacgaaggcatgggccttgtctcctgtactctaactttgagatgtgctttctgcctcttagtcacatgggtgcagatctctgcctgagttatcaagagcaattgaactctctcttgctcctctcacaggctcttttctgagtaacaccaagtacttgggaacaaaattacacattgctctctgtttatttatggttatatttatcttggcaatcgacctgttaagctagttttaactttcttatgggtaacagtcacatgttttaaaaggaacctgatggttccagaatccttgttactactaccttttttttttttttttttttttggagacagaatctctgtcacccaggctggagcgcagtggcacaatctcggctcactgcaacctctgactcccgagttcaagcaattctcctgcctcagcctcccaagttgctaggattacaggtgtgcaccaccacagcctgctaatttttgtatttttagcaaaaatggggtttcaccaggttggccaggctgctctcatagacttctggctattttaaaaccataaatagattaaggaaggattattataaattgcagttcaagctttttttttttatcttagagcactataactgaatgtctttgttgtatcattgtaaacacagcaataaatatgcagttcttccctccctttttctccaccagatgttaacagggaacgacatgaagacttttacgcagagcttaaaacagtcaaccctctctgttcttacaagtttttgccccatcaatggctacataaaagatgttgaaaactgtggaaaaaagtagaatgtatttaattagcaaacatttgatgagtggtatcatgctatcgagttggaatttaaggaagggaaattgaagatgtgttagatgtggtggtttcttcctcaagaagctcatggtctaatggtcatgctaaaaatgtgtatcactgagtaatgtggtagctatcagacttaaagcactgtaggcttggcatggtggctcatgcctgtaatctcagcacttcgagaggctgaggtgggagaaaagctttaggccaggagtttgagatcagcttgggcaacacagtgagatctcatctctacaaaaaataagcaaaaatagttaggtatggtggtacatgcctgcagttccagctactcagaaggctgaggcaggaggattgcttgagcctaggagttagaagccacaataagctataactgcaccaatatactccagcctgcatgacacagaaagaccttgtctcttaaaaaaaaaaaaacaaagaaaagaaaaaaaaagcattatgagccaaatggcaaatgggtggaccccaacactgctggagaaggcagtgctgatgaccagagaagggcactttaaattatataagcccccactgttagtgactgaccctctggaggcagagcctacgttaaccagcaatgtgattctctctaaggttagcaagatgattgctaactatggggtccaacaacgcctgccattttagattattttcattttaaatctcaattcgcaatttacttaatggcccaagcattttttcatcctcataaccattcgtaagtgtacaattgtatgaagtatttcacactgttgtgccacagatgcctagaatcttttcatcttgcaaatctgaaactctatatcatctgaacaattccttatcaccctgccctgcctcagccccagacaactaccatgctacaattttttttttatttgctcaaatttatggggtagctaagacattttttacaggtatataatgcataatgatcaagtcaggggactcagagtgtccgtcacccaagtacagcagttttgttgagtatagtcatcctactctgctgtcaaacactgaattgattccttccatcttactgtatgtttgtaccctttaacccacctctcttcctcctccctgcaccccccactcacccttttcagtctgttatttttccactctttatctccatgtgttcaatatttgtccctttgtgactggcttatctcagcatgatatcctcaagattcatctatgttgtcccatgtgacagaatttccttctttttcaaggctgagtaatattccattacatgtatagaccacatttctttatccatttatctgtcaatgggtatttgggctgcttccacctcttggctactgtgaataatgctataaagttttgtttgcttctttgttttttgagacaaagtctcactctgtcacccaggctggagtgcattggcacgatctcagctcactgcaacctccacctcctgggttcaaaggattctcctgcctcagcctcctgagtagctgggactacaggtgtgcgccatcatggccagctaattttttttagtagagacagggttttgccatattggccagagtggtcttgaacccctgacctcaggtgatccaccagccacagcctcccgaagttttctttaaatcttcaactttttttcaatgagcctgtcaaggtggactgtcagcaagcaggaactatagcgtatgtttcacagcggctcagtgtttaacttcccgttgtattgttttgcttggtctttaacaagtactaagtagggaagtggaagcagatatagttaccccattttatggatgagcaaactgatggtggatactgaaggatcttgcccaagctcactgagctcataaggggcagaattagggcaaggacccaggcttctgcctcatttttttttttttaatgttctttcacctcatcaaggagctgcttttagaaagacacaggcttatgaaagcagaaagtgcattaaaaaaaaaaagacaccagctgagaatgcattaatgtttcctctttgtttcatgctctagagagattaaggaaataaaagcttttttttttctctttaactataaaagcaaaaataaagcagggcagctattaagacgattttaaaagtataaacatcttcgtgcaatttttttttgctgttgagtctggatagagtttacaagcaaaaaactcaccttttgtcctgctttttaaagtttagtttattgtcattacaccattgatgtgaaacaagtcaatttttacacttcaacattatttaaacaaaaatcttgagctaaaaattctttttttttttttttttttttttttgagacgaagtttcactgttgttgctcaggctggaatgcagtggcgcgatctcggctcactgcatcctctgcctcccgggttcaagcgattctcctgcctcagcctccctagtagctgggattacgggcacacaccaccacacccggctaatttttgtatttttagtagagacaggtttcaccatgttggccaggctgctctcaaactcctgacctcaagtgatccacctgccttggcctcccgaagtggagataaaaattcttgaatttaatatgttgttagttaaaggaagaccttccaggatgtctgtgtatatccttttcatggttaaatggagatacaaatggaacgtacttaatactatttgaatatgccttttcctgtagagaaatggaaaaataatcaaatatctaggaaatagattgtatgaagaatgctgaagaaacaaaatttaaatagagcaaggaagagaaaattgaagttaaaatgaaacgatttaaaaaaagattttattaagtgttgcctattcgtaaggggaaaaaaacgaaaggaacaaactaaaaattacagcagccaaaaatataaagttagatgtaacaattgactagagaaacatgaagacgagttataaaggaagattaggagactgctgtagtgcaggagtgcagggttgtggttttttgtttgtttgtttatttgtttgtttttgagatggagtttcgctctgtcgccaggctggagtgcagtggcgccctcttggctcactgcaacctctgcctcccatgttcaggcgattctcctgcctcatcctcccgaggagttgggactacaggcgcacgccactatgctcagctaatttttgtatttttagtagcaatggggtttcacgatattagccaggatggtctcgatctcttgacctcgtgatccacccgccttactaaactccatttttaaggaaggaaaatgaatcgcacaatccgctgtcagttgtttattctgatttcctactaaaaattatttcaattgatatttgcaggattaacacatgttaaagcaaactaaatatggcctgagaaggcctccttacttctacatttgagtcctcgtggatgaactgtaatctagcttaataggcagataagattgaaaacctaacttggaagtatgtgcctgtaacagtaactgagtcttggccaatcccagcggccgtacttcaaccactcacagactgctaagtgttcaaactgtgttcaaataagacaaacgccaatatgtagccagtccagctatttctgtacctcactgccgatttctgtatgtcacttcccttttttttggtctataaatgtgttctgaccacagggcatcagggcgtcagttcttgaatatttgacaccagtatcatggtctcatcctgccctccctagactggacaggaagtgaattcaacaggaagtaggcaaaaatgtacagtctaatcttctcgtctttggctttctcgtttcattccctggatttttaaacaaccaactatccctttgtcttcttagaggaactgtaatcatccctgaatgaaatatttattggatcagttgtaagcttacatttgagtcaacctacattccttacagttgagggttaagtttcaagatcctttatgaggcaactcagtgacactcatccccaggcagaattaaaggagatctttggctgtgacaatctaaagctctttggctatgacagaacaaggaaagttaccgtggttgaactagatgggaagaactacttgcttctcctctgagcgtactgtgacttgcttaattctatgagtttaagtagcctgaggattcaataggtcacataatggatatgcaaaatggagtatagaaaccctttaataagtaaaaatctccaggtgctgtattcagcatacttgcatggatccctgacactgtggtgtatgttaggtaagacatagaaaatgcaatagtaactgtattataatgtacacaaccattctcttcaactctttactttaaaatgagagagagagaaggtgacacggagccctagtcacacagctatgattggactaaggttatgaactagtgtccattttaccacatggtccatctactgaattggagtttcaggggtggtagttgagtcaggaccctcttattcaaatgatcaaaagtccaataaaggtgtacctggaaaaggggtcttgtccagaccccaagagcgggttcttgaatgtcacatgggaaagaattcagggaaagtcacagaatatatttaaaacaatttattagcaactgctgtattacagagtagagcatcctcagaaagaaaggggaggaatgtccctatcttaaatggaatgctggcttatatgggttattaaggttaagaatagtgtactttattacaaaagcttgtgatcagctgtgacaggctattagtattgttattttcctatgttaatattgatttcagcaagaatttaggaatgcactactatctctaaagcaaaacttcttattaaactaagaatgttttttctgtttaaaatatcaggacatttctataagttctaggtttttatttagttagttagcatcattaactcgttccctcaactgtaagtatcttatgaccaggcgtgcccaaccccctgggaatgtaacccagccagtttggccttatctggcctttgttcaagatggagtcactctggttaggatgcctgtgaccaaaggacatagccaaaacttgaatgtttcatctcagcctaatacactgatgaatgtatactccagcattaatcttttgttatgaaaccaagatctattctttaagtagaagtctgtgtattagtctgggttctccagataaacagacctaataggagataaacacacatacacacacacacacacagagagagagagagagagagaagtatatggagatttattataagaaattggtgcacatgattatggaagctaagaaatcccatgatctgatctgccaactgtaactggggacccaggaaggctgatggtataattccagctccaagagcagagaaaagatcgatggatgtctcaccacaagcaggcaggcagaaagaaaaatgagtgaattcctccttcttctaccttgtattctattcaagcccccaacagattggatcaagctcatccacattggagaaggcagtcaacttactcagtccaccaattcaaatgctaatttcaccccaaacaccctcacagacatacccagaaatattgtttaaatttgcaccctgtggtgcaatcaagttgaccataaaattagccatcacagtcagctaattgaagttattactctacttatatgaccatcttcagtctagaatttagttaaacattcgagttggaccattatctgtaggaatttgggttccaggaaatacaagaagaactgaaaataattttttaaaaaaatttaaaccatagtcatgtttatgcctgaaaataatactttaaattttttcctaaatattctagaaattaaagtttaccaaacatgaaccatttgttattaatattatacttttgatgaatgacttgataaaatacaaaagaaggaaatgtattttttaggagaggaatttgaataatttttccccaaaaaattcatatgtatgtaaaatatcttcatcttagtaaaggtccattagcccttgttaactctggtccaagaaaatctatcaattcaagttagaaaaacaggtactcaataatcttagcccttgacatttttctttaaatttctctgaaatacatattttttttttttgtttccttggctgaaaaatgttcattgtaatattaccagtgtggttttttttgtttttttgtttttttttttctaagacagaatttcactcttgttgcccaggctggagtacaatggtgcaatcttggccccctgcaacctctgcctcccaatttcaagtgattctctggcctcagcctccggagtagctgggattacaggaatgcaccaccacacccggctaattttttgtattttttagtagagacagagtttctccatgttggtcaggctggtctcaaactcccgacctcaggtgatccacccacctcaacctcccaaagttctgggattacaggcctgagccaccgtgcctggcccagtatggtatttttaaaaggttttttaagtggttatttttttctggctcatgaatatctttgaatatatgatatgaatctgtgagccttctccaaaaaatagcttatatctaaacagcttggcttatatttccagggtctccacaggcctctgaaacaaacctatatatcctaagggtatacaaagtacaagaatctcttgctaataagcccagcctttttccttttagagtggctgatgcttgaagaactatggaacgttggggtgtattcctttgctctcagatacttgaggagatcaccacataaattcttagagttctgggtttagctgtagtgtttagtctagtgtcgaagcagaggttgggcaaatatacactactgtaaatactttcttgtgctatagctgttaagcatgttctagtttaaacagttgtcagtgattagcgattttgatgttccgttttaagattttgtaatggtctagacgaacatgaacaaaaccaaaagaccgtttcaagttcagcagatagtaggagctaatcttttctgtggtttggtttggtcgcctgccttaggttggtttactagtctgtgactttctgagttgctttatcttgtgctaacttctatcagatacaatctccatattgattcctgtttattcttgcctggatgatctattccatttagatagctagaacattcagtagctctcttgagggaatcccacctgtgggttgcagaagggtaacctacggatgcccgattgtcctttttccctggattaaaaagaaaccatttgccatttttctggcttcttagaaaaataaatgatatatgaaatgtttgcagcagcagaactttttcctgcccaaaggtttaagattccatggacacatctcctggtctagcatgctattgctctttctcatcaactttccatctctcctcactcgtcacctcccaccccaaataacttgtttgtgtattcctcttacagcctttttcacagcatattgggttatttgtttctcttgccaaacatgtacaatttggcgtacctgggactgaggaatggcctgttgacacttcaaaaaaaattttttttaagatggagtttcattcttgtcacccaggctgtagtatgagtgcaatggcggatctcagctcactgcaacctccacctcccacgttcaagtgattcccctgcttcagcctcccaagtagctgcgattataggcatgcgacaccacacccagctaattttgtatttttagtagagacggggtttcactatgttggtcaagctggtctcaaactcctgacctcaggtgatccacccatgttggcttcccaaattgctgtgattacaggcgtgagccactgcgcctggccaacacttaaaatttaatttctttgtagaggcataataaatatgtgtggactgaatgaatcacatgatctgagtgataggaagtgtgtgaatggaatcctaaacgtttggaggtcatcatattttgccatctttatcctttatcttacctgttttatggggttatgtcttgtctctacaattacatgtgacctcagtgaggaatcaggattgtcaattatgtctccattcccagtgtagtgagtgatatgtagaatgacttttggttgcattatgacactctttagtgaaaagtaatgattaaatagtttggggtggagataacgtgaagagctctttttagaaactttctgtttggtgcagtaggttaccaaggcatgggccggaggaagatatagtaggaggtggtctctgccaggagaaagaattccccctgtaggaagccaagttcctgactagcagttgccagggctttctgtgtcctgccataagcaacggtcccttcaagcccagttcctgcaaagctgttctgttacataaagatgaaattataaatacactggggtatctttcaagtaaaattaactctatatattaaaattcaccttatatgtattccacaagcaaatgtcctgaattcttggtccatgtgaagtttgattattgcaattttgggaataattagggaagagaatatatagtaacataaaggactcaagcataagacatacaaatgtctaatattcccccctccatgtgcagactattggattattccatttgcttttgtaatatgggaatacagctgaagaataaaatgcaatgacatgacctcatgattactggaaagagttttttctcttatttactgataaatctgctataatttgagatcaatatgtaataacatttttctgcaggtgttgactacaaatatatccctatataataaaaatttattgaaaataggatgtcatcttgtcttctcaattttttttgaaaaattaaataatatataagagtatttattatagtgggataaaaagaaaaaaaactcatgtacccacctccacaattacagatacagagtgtcactaatagctttgaaagctttcatgttatccttccccaggctaccctgattcagagcagagatgccccaaagtggagcttagcccactgagttcttggatttgcccaggaaagaattcaagggcaagccagagggagaggaaaacagctttactgaagaagtgttacagctcctctactgcccctgcagagcaaggctaccctgtaggcagagagtaacagctgaggggagttttgcagtcgtattcatacgcactttcaattgcatgcagattaaggggctattcgtgcagaaatctctaagggagaagtagtaatcattgggtcattgccacggaaaggtgtggtaacgcctgggtgttgccatggcaatggtaaattgacatggcacactggtgggcgtgtctgattgaaagctgctttcccctgggccctgttttaactagtcctcagtctggtcgggtgtccgagacccccacctcctacctcaaccccctctatcagagtttatcattatgctgaatgtggtgtttcccactcccttcctgttcattacattatgtcttaccatctatatttattttctacatgacatactggttagtttttctgtgttcaaaccattatttaagtagaataatcaaggtgttcttttgagactgcttttttggctcaacattaaatgtgtaaaattcattcttgttgatttgtatcaccataatttctttttaccaatatgtggtcttccagtaggggatgtggcacaatcaatctgttctctgtccatgggcatttaaggaattgcagataatcccagtctggaagcatttatccgtgtctcctgatgcatgtgtgcaagagtttctcttgggtatgttaattagcagtggaattgtaggttgataaagtatgtgtatctttacctttactgggcagtttttaaagtgtttgccttcatttacactcatactatcactgtaggagagttttcactccaccattactttcattgaatacttttcatatattaaccttttgttttcttctgtgaaatgacagtgcatggctttggacttctttttaattattaaattgtatttttctataaacgtacaagaggactttctatattttatatgtcattatttttgttggttatttgtattgctgaaagggtttaatttgtagctgctcttgtcacatttatatagcattcttaataccaatcaagtccgatgtatctatcttttctgtcactatttttgcttttgggctcttgtttaagaaattctttcctggccaggtgtggtggctcaatcctgtaaccccattactttgggaggccaaggcaggaggactgcttgagctgaggaatttcaaaccagcccggacaatctaacagtacttcgttactacaaataattgaaatattagctggccaatggtgacagacaccactggtcccagctacttgggaggctgagttgggggggttgcttgagcccaggaggtcaaggctgcagtgagccgacattggaccactgcactccagcctagacaacagagcaagaccatgtctcaaaacaaaacaaaacaaaaagcaaaaaaggaaattctttcctaccttagcctcataaagaattcttctatctttatttctaacagttttaaaatttcatctttcatctgtaattcctcgatctttctggaactggcttttgtataaggagtgagataggaatctgacttcatgtagaatacctgtttgttccagagctattttttgaatggcttcttatctccccttggtctgaaatgcctgctcagtcataaaccaattttccacatatgagtaggtctgtatctgagctgctattcatgtttcaatgccatactacctgaatttctgtagttttaaaataaagattgatagagtttggacatatcaacccatcatatttttcaggattgaactgactattcttggacctttctgttccatataaattttagataccatatatgaagtccaacaaaaaaagaaaaagaaaaaacacaaacataccctgctgacattttgtttggggttgcatttaagtctgtagatcaacttggaggaaaatgcctttgttataatattgagtcatcttacccataaataggaactatctctccattaatttagctgttgaatgtcttagaatattttcgataaaggtcatatattttttagatttgtttctagatatgttaattttttagttactacagtctctctcacctttctctctcaagttacagtttctgttggctaatatggagaaattcagttgattttgtctgaaaagctttgtatttatcagtctttctaaacttattaaatgcttatgaattttctgtagattcttgggttttctatcagacatagataggacagtcatagcatgtgaataacggaaattctatttctggttgagcacagtgtctcacacctgtaattctagcaattttggaggccaaggtaggaggatcacctgaggccaggagttcaagactagcctgggcaacctggcgagaatgtgtctataaaaaaattaaaaataaattaaaaaataaaattctgtttcttccactccagtccttttaacttttcaattatttttcatcttaccgtactggctagactcctcaccgcaacattaggttattcttgtcttagtggtactctttaaaagcatgtatttgatttgggttttctatagaggtactttagcatgttaaggaagttttcttctatttctagtttgctgtttttttcttaaaaattatgaattggtactgaattttatcaaatgtcccttttctacatttttttttttttttttgagactgagttttgtacttgttgcccaggtgggagtgcagtggtgcgatctcggctcacggcaacctccgcctcccgggttcaagcgattctcctgccttagcctccctagtagctgggattacaggcatgcgccaccacgcccggctaattttgtatttttagtagacacagtgtttctccatgctggtcaggctggtctcgaactcccaacctcaggtgatccacctgcgtcccttttctatatctttaaaggtggtcatatgatttttttgttgaatttcttattgcggcaaattttattaatagattttctacatggaactgtttacttggataaacaacattttcatgatgtttttaacatcacctttttttaacatgtcgctggatttgactcttgaagattttgggggagggtgggggacttactgtatgtataatcatgagggaaactggcctctaattttcctttcttatcctttcctcaagcgatttgacactgaagcttactgctgtcttaaagtttttgtttgtttctttgttttgatctctcttcttgggaagagtttgttatgttctgattatgtattccttgagtattttctataactcactgggaaaattcctaaacgtactgtgttttttgtgctttgggaagatttgactattgattcaaattctttaacagaaccctttagggttttcactctcttctcatgccagtttgggcattatagcttcctagttctttttctatctcatctagattttcagaattttaggcatgaatttataatctcattttcttactaatctctgcagtatctacagttacatcttttccttctctcaatttttactcaataaatctcactatatatttttgaataattctattttctatttcattaacttctcttctttttaaatttggttctaatttctttttcatttaagtcagttacttagctcattatttctcaaagtatcttctgttaatcacacaagctttttacatttctttttgagaacctggttttctgtatctcacaaaatttcatatgtagtatttcattattgttcagttctaagtattttctattttcattttgatttttttattgggatggtgagttatctataagtgtgctaattcccaaagatatgcaggtgatcctactgttgtcatttctgtctctgatttcaggtttgtacatttcaaatgggagagagctcttttttttatttttttagtttagtgggacaatatttatctttttaaaatgtagcatttactcgtcttactttggttgtgattacacatgtttgcacttagtttccactacaatcttattttgtcctttttgcatgctgcagtttttcttcatcaccccttatctccctatttctttctttaagaattactttctggccaggcatggtggctcacgcctgtaatcccagcactttgggaggccaaggcgggcagatcacttgaggcctggaggttgagaccagcttggccaacatggtgaaaccccttctctacaaaaatagaaaaattagccagacgtggtggcggacacctgtaatcccagctactctggaggctgaggtatgagaatcgcttgaattcaggaggcagagtttgtagtgagcccagatcacaccactgcacttcagcttgggtgacaaagcgagacactgtcaaaaaaaaaaaaaaaaaaaaaaaggaatgattttatttatttattttaatcaggtttttaccctttattagtttggaagttacacattatagttctgggcttgtttaaatggataccttagaaatttcagcatgcattcttaaaatctaaagttaaccagttaaggactttggagcatttaaggctgataactcctacttgatttatatttttgccaataatttggttttatgttttcttaaccttacacaccaaatatttttaccatttaacttttaaaagtaagtctgtatttgtttacatttattcacttaattactactgccttttctaaccatttctttcacatatcaaagattccttttgatatcactgttgttcttgaagcttgtcattgacaagtttctttcatgagaagatttttgacaatgaagtctctttatgtgtctgaaggaaacttatttatagaagatagttttgttgaaaatgattgtaggtttatactttttcctggaacttgaaagatggtatttgattgacagttggcttctgactgttgaggagtcaactctcattataaccatgtcagctctttgtatgcagtctctcttcctaaatcctttcaagtcttcttctctgtctttggtgtggtgtcatctcactgtgatccatccaggtactggtttatgtttcactttttcctgcttcggattcattgtgcctcctgaatatgaggatttgagaattttgtcaaccctggaaaaccctcaaccattagctcttaaaagttgaaaagtaaatgaagtcatccagcattgttaggtattcttcagtggaatgtttgttcaaaatgtcaagttaggccaggcatggtgactcatacctgtaatcctggcactttgggaggccaaggcgggggtatcacttgtgcccaggagttcaagaccagcttgggcaacatagcaagactccgtctctaccaaaaaaaaaaaaaaaaaccaaattaaccaagaatgatgttgtacacctgtatcccaggtactcaggaagctggggtgggaggatcacttgagcccaggagttcaagaccagcttgggcaacatagcaagactccgtctctaccgaaaaaaaaaaaaaaaaaacaaattaaccaagcatgatgttgtacacctgtatcccaggtactcaggaggctggggtgggaagatcacttgagcccaggagttcaaggctgcaatgagctgtgatcgcgccactgcactctactgtgggtgacacagaaagaccctgtctcaaaaaacaaaacaaaaaaagtcaacttagctccattgccagaattcgcagatacatgaatgaggttttaccccacattattttatctgaattttggtataatcttctatttattttacaattatttacttaagcagaaaatcaagaagatgttaaaaaaaaaaaaagggacatattacctaaaatactagggaagaagaaaccgtgttttttaagtagaataggccaaatgtcaacagacatccagggtactagaaaatattgagacgcgtctaaacacacaaacctgtcttcgaacctctagtcacacagcatgtttgcattctatatttccatgaaacttggagtgaggagggagagaaaatacatttatttttatcctctttagttaaaattgcatatcaggatttctttttttaggagttgcaggttaacttctaaagttatctcccacctgcactacatagggagaccctgtctcttaaaaaaaaaaaattaattaattaactgggtgtggtggtggaggcctatagttccaggtatgtgggaggctgaggtgggaggatccctggagcccaggaggttgaggcagcagtgagccgtgattgcgccactgcactccagcctgggcaacagagtgagaccttgtctcaatcgatcagtcaatcagtagtaaagttatctcattacagttcaatgtctcaacataggactgggtagaaggaagccttctgtcctgtgatctgtgttgctctgatacattcctaaaaagaaactattaagaggggtagatataattctaacatgcaaatgtgttgagggaaaggtgaaaagtacatattacttgattactatttattcacatggaaaccatttttgtatttgcagttagtgtcaactgaagggattaagaagataatctctatcatttatatttgggtctggtcagatgcttttgtaattatatttctatttgatgcctcctttatctgagattttatatatttttttaaatctggagacaggatctcactctgtcacccaggttggagtgcagtggcatgatcatatagtagctcactgtaatctcagcctcctgggttcaagcaatcctctcacctcagtctccagggtagctgagatacaggagtgtactactacatctggctaatttttaaatgtttttgtagcgatggggtctcggtgtgttgcacagcctcgtctcaaactcctgggcaagtgatcctcctgccatggcctcccaaagtgctgggattttaggcgtgaaccaccattcctggcctgtctgagattttataatacttaaaacaaccacacagtgttggctcatttaacttcttcatccattcacatttgcttgtgggtccagaatgaatctgcttttctactgatgcctcaagtaggtcccaacttcttttataaatatgtaaaaatctattgccttttcctgtggttactgcttgtgagagaaaacatactcgatttatacctagaatgaacttcagcaaagttagtgaaaatgtcaacataaacacaggctttacctctgaaagtctatgatatgaaacatcaagagctgatcaggctttttccctttaagagctttacatataaattacaatattttcctccttaaaaaagccaaaatgaggaagttaacggagatgaaattacagtccactcatttgataaaaaagccaagaaacaaaatggataagcatggataagccccaaagatatctttgttgacctcattgaatctcatttctttttcttttttttttgagatggagtctcgctctgttgcctaggctggagtgcagtggcgtgatctcagcttactacaacctctgcctcctgggttcaagcaatttttctgactcagcctcctgagtagctggaactgcaggcgtgtgccgctatacccagataatttttgtatttttagtgcaaatagggtttcaccatattggccaggctggtctcgaactcctgacctcgtgatccgcctgccttagtctcccaaagagctgggattacaggcatgagccaccgcacccggcccaagactattatttatgtttgtaaagaaatatcaattaattttagaaatagagatggtgcttccaagtcttagaggggaggaaaagctctgttttaattatccaaaatgtcaagctattcactaagatttttcccttgacttgtagctagcctcagtttaaacaaataccacatatattctatttgaagtaagatttaaaatgttaaatgtgacaacaaatctgtcacccaaaagcttcttcacagtctttgataatccttccctcctgccccttctgatgtcctgatctgctcataatcttggttgtggtaatggtttcacagataatcacataagttaaaacttaacacaaattgcactctgtggagggatggatgtgtgtgtctctgtgtgtgtgtgtgtgtgtgtgtgtgtgtgtccctgtccctatacctcaatactactgttaaaaacaaaaatataaaaatacattttcaaaaacattccaggctgggtgcagtgacttacacctgtattcccagcactttgggaggccagaggcaagcagattgcttgagctcaggagttccagaccagcctgggcaacatggtaaaaccttgtctctacaaaaaaaatacaaaaactagcccagcatggtggagtgtacctgtagtcccagctacttgggaggctaaggcgggaggatggcttgagccaggaggcagaggttgcaatgagccaagactgtgccattgtactctaccagggtgacagagtcagccctgtctaaaaaaacaaacaaacaaacaaacaaacaaacaaaaaactgtagtaaaaagaaattcattgatgttgtatttcaaagcaataggaaatatagccaaagaaaatattttaacacctttgagataaaagagagatagagatgactggtgtcagctatcttttatgactgcccaaatatcgcttccctttgggcttcctgtttctgtgtttacatttttttttaccttgttagaaagtaactgtttagataacactatttattcattaaaataaatatatgtatatgcgtgtattgatatatatatatatatatatttgaaatcctattaagtacaaggcagtatgccaatgccacatgcagatagatatagcaagatgatcaagatagagtatttcatgcaaggggaccggcatattcccaagagcaggagagagagcaagattggttttagaaatggcaagcagtttaatataactggatcagcgaccacaaaaaaaccagtttctcttttataaagccaggctactttacagcatttctcataattcaattttagtggagaccaggtgatggattaagcatccagttttgccctgcacagaactctgttgattgtattgctgttgttatccaagaccaagcacttaggaaaaatagctgatgtttctgcaactcagaagctttgtatgagttgccttggtttattatagagtgttaaggaggtgtaataatctgtgctggtaatagctggtcttggtaaagaaaagccctttctcatgcaaatactagatgtaatgaaatgatgggtctgtgagtgatatttaaggtttataactatatttttttcttaagctagtcaagtacagtgttgagaaggaggaaagagtggaacaaggagtccaatctgtaacttgtagctacattacaaaaataagaattatgtaaatacttatagggaacagtaaacgtgttatggcaagtttgaaactgtctatcccctaatccttttttctaccatcaaaactattgtcttaaatcagattttgttgttgttgttgttgttgttgttgttgttgttgttgttttaatagcttggaacttcttggaacacaattgtgttagaacatactgtgctacagtattcctatccattccagcaagagcttcggtagagttgtatataaagctttaccagttaattttgagctttctctgaaaagcatatggcatgttttatacagaaaaaccattttaaaacatagaacattgggaattttggccatgaactgaaagaaaatggtttgaagatatgatcttctaattcgttataggagtggggaagaggtttctcatatggtatgattttaaagatctattaaaaacaaatttatattatagagttcatatataaatcatgacctctattcatgatttagtcaggaagacagaaagcacttcaaatatttcagggataaagtgatttaacatagggaattaggaatgtacaaaatctgaaaggactgaaggaataaagtcagagaaacctgccagttctcagtgtagccagtagaatttggggaatcaggaagtttccagaattactaaaaatcattgctgataattgcagctacctaaggcattggttgggtgattttcaggacacaacctggaatagcatttcccaaatgttttagtctcgtgaccactttacattcttaaaaattaatatgatgatgattattatattttttatagagacagggtcttgctaggttgcctaggctggtctcgaacttctgggctcaaacaatccacccaccttggcctcccaaagtgctgaggttataggcatgagtcattgtgcctggccctaaaaaaattattgaacacctcagtgagcttttgcttgtatagcttatgcctaatggtgttttttgcattagaaattaaaacagaaaaaaataaattacaagaataaggaagcaggcactcccctagctatcagagtgataaagtcatcacaggtcgtgtaagtatttgaaaaattccaatctaccatcatgagagaacgagaatattagaaggcaaatgatgtcttagtgccattaagaaaatagttttgaccttgtggaatccctaaaagggtctctagagcttctaggggttcctgagccacactttgagaactgctggcctaatggaactggaaagtctctggtctgctggagcccacgtagatgccttctgctgatggtggcttctcctctgccttctgcatgtcacacaaggataatctggcttctcctctgccttctgcgtgtcacacaagtggctctcattgcaaggagtccaacctggaaccctgttggcagagaatctgaaaatatcatccgtaggaattcatgctctttgttagatgggaaagtataaggcaggcggaggcatagtgccgagctgacaataggcaatccaacatatttcgttaaaaaccgtgaaaatccacctgagttgacaataggtggcatctacatgaacagaaaaatttctgagagtagggtcttcacttttcctgaaactccctactcctttccaatgatcacttctttccctcagtctttgacagtaataagaccatgaaataactaccaaatcaatctttgactgctttcccctgcataccttttttgatatagggtctcattctgtcacccaggctgaagtgcagtggggtgaacatagctcactgcagcctcgacctcccaggctcaagcgatcctccctcctcagcctcccaagtagctgagactacaggcacacactaccatatccagataatttttgtatttttttgtagggatggggtttcgccatgttgcccaggctggtctcaaactcccaggctcaagggatccatccgccttggcctcccaaagtgctgggaatacaagcatgagccactccacctgccccccaaccaacccaaaatttttaataggtttgtttatcctgaaactttgttttatgtgtgcacctatatgtaaaatcactcatcaaaattattgagatctacacagagctcaaccaattctgatcctctttggagggcccagagcatctgtgagcccagaacacagcggttttgcataaatgagcttttgaaagtacgatgactttaagtactctaaaatgcttagatcatttttagagaattgataagtttaacaaaaggagaacttcagaatgaaaattattattccaccttctatgaggaatgttttaaaagataaaagttgttggctattaccttgaaaatctaaagctatgtgcagtaactcacaaatagtgaattaattgatttaaaatttatggtcattaatgatgagtttgccagtaagagtttttcccctctttggtggagaagtttagaaacttctgtttcatttcaactttgaacaaaatcctagaagccatttcaagtatactttgctaacccagaaattttggcaagaaagtataaacttgagccttctcggatagtctgttcatggagaacaaagcagagaatgatagcaaaaacaaaaatctaatcaaccaatcagaacaatgctacttcttttctattaatcattgccacatttctcttccctgtcctccatcaatagatcaaaattagaataggacttgtaggtaaaaattggcccttgagaaggtatgcgtggattacttttatttgacttacatgtggctttatagtcagaagtactgttgcttgcaaagcatatttgtttgtttgtttgttttttaactcaaaagcacctgaaaaaataatcagaggtttttatacctacaaaatgttactgggttcccattccatgtagatgccaaagccaaatgagcttgtacaactgaacaaaaataaatcatgtttattttttccatatgcacttagagaatatgcaaaaataaatgtccagaaataaaaatttgccaaagattgccacatatgcctgaatataagatgaggcttttttcccctcagaattattcttcagaaaagagagagtcaccttatatttgaaatctcacaagatctcccatggtgcaagaagtacattttccattactttattttgaacaacaatgtgctgcttgctggagatacatgggcctgcatgatgtcaatcaatcttattttggtgtgtttatataagtcacctgatacatttgacttaaatgtttaaatagagatttaacatttacttctagagacatgacgtcacacttgtaaatattggatgctatggtaaactcaaacattcaaaacaaatactgtttccaattagttgaaaggaagttcccattagaaaggggttaggtgacccagtatctctcctgatatccacaagacagatgagaagttttcagaggattttttaaaaattaaatatggataaggatgtggagagagggatacttctaagttagtgcagttggccattgaacaatgagaggttatgggcatggaccccctacaaagccaaaatccatgtgtaacttttgactcctaaaaaaaccaaatagcgtatcgttgacccaaagctttaccaatatcataaaaggttggttaacacatattttgtgtgttatatactgcataccgtctccacagaagagagaaaacatgagaagatcacaaaggtccttttgttgccaggctggaaaatggcaggcatcattctccacgcatttcactggccaaaattcaatcacgtgggccaatctaactgcaaggaaggctagaaatttagttgtctgtattctgaggaagaaaatggagttagtaagcatcttggatctctgccacagtatctgactatctttgacagcactgagagtcagccacaaggtatttattctttgttaaatgtgacatcaccttatatttggaatctccttctatttgggcatatatagcagttgcctcaaaacttcgaagtcatagaaaattatttatggctagatcttttaaagagtttttgtaatcgaggcaaattgacatagaacatggaaatgtatctaaaatgattggaaacttattataattagaaatgtattaaaactcaggggaatggccctgagtctgggggtgtcgggatacctggcccagttggatttttttttttttttttttttttttttttttttgagatgaagtctcgctctgtcacccaggctggaatgcagtggcgctatctcggtttactgcaagctccgcctcccgggttcatgccattctcctgcctcagcctcctgagtagctgggactacagccgcccgccagcacacctggcgatttttttttttttttttttgtatttttagtagagacggggtttcaccgcactagccaggatggtctccatctcctgacctcgtggtccgcccgcctcggcctcccaaagggctgggattacaggcgtgagccaccgcgccctgcccccagttggatttttatttccaaccactgctaaagcattcctatgccatttgctctgaaccctggactctcaggaactgggttggccaatcaccgatttaatccatcttgctgtgatggagagaacttatgcccaaaattgttgattggcagtcaaggcccaacagccaatgggcggtagctgcagcctcgcggtccctcaccacctgtgctctgctcgtgtttaccctgcgtgccgccaatagtgattcaagccagttatccatctgttctcccacaccacatcttcccaaaaaggccgtttcttctcctcttggctggaagcctgtgccctctgctcacagttctgttagagcattcggatttatatagaacgaaggtttgctttgctttaaaacatcaattccttgatcccagttctgttctccctgggccttatggagtatacgatcaccttcttcctctttagattttttcttctctgggctaaaaatctcaaagtcctcatgtgacatgtttttatgccctcttacctgatttcctcccatgtgagtgtgctataaatacagctcttccaaagcagaacacatcagattaaatacttgtgatctggcagggcacggaatagaatggcgtaggccagcacgtgaattggtggtaaactgaaggtcatcggggagaaaataacttctctaccctcttcggtgtagtatttaaggccagtgaattaaactaacaaaaggcacatctcacaggatacgagacatgcaattttattaacattttacatgcactggagttcacagaaaaggagtgaaagtcgaagtgggaggattgggggcttatataccattttaaacaaagaaaagggtgtctgcatttcacgagatgctgaattgcaggaaggtgactaggaagaatatgcggaagctaatggaagatgagggttattttagtaaggtgtgtttctgcatctcatctccatgccaactcaccatctccagcagtaagacacaacttttctgttcctggtacagcagaggggaattttacaagggaaaatttgagtcctggttttaggtagatgaggggaaggcagagaatttctcctgcatttgtagattctcagccaccttcagttcaatataatccttatggcaaggtcgcatattttggggatgacctcttctgatccccttcaaggtacaatttgaaaccttctccaagtattctgaattgctttcctctggagacattaatttccccacctcccgctatcacctttgaaatcatgctctaagtaacccttcatattatcacactgtaaattgggatgtttaaagtttggttgtttatgcagttataaatcagcttaattatttgtcattcagcttctaatagcttctctgcaagaataagaaagctcatctgatactcggctgaaatccagattcgctcatccttcctccctccctcccttctgcctactgcatgccagtgatctcccagccaccaggaacagagtaaacaaaacaaagcccctgccgtcagtaggattacagtctagctcggagaaataggccacatgcaaatatatatgtagataatgtgttgtagcagtaagtgctaaaaaatagtctctgttctgctgctataatattttcacctgagtgatttataaacaataggaatttattgatcacagttctggaggcagagaagtctaagatcaaggcaccggtagattcagtgtctggggaaggtttgatctctgcttcacatgtggcctcttgttgctgtgtcttcatgtgggagagggagtggaagggcaaaaaaggatggacaggctccttcaatcccttttataaaggcataatcttattcatgggggccccacactcatgacctaactaccttgttaaagccccacctgctgataactatagccttggagattaagtttcaacatatgaattttgggggaacatgttcagtccatagtaaaaactaagaaggtaaagaggatgaggagttggggagtgataaaaatggcttctgtgggccaagcgcagtggctcacaccagtaatcccagcatttgaagtgtctgaggcgggaggattgccagagctcaggagttggagaccagattgggcaacatagtgtgacccctcatggcaaaaaatcaaaaattaactggcatggtggtccacatctgtggtgccagctactcgggaggatcacttagaggttgcagtgagttgtgatcatgccactgcactccagcctgggtgacagagcaaggccctatcccccaccccccagagaaaagcttctgtgaaggtgacatttgatcaaaattgtgaatggagtgagaatgtgtccatgtggatatttgaggatagattatttcaggcagtggaaaccataaaggcaaagctctgaagcacattctaggaacagcccagatcccagtgtgtctgaatacagagaaaggggaaagagaggcaggtcaaaggtcacacagggacttgcaggccagagatgcaggccatggggaagcctttggactatgttgtgaatgttagaacatctgatggaaggtgctgagcaagagtggcatgatttgatataaacttcaaatcttaaaagccctcataaaagaaaaacactgattgctttgtggggaaaaagccatgggattgggaaccagtgtggaagcgggaaatgggtcaggtggccagtagttgaggggtgttgttgacctcagtccttactccagtttaataaccatccggctgggtgtggtggctcacgcctgtaatcccagcactttgggaggccaaggagggtagatcacccaggtcaggaggtcgagaccatcctggccaacatggtgaaaccccgtctctactaaaaatagaaaaaattagctgggtgtggtggcgcatgcctgtaatcccagctactcaggaggctgaggcaggagaattgcttgaaccagggagtcagaggttacagtgagctgatatcgcgtcactgcactctagtctgccgacagagcaagattccatctcaaaaaaataaataaccatccaaaaactgaactatacggcttccttgatggggtttgtttttcatcaacttttgctggctcctagcaattctgcttttcatctttttctttttgttactacaaaatttccttttttcttttttttgctggctttactgaggtataattgacaaataaaaattgtatatacttatgatacatagtgtgtgtggttttctgggatttttgttgttgctttttaaattttttttaaagacagggtctcactgtcgcccaggctggaatgcaatggcacagtcacagcgccctgcagccttgatctcctgggttcaagccatcctcccacctcagcctcccaagtagctgggactataggcatgcgccaccacacccaaataatttttatatttttaatagagacttggccaggccagtctcgaactcctggactcaagtggttcacctgctttggcctcccaaaatgttgggattacaggcgttagtcaccgcatccagcctcagtgtgatgttttgatatacatgtgtgttgtatacatatacagttaaggtaattaatgtatctgcttttattttctaagtacttgcaagctcctcgcctcataattccttctagaactttccttgattgaaaatctagtcccctgaatgaggtggacataccaagacaggatgagggaggtggaaaggatctgttccttgtagtggacacacctggtttgaatctggctattcttttttttattgagacggagtttcactcttgttgcctaggctggaggacaatggcgcgatctctactcactgcaacctccgcctcctgggtaccagtgatccttgtgagtcagcctcatgggtacctgggattacaggtgcctgcaaccacgcccagccaattttttgtatttttagtagagatgggtttcaccatgtgggccaggctggtcttaaacccctgacctcaggtgatccacccacctcggcctcccaaagcgctggaattataggcgtgagccaccacgcctggccgaatctggttcttctttagctcaggcagagtaatcgtattaccttttttttgttgttgtcataaaataagataatgcttctctaagaaataagtaggctgtgcacagtggctcacgcctgtaatcccagcactttgggaggccaaggagggcagatcacgaggtcaagatatcaagaccatcctggccaacatgatgaaaccccgtctctactaaaaatacaaaaattagctgggcgtggtggcacgtgcctgtaatcccagctactcagaaggctgaggcaggagaattcctggaaccagggcatcggaggttgcagtgagccgagatggcgccattgcactccagcctggtgacagagcgagactccaccttaaaaaaaaaaaagaaagaaagaattatagtggagactattaaagagcttgagtgtatccatgttgttgggtctacatgtaaaaacaatatatatatatatatgtatatatatatatatgtgtatatatatatatgtatatatatatgtgtatatatatatatgtatatatatatgtgtatatatatatatgtatatatatatatatatatataaataaggaacttaactatacataattttctgcagtatgaaggctgaacagatcttaattttttctacacatttttgtttttactttagcatgcatttgactgagtcgtgaagtttttaagggtgtgagatatgcttttttatgttttaatccccaattcagtgcctgaatgctgacgggtgctacacagacagtgaatcagtgggtctgtgcaaacgagggccagtgagaaacaccctagtgtcctaactgaaggaagaggccatttccagtgacagcacactcatcagttcacctggagtaccggaggcacgttttcaggttgactagggaaccaatgaggcttctgacaagcaggggacttgggtgcagggccagcaggagcccaggcctcctttctagcaagctgtgctgttctgccgggcttctcctgctatgggttattgagttctgtttcctgagaggcataaggggaaagtgtagacccaactcctcagattgtcttaaataatttgagtaactaataggcattaagtaatttgagcaaatattgttctccagaggttgagaatcctttattgtccctttcctcccaggaccactcagtataatgttggaagagagccttctgtccttatccaggtgcagggaatgaaccagatgattcaattcctacatacctttttttttttttttttaaacagagtctcactctgtcacccaggctggaatgcagtggcatgatctcagctcactgaaacctccacctcccaggttcaagagattctcctgcctcagcctcccaagtagctggggttacaggtgcctgccgccacacctagctaatttttgtatttttaatagagacgaggtttcgccatgttggccagactagtcttgaatgcctaacctcgagcaatccgcccgccttggcctcccgaagtgctggaattacaggcgtgagccaccacacccagccacgccctttcttagactagaccctgaaaaaggatcccttttcatcactcccactgctcttaaggattctccctgctgtggtctaaatgttcgtgtccccagaattcaaatgttgaaatcctaacgccaaaggtgatggttttaggagggggtgccttagggaggtgatgagctcatgagggtggagccctcatgaatgggattagtgcccttagaaaagaagccccagagagcttcctcatcctttccaccaggagaggatgcagagagaaggtgtcattctttccactgaggacagtcgagtgcaaagagccagaacgatctgggttaacatcccaattctatcacttatttcactgtgtgtccttcagcaagttactgaattgattgtattttctgtttatttaacaaatatttatacaaagagcttaccattgccaagcattattctaagtccttcacagatgataattcatttaatgcttgcaataactgcaaaaaatagaaactctcagtatccaagttttatggcgggagcagtggggagactgtgaagtcacttgtgcaacgtcccacagctaggaaaaaagtaagcaggactgcaacctacgtatttagtactagaggtgtttagtacccgagtgagttcacttaatccgctctgctatgctactctagatttccgtaatttgtaagtaatttgtaaaataacagcttgacaaagattgctgtgagaattcagccaatgctagctagcttccttctccccttccatttcatagagagggtaaagtaacacactggtttgagtattagtgaaagatgatggcatttagaattgtaaattgagggaacaaagtaatcaatgatatcatgagaagcaaaaaagacttttttggacttttgcagttgtactaagtttctatggttttaccatttgttttctggaaagattaaaaaccattttgttgaactggtaattccaagcttttaattttgttttcaccaagtgtttgttgctcatttattacacacattgaatttgccccagtttttccctaccacaagtatctaatacagtgagataggtgttttgcttctgcccatggttttttgggtaatacctgacatgctaacattattctgttattttttcagttcattattaaagttgtttgggggaatttgaacacatctgattcctctcaggaacgagaggggaaattgtctagcagctggcaccctgagaactggtacaaattactatgtccgatagtttatcttgaactacggtgtttataactaccaacagagcatcaatttaacaaaaattgcagtacttagtattaaaagaggcttgcactttaaagaagaatgtggagaattttcttttccattacacacgtactggccatattttggcaacagagtttccagtgtcattggctctgaattgaaaaacatgagtgagtatcctttcctatgtacaggagatttccgaggtacgtaatgtgattgttattcattattcaggttacttctagagctctctaagcaagatgtgcatggggaaataaatatgaacgagagagaccgtctgtgtccttctgatgcttcattctgaagacggaaggccagatgtaacaagcacagtgaatacagtgctctgggatgtcaaaaagagaagggataatttatgaccggggcaccaggaagccctgtagaagtggtgggattgggccaggtgtgatggctcacgcctgtaatcccagcactttgggagaccaaggcaggcagatcacatgacgtcagaagtttgagaccagcctggtcaacatggtgaaaccctgtctctaccaaaaatacaaaaattagctgggcgtggtggcacatgcctgtaattccagctactcaggaggctgaggcaggagaatcgcttgaacccaggaggaggaggtttcagtgagccaagatcacaccattacactccagcctgggtgaccagagtgaagctccatctcataaaaagaagtggtgggattgtagctgagccttggagaataaataagacttggagaagttgtgatgcctgaggaagactttccatgatgaaataaagaaacagccacagccagagctcagatgagaggaaatttaaggaccaggggtccttttggatgaagcatgaagcacagaagaatggagggaaggaaagggatggcagtctgcatgagaaaggacctgaaatggtattttctgtgtgattgactattttctttcattgagtgaaggttttgaaccaggaaatgaaatcatcagagcagaattttaagcaaactaatctggcttgaaactaaattaggctggagtaaatgttcaagagtgtgaaagtgaggtcatctgttgcaatacttgggcagtaagtagcaggggcctgacatgttaaggtgactataagactagaaacaagatctctgcaaggaaaagaatcaatgaggctggacaaataactggagacaagagaggagatgggtgataaagggagtgctttctaatgtgtattggtagatgtttccagtgacactacttagtatcacagatgttactgagactttgctcaagtcaacttgtaattgcatgcactgattttctctgtaagacttctcagagcctataatatgctaacatgcgctgtgacactccaagaagaagatggtgttgtctaatttcccatacttatttgtccacagaaactcttttttaaaaataagctaggcacagtggctcatgcctgtaatcctagcagtttggaaggccgaggcaggaggatcgctggagcccagaagtttgagaccattttgggcaatacagtgagaccctgtctctaaaaaaataaaaaattaggtgtgatggtgtgcacctgtggtcctagctacttgggaagctgaggtaggaggattggatgagcacagaaggttgaggctgcagtgaggctgtgattatgccgttgtactccaccctgggtgacagagcaaggctctgtctcaaaaaaaaaaaataaataaataaaaagttgataggtaaatgtggaaaggatctaggattttctggaacactattttgagacatggtgtactacatttggaggatgatggtgtgatttataaaaactgggaagttgacattagaatatggtttccactaaagataagttgacatcaccttatcttgttgttaaaatgtgttaaatttgaggcaccatagaccgtgtatttggaagcatggagaaagttgcatgttttgtggaagtagagctaagatgagagatttggatagcaagattaatctggggttatcacctaggggtgatcattgaattcataaaggtgaaatagtagggaaaggagaatttgagtggagcgaatgacagaatgttgggaaagatctgtaagagacagaagaactggcaaaggctaagaaacagtggtcagggagaaggagaattcggatcttgcattttcagcaaactagaataggactttgcagagtcagggagtgttcagcaacgtcaaatgctgcagagagaggagtgggggagctttaaagtttggaaaataagacatgatcactggctttggaaagaattgttttattagaacatggtaggtgtggaagcccaatttaagaaatcttggagtgactttgaaaaaaaaaaaggcatgaacagaaagtacatcacatccctggttagagcattgttaatgatataaaataaagatttaatgaaagtttagaggaagaacaagattcagatttctttttaaaaaaatctttacattttgctcaacacagggaaattctttgcctccaaacccgagagctatttttgttttcttttaagggcatgggcaaaatgaacaggattaagtagaagaaaagaagcagaaaagaagggataatggagagggaaagacactttctttttgttttttaatagagatagggtcttgctctgttgcccaggctggagcgtagtggtacagtcacagctcactgtagcctcaaactcttgggcttaagcagtcctcccacttcagcctcccaaagtactgggattataggggtgagccactgtacctggacctactactaaaatccctggaatggtagttcttaaatgttagcttgggccgggcatggtggctcacacctgtaatcccagcactttgggaggccaaggtgggcagatcacctgagaccagcctggccaacatggtgaaacaccatctctactaaaaacacaaaaattagcagggcatgatggtgggtgcctataatattatccagctactcaggagctctgaggcaggagaatcacctgaacctgggaggcggaggttgcggtgagctgagattgtgtcattgcactctagcctaggcgacaagagcaaaactctctctcatttaaaaaaaaaaaaaaaaaaaaaagaaaagaaaagaaagaaaggaaagaaaaaaaagttagactacagaattccctgcaggacttgtttaaatacaggcttcctggcctcagccccagagtctctgttcatcagaaactgggtacagcctaagaaccggcctttctaacaagttcccaggtgatgctgatgcagttgacctggggatgacaatttgacaacctccaccccagagaagggaaaaatgtagaatctaggttgcaggtcaaggtgtgccctgggagagagaaaaggcacatctttgtcaggaagttaccaggaatgaaagaagaaagggtgaataaaaatacataacaatttgaagtgcagttagaagagagatgacagtcactggaattggagaattatgtcctagagtctagaaagttgtcactgtagattgtgaagttgtgacagtgaagatggacaggtagagatgatactgtgagcccagtgctgaaaccatctaggaaggtgtctgtaagtgaacaaatggaccttatgaagataggtcatgtcctatggtctggtaatggtgttggggcagcagagcccctaccaaattccttatgctaaaacgagaacgtgcccaggtgcggtggctcacgcctgtaatcccagcactttggggggctgaggcgggtggatcacgaggtgaggagatcaagaccgtcctggctaacacggtgaaaccccgtctctactaaaaatacaaaaaaattagccgggcgtggtggcgggcgcctgtagtcccagctactcgggaggctgaggcaggagaatggtgtgaacctgggaggcagagcttgcagtgagccgagatcgcgccactgcactccagcctgggcgacagagcgagactccataaaataaaaaataaaaaataaaacacacaacaacaaaaaacagagaactccagttctacctctcctgcaacaagtcgggaggaacttgctgtgatgaagctgaatttctctttaagccaagacagagtcagagggggtttgctaagaaccgtagatacttacatcgtgctctgcaaaaactccctttttctgtcctcacaaggaccctatgggattcctgctattatctccattttacagttaaagaaataaactaacttgctaagttcacaactactgaatgaggaagccaggaacggagtccgagcagtctatgggaacttgacagaatctctctctgactgttggcacgtgggacttcccacttcccttaaccatgttaaaggaacccggagcatatcccaggggctgcactgcatgccatagggttgttcccagagtggcactgtatgattgaggatgcaggccagttacagcagagaaggggcctcagaaaggtcacacaccaggaccagtgttgagaacaagaggtaggatgatgcaggctggctcagggcccatgaagggctggagcccattctcaccagcgtggaagacccggggctggcggcatgaggcagaaagaaagcacttcatcaggctcaatggcaacaaatctcttcagtggaaaagttctgctgtttcctctgtatatcccttgggtctgtatcattctcaaaatgagaagtctgtaaagcccaaaactatccggttaatgtgcagttccaaccagcttaaagaataaacggtaggtaaaatgcctgtgtgttgtatttctctttatgtctgccttttaaaaactgaaagtgcatgtttactaaatcacagggtttgagttgaggaaaacactaccgttgtatgcctacaggcatgcattaagtagggctaaaagcatcctttagcaaaagtagtttcctcttttccttgctaaatatcttgtatgcattgtacctgatcacctaaaagccagtgcttttagtaattattgaagaataagaagggcctgtggtgaataatgtcgaaacagtgtgatgggggagctcacacgtggttgcagttgaaggcagagaagatgtgggccgtaaggaatcccccaggactgggtgttccttctcactgcttcttcagaaaagcattgtcagagtacgggagagggagcaaaatagtgtaaaaatgaccctcgccagctccagctgcttttttttctttttttttttttttttgaggagtctaactctgtcactcaggctggagtatggtggtgccatctcggctcactgcagtcgccgccccctgggttcaagcaattctcccctctcagtctcctgagtagctgggattacaggtgtgcaccaccatgactggctaatttttgttgctgttgttgtcatatttttagtagagacgggtttcaccatgttggccaggctggtctctaactcctgacctcaggtgatccacccgccttggcctcccaaagtgttgggattacaggcatgagccaccacgcccagccccgtttgctttttttatgaaaagaatcactaccaatattttaacatgttacttgggacatatttcagcagctaggataacacataataggggaatcactgggaaattttatcatcttacctatacatgcgataaaaatctattaaagtcagctctatatcttggagcagaccttgggggaaaattagtgcagagctgggatttgaaggatggtgggaattggacacatttgagcatttcctcagtggttcttgcatttctccttatttatcagcctcctgatgtgagaaaagtaactacttaatgaagagatccaaaataaagaagcagccatctgggtagtttaatcttataaatacccagctgcaattttaagaagagatttagaagcatagtggtgtgtctcgggttcctggaccaggtagacccacaagctgtcacctcccacctggcccctgctctgtttcagattttgttcattgcagtcatggatagagagtttctgtcatgaagacacatcacatctgccacatcagtttagcactgttctaaactaggttgcgacagaatttgttcaatgtgaagtttttctgatttggtgtatattaggaaactcaatgtctttagggctgtgtttttccgataaacacatttttcccctgcagaggatgtttgaccattttctttgttactcctctcccagaagagaggaaacttctcacctgcaaggactttttgctccgcagttcccttcacactcacatattctcctgtgtcacagctctggggtatgtcttatgctcacccatcacgtagttcgttatcaccactacagatattgacaagctagtgaaacctgcgttttcattgcatttaactttgaaggcacacatctttgaacagaatgctaggtgctaatgtcatagcttacatctagatagggctctatttatgatgctgttatgttgtcttcataatctattgtggtattcagtttagctcataacagctgtataaattcaggttgccaagggtaaaagaggtgacccaacctcccatctggctgtattccccttgcacactcatatacctgtctcttctcaatgccctaattctatctcctataaaaagtttgcatcttcatgaattattcctatcttagtaaattaataaatggcctttcagaacaagtcataataaaaatacagctgggcatagcgatgcacacctttaatcccaacactttgggagactgagcaggaggattgcttgatgacagatgctcgagaccagcttgggcaacaaagtgagaccctgtctttaccaaatagaaaaaaaattgaatgggcccacgtggtggggcatgactatagtcctagctacttaggaggctgaagcaggaggattgcttaagcccaggaggctgaggctgcagtaagtcatgatggtaccactgcactccagtctgagtggcagagaaacactgtgtctcaaataataataagtagaaccatagcacatttaaaaaaaaattatctagctaatatcacatcaaaagactatcttcaattaatctttgcaaaaataaaggttatcaaggttgaccttttttaatttaatattttaaagtcagggtcttgctctgttagccaggctggagtgcagtagcacaatcatagctcccctgtcacctcaaactcctgtgctcaagccatcctcccaccttggcctcctgaggagccaggactacaggtgcacaccaacacaccgggcaaggttagccttatagacagaagttctctacctaggatgatttctatatttttgttcaccaaaaaaggttctctggcctaccagcagcaccctggctgcttttgctgactctagtcattccttaatgagtatacctggtagattcttactggactataccttagtgcagaaggatattagaatatcccacgcttgatagcagacctggttgaagaggccaacacaaaccagagtcagggataaaaccaagataaaaatctcatctccgctgacatcatagcatccatgcagttgctcaagccgaaagcatcctcgattcctctctgtttctctcccctgctcagatgatctgtactgatccacttttctccatctctgctgctacctcattagtccaagccatgttttgtctccctggaactattaatattagaacagccttttgacctgtctcctcctctctctcttgcttttcctgattttctctccccacgacagctggagggattttcttaacacttaaattggatcctgtctctgtcctacctaaaaacctattgtgactgtctattactcttagacaaatcaaactccttctcatggtttaaaaggcagtgcgtaaactagctcgtgtcagcctgactttccagtgtccttcctgccagtcccacctcattgcctagcaggtactcttgtctccctccatcgcctccacaggcctgctcccttgagctctttctgtccctccatgaggcttggaatctctcccctcctacctactcactgtcatctatgtcccaactcattgtctcctcctcagagacttcttgagcactgccgctcgtatcaccctgtttatttcctccacagaacattaatgaaagagttcatagattgtctcgtacacatacttaccaatttcttgccttattttattttgagacggagtctcgctctgttgcccaggctggagtgcagtggcgcgatctcggctggctgcaacctctgcctcccaggttcaaatgattcttgtgcctcagcctcccaagtagctggggtcacaggcgtgcaccaccatgcctggctaattttttgtatttttagtagagaccaggtttcaccctgttggccagactcctgtttgtcaaacttctgacctcaggtcatttgcctgcctgagcctcacaaggtgctgggattacaggtgtgagccaccatgaccagctgattacttgtctgtttttaaacaagtagcatggaggtgcctggaggcctgcgtttgtgtttcacttgtttctgattgtactcccaggaacaagcccagcgcctttcccacaataggtattgtataaataatgaatgaatgaagacagtctctattctcttgaaatgtaaacaggacagtgaggggtaaaataaaatggacagttatcatgtagagtgatgggtgctttgatgggagaagggttctgtcccttaggaacattcaggggaagtagtaccaaatactcaggaattagagaaagggtccaacagaaaatgatatctacagatttcaaggatccctaataagtacctatattgtgttactgtattaacattaatgtttcatttaaaaccagcgtttttcaacctttgtcattaatcgcccccttaaggggccttttctaggcagtttttttcctaatcaccatccctccctccataaaatttcataccacagacatgtctataccaccgtgtatttttctaggtactgtatgtgtatctctactttatactcaaaatgagtaagattgtttttttaccccctaagaacaaacgtttgcccccttggggatgagattgcccctgttgggaatgcatatattaaagcatttaatatcaatcataggaccaagttttaaagaaaatgcagttggtacgtctgcacagtacttgcactttaaatgtcaatggactgtgtagtatttcaaaagcacacacatgcacaattttctttccaatggaggagacagatgatactggttttttcaaaagtgtgatatcgatggatactgtggctcacgcctgcaatctcagtattttgggaggccaaggcaggagaattgcttgaggccaggagttcaaggcctgcctgggcaacatagaaagactgccccccgctacaaaaaaattaaaaaattagccagacgtgatagcaggcacctgtggtcccagctgctgtggaggccaaggtgggaggatcactggagtgcaggagttcaaggctgcagtgagctatgactgtgccactgcagccttgggtgacagagtgagacccaatctcttaaaaaaaaaaaaaaaagtggtattcgtactcattgacgtgaaaagtcaacaccaaagtcataatgagagttcacataataatatccaccaatatgtgcctctggaaaaagcattaaaaggtgcatcagaggaacttatatttttaggaaaaagtgtgacagacaaatgcacagcagtcattgcacagtttggaaaggaacatgtgggggctggttgactccaagagtgcttggtgataggttgggttggtgacttagtaagaaagtgttgcctaagactttgatttagaaacggcacttaagttattaggtagatgagtgctgatagagttacttggaagaactgaggtaggagagctgtgtttgaagattcctggagataagaaaacattttcagagaaagagtgagtaatctggtttacattctgctattgctgttgttggaggttaattctgttgggaacacctgtgttcacacaggtaaataccaactggctcttccttaggggataaatagtgtataaagttggtgtagaaaatgctggtgaaggagtttttagtaatggaacttagcccaagggcaaattgtatatcactcaacacttttcacttgcttatctttcaggaattttaagaaggttaaggcactaaggttccttaagtgttttaactctgcaggccccatctgtgttccagctgctgttctgcaactgcaaatggattctgctttagtatgataataagaaggtcataacccagcaaaagtggtgggcttctaactctatccttttagcagaatttcttttcattagctgagtagaattgagcttcactggttggcagtgaaatgaggcatggcctagcttgatggtccatgaaggatgctcactgagggtgacattttgttccattaaagctgatgtttctatttataccaaggatagtttgtgcagttacaccggaaataagatatttcctgcgtttacagacatctacatgcttgcctttttttccatttcccactgaaccagtctcgttgttgtcaattattcttcttcctctatttaatggaatctttactttcttgacagatgaatgtacatgaccactttcataatgcctctcccttaagaaacttcctactgatcttggccaggcacggtggctcacacctgtgatcccagcactttgggaggctgaggcgggcttatcatttcaggccaggagttcgagaacggcctgaccaaaaccccgcctctactgaaaataggaaaattagccaggtgtggtggtacacacctgtaatcccagctacttgggaggctgaggcaggaggatcacttgaacctgggaggcgaagggtgcagtgagccaagatcacacccactacactccagcctggatgacagagcaagactccatctcaagaaaataaaataaacaaccagttctcatgagaatcctatcacgagaacagcgccaagatatagtgctaaaccattcataggccacccttatgagccaatcacctcccaccaggccccacctccaacactgaggattacaatttgacatgagatttgggtggggtcacagatccaaactgtatcactttccattcctccaggcctagcaaccactattctactttctgcgtctatgatgttgaccattctaactacctggtatgagtggaatcatatatttgtccttttgtgactggctaattttacttaggataatgtcctcagagttcacccatgttatagcatttatcagaatttctttcctttttaaggcagaataatattccaccgtatgcatataccacaattgggtttatttgattcatctattggtggacattcgggttgcttccaccttttggctactgtaaataatgcagccttcctcctgttccctttctccccttaagggcccttcagacctctgccttctaccactgggcatagtctacacacagatcatgacttttggctactgtcagtaatgatgctatgagcatgggtgcacaaatacacctccaagaactttgggtgtgggtgtatgtttagacagagtttcactctgtgtccaagctgcagtgcagtgtgcagtcatggttcactgcaggctcaacctcctggggctgcgtgatcctcctgcctcagcttcctgggtaaccaggactacagacatgcgccaccacaaccaactaatttttcattttctatagagacgggacctctgtatgttgcctaggctgattttgaactactgggctcacagtatcctcctgccttagcctcccaaagtgctggaattacaggcatgagccaccacacttggccctccaagaacttttgaaataaactctattaattatattcagaaaacttaatgctatcaccttagactgtatagcataaattaagttcctcccacatagcaatgcctccttttaagatgctgctgggtaatagtccttagtttaaatatgtcccagctctccttagcacagcagcagtcttttacattaactttttagagtaaaagaaaaattaggagagggccggtcgcggtggctcatgcctgtaatccaagcactttgggaggctgaggtgggcggatcacctgaggtcaggagttcaagaccagcctgaccaacatggagaaaccccgtctctactgaaaatacaaaattagttgggcatggtggcacatgcctgaaatcccagctacgtgggaggctgaggcaggagaatcacttgaacccgggaggcggaggttgtggtgagccaagattgcaccattgtactccagcctgggtgacaagagcaaaactccatctcaaaaaaggaaaaaaaaaaggagaaaatgtttggagaagtactaaatataaaaatcaacttatttttagtagaatgtatttgttctcaacacagctaattgttttagataattaccagccttggactacagacacatttcactaagccagaaaattatttttgaaatattttgatgatgcagagaaatcatttaaccaattctgctatctcattgtcttttatgaaacactccctttaaaaatatacaagtattttagactatgcaaacatttacgcttgtttgaaactaagtaataaaatctattaaggttttctgttgcaaatgaattcatatcttcctgtggagtcataatttaagataaaaatagtgagattcaagttcaaaaacaaatttggcaaatcaagtattgtaaaagtctaggaaatgtgaaaattttattctagttgactttcatgttttactattaatttgcatgtggtgaattcctacttgcattgattctaaaaggttgtataaactgtatgaggatgggaattgtgtctgtttcatttactgtatgctcagtacatactagtactcaacacatactagtctcaatacatgctgggtacatacaaatgaataattacaacagtatcatttagaaactcttccatagtctttcttcatgccttaacatggaattaataaacaaaattttaagaaatgtcctacatataagacaaaaaggtcccaaaggatataaataatagtcctaataaaatcaagattttttttcacttgttattagcatcctaactgcaatggccaactaattcaaaggcctatgcatactattatactattaacagtaggaaaaaagtaaggtgaacttttttttttttttttttttgagacagagtctcactctgttgcctaggctggagggcaatggcgtgatcttggctcactgcaacctccgcctcccaggttcaagcaattctcctgcctcagcctcccaggtagctaggattacaagcacccgccatcatgcccagctaatttttgcatttttgtagagatgggttttcaccatgttggccaggctggtcttgaactcctcacctcaggtcatctccccgcctcggcctcccaaagtgctgggattacaggcgcgagccactgcacctggcccaagatgaactttcacaaacattttttaaaaagacttctgctcctgttgatagctcaacattgaagatactatgaatttttagttaaaaattttaaaaacatacagttttggcttctgtcaaaagaatattgctgcctcattgtcacagctatagccaagaacattaaaatctcatgtcctaatgacactagaaacattagaccaattgtcatttgcccctcccagctatcatttttctgtttcttctgcagaaatatcactatcctttggaacaattttgaaggaaggaggtggctgagattatcccatgggacttgtggttttctggactgagaccattctttcagagtttcatggggctgaccgccaccacaccacaaatcacctcaatgctgggaatacctgaatcatccaggctttacacagccatacagtggtgctgccagttaggagctaagaatttctcacctggctgtggtgctctatggcatgaccaatgcttgggtgaaattcaccaaaaacagcaaatagttatttctcccttttttattattatgtatcatattattgctaactaaaaagatccataatgttctagatatgttatgtagttatttgggcagttcttactctccagctgtttgtaaaagtagaatgctggccgggcgcagtggctcacgcctgtaatcccagcactttggaaggccgtgatgggtggatcacctgaggtcaggagttcaagaccaacctggccaacattctgtctctacagaaatacaaaaattacctgggaatgacgatgggtgcctgtaatctcagctactcgggaggctgaggtgaaagaattacttgaacccaggaggccgaggttgcagtgagccgagatcgcaccactgcactccagcctgggcaacagagcgagactccatctcaaaagaaaaggaaaaaaagtcgaatactaacatatttgggtttcatttaagaaaatcatatcttacattattatttatgtatgtatatgtccatacatatatacacacgtacacacatattctcaaatggcaagtgggatcatggacatctataatcatgcataaaagaaaggcctgggagagattaggagtgttgttttaattcatgttttacctctttgtttgtggctgtcagtagattaacataaagcatgttggaaagaaccagggattatcttctagcccaatgtattcaacttctgtttgcacatttacattctttctctgaatgatgagctctcggaggtttagtagggataagttccaagggaagcctttctcaaattcatcacttacaacatttatacacacagctctgatagttaagtaggactgactttttctaatatgtgtagggatatttcaaaattatttctattttttcctgtgggagttctgatgtatacaagcctagagattgagtttagtgatggtgccagggaagattttcttttcggcaggttaaaaagtctttgaaaccctcccatttaaaaaaataaataaaggattctggttgggcatgctggctcacacctgtaatcccaacaccttgggaggtcaaggcgggaagatcacttgagcccaggagttcgagagcagcctggacaatgtagtgaaaccccatctctacaaaaaatacaaaaattattatgtatggtagggcacacctgtggccccagctactcaggaagatgaggtgggaagaccacttgagcgtgggaggttgaagctgcagtgagctgtgatagtgccactgcactccagcctgggtgaaaaagcaagatctttccaaaaaaaaaaaaaaaaatccactttttgctctatttcttttctttcctttttcttttttgagaccgagtttcgttcttgttgcccaagctggagggcaatggcgtgatcttggctcactgcagcctccgcctcctgggttcaagctattctcctgcctcagcctcccgagtagctgggattacagtcatgcgccaccacgcccagaaaattttgtgtttttagtagagatggggtttctccatgttgatcacccatccttacctgatctgcacacctcggcctcccaaagtgctgggaatacaggcatgagccactgcgccctgcctttcttgctctatctttacaccagcatcccttcttcaattacacacaattctttcgatccctatcctcaaggtgccaggcgttattccacctttatcttttgaactttatccagagtgactgtcttgctgtaacagatcactctctggtcagacccctttcaaggctttaactttcttgtttgatagcattctcccttttcagttcctttcaaatccagtgttcatgacttccctgattctatcaagatatatttatattttttgaatgtgtgtgctttaagccagtggtccccaacctttttggcaccagggaacgagtttcctggaagactatttttccacaggtggggagggggtgggagatggttttgggatgaaactgttccaccccagatcatcaggcattagttagagtctcaacctagatccctcccatgtgcagttcacaacagggttcacgctgcaatgaaaatctaatgccacccactcacccactgctcaccgcccccagctgtgcaggagacccctgctttaggcatttcgataaagcttttttttttttttttttttttggcgttgtaccatcacccaactctgcaactcctcgaacagtatgagtgggaaatgccagtggcttccaatctatcctttggcactcgaggagggagtttatccagtatctgataagacatagctgccttggcatctgcaaactttcctggagctctggagagatgtctgaaattttattttttccatgttggttgttcacttattttaggaagagatacctctccaccctcacagccaggaatctatcccgttctagagaatcggtactgtgttttgctcattttccccatgcacacgaacttcttgcatgagattcccagcagtcttgatttcataatctttctccagagctttgtaaaatgtccaaggatcctgggacagaatattcactataagaaattattaagctgtctaaaaacagaaatagcttttacactgcctgtaagacagcaaataggagcgctggttggttgattgattgattgagacagcgtctcactctgtcacccaggctggagtgcagtggtacaatccgcagctcactgcagccttgaactcctgggctcaagcgatcctcccacctagtcttccaagtagctagcactacaggtgcacatcaccatgcccaggtaatttttgtattttttgtagagatggggtcttgctatgttgcccaggctggcctcataattcctgggctcaagctatccttccacctggacctcccaaagtgttgggattatgggcatgaaccactgcaccttgcctaggaactatttattaagcaaatgtaaacagtgttcactttcatatcatctgagaggacttttatacctttccctgtccctcaaactttgtattctcttttgctttcagtatttttagcatctctttttactgttaaaaagtgaaaagtatctctttcattttttagtattttatattttttacttacgtattttattttttatttttatttatttatttttgagacagaatctcactctgttgcccaggctggagtgcagtgacacgatctagtctcactgcaacctccacctcccaggttcaagagattctcctgcctcagcctcatgagtagctgggattacaggtgtgtgccaccacgcccagctaatttttgtatttttagtagagacggggtttcaccatgttggccaggctggtctcgaactcctgacctcatggtccacccaacttggccttccaaagtgttaggattacaggcaagagccaccgcacccggccacttatttcatttattgacctcacttcatgctccactaagaaataaaaacttcacagatagcaacagcctcatcttgccaccaccaaatctgtaaacctgcctttatctgtgccccttgtgtgttctccttcttccctcctgttagaagaagcatctctcctcctgtcagaatcctcctgttcttggccaggcatggtggctcacacctgtaatcccagcattttcggaggctgaggcaggaggatcatttgagcccaggagttcaagatcagcctggacaatatagcaagacctcttatctattaaaaaaaaaaagtttttgtgttctttgtttctcaccttccaagactttttctttctctttttggaatcaaggtcctgctttgtcacccaggctggattgcaatggcacaagcatagctcactgcggcttcacagcttcaacctcccaggttcaagtgattgtcctacatcagcctccggagtagctgggattgcaggtgcacgccacaatgccctgctagttgttttttttttgttgttttttgttttttttttgtagagatggggttttgccatggtgcccagactgtctggaactcctggtctcaagtagtctgcccaccctggcctcccaaagcaggattagaggtgggagccaccgtgcctggccccaagagttcctatcctgcagcatctagtcatcccctctctactggatcactccatcagcatgacatattatggacattatggagtggcccatgatcagagcccaaaacaccacatcccagctcctcccgctccatgcagcctcctagctctgccccccttcccagccaggcctttgacaaatgagtggtctgcacttaacttctcccttcctctcctcttcatgtccagatattcctcccacagctctaacacattgctcccaacaaggccactaacaacctctgtgctgtcagagaagtcataaacatcgtcttatcttacccaagctgtcagcggccttcacaatcgttgaaccctacctccaacttgacatgttctctgctcttggcttctgagacaccatgttctctggacatctcttgccagttctttttttttttcttttggggagggagtggtagggacagacagactcctatccctctgcataacttctcaaagttagggttctttagcacttagaacctggctcttttcattagccaggtgtggtggtccatgcttgctacttgggaggctgacatgggaggatcacctgagcctaaggaggtcgaggctgcagtgagcagtgatcacaccacagccttccagcccgggcaacagagtgagaccctgtctcaaaaattaaaaaaaaaaaaaaaaaaaaaagaatttggctcttttctctttacttctcactcttagattcaatttttatttccaagcttccccacttgtatattcacacggacctcaaacttacccaaatcggagcacctgattgcccacctctaccacccaacatgttcttctctcaggctcccccttttcaataatggccctagccatcaataagccctgttgtttctataataactctaaaatacacccagcttcaccactaccacacatctccaagccaccatccactctcatctggactctgcttctgctcttattcctttccaacgtgttcaaaaagttaaactggagaaaattgacagcatctgcatttacgcaggggcggtaggaatgggagaggaggggaggcattttaaaactatgtatttagtggttagaacatgcagattctagtgaaccaatgcaaagtgggaaagaaccaagaggaaggagtccaggttaaagggatattcaacagaatggggcagatgggaaggccaggctttgaacaggtgacttcgtcttgggacttgttgagctgtgggaggatcagatggatattcttggaggtggttggatatagaaaactagaaacagccgggcatggtggctcacgcctgtaatcccagcactttgggaggccgaggcaggcagattacctgaggtcaggagttcaagaccagcctggccaacatagtgaaaccccatctgtactaaaaatataaaaattagctgggcttggtgatgcacacctgtagtcctagctactcagaaggctgaggcaggagaattgcttgaacctgggagtgggagtttgcagtgagccaagatcatgccactgtgttccagcctgggcgacaaagcaagactctgtctcagtaaaaataaataaactagaaacaagacttcagggctaaatatgtacatataggaatcatccatgataggatgtacttgaagccatggaggcaaataaaatcacctgggaaaaaatgtacagatgagaagatgagagtgtaatcctgcttcttgccgcaggttgagtttttggagcaccctcgttccaccttctagtcccaagcgtgtgttcctcttctctccatagcattaccctaccttcatgtggtcctggttacttcctcccaggatgcatgcaaaaggaagcacagtgttccacattcccttttagtcttgttgatcccaaagataagtacgtcatccaacttcttcttttttttttttttttcaagatggcctctccctttgtcaaccatgctagagtgcagtggcatgattgcagatcactgcaacctctgcctcccaggttcaagtagttctcctgcctcagcctcccgagtagctgggattacagcatccaccacctcgcccagctaatttttgtatttttagtagagacagggtttcaccatgtttcccaggctgctctcgaactcctgacctcaagtgatctgcctgcctcagcctcccaaagtgctgggattacaggcgtgggccactgcgcccggccccaacttctttataaaggttttgttactgaacattttggcacttaataaaattatctaaacctcccaagagagtgacaacacttgacaaacacatacaggcacacctccctaccctggggatgacttatctgacattccagttacggtgcacgaagccaagaatccctaagtagcaaataaaacctttcaaccattgaagtagagttataacttccagacactaaagctggagttcgtcttttgcctatttaatctatatattttttattttttagagacagtgtcgctctgtcacccagcctagagtgcagtgacatgatcatagctcactgcagcctcaaacttctggactgaagcaaccctccagcctcagccttctgcatagctgggactacaggtcccagcacaccaccatgcccagctaaattttttacagagacgaggtctcactatgttgcccaggctggtctcaaactcctgaccacaagcaatgctcctgcctcagcctgtcaatattttacctgtatttctcatcagcttggttttttggtcatggttgttaatttttgaattatatgaaagtcctacatagaaggttctctcctggtgttttggcagatgtaagaaaattgatttcgtttgtagctgttaatttgagaatccattgtagatactagcaatttctgaaggaataagagattcacactttaatgggacttcacaatctttcatctaaaaattctagctcctggtagggagacaagttccagacccacaactattagaaatatgttaataaactgggccccggattgaagcatgtctaaacaaactatggaatttaataatgtccgaataatgtggaaataatgttttcagtggaataggatgaggctgggtgtggttctcacacctgtaatcccagcactttgggaggccgagacgggcggttcacttgaggtcaggagctgagagcagcctggccaacatggtgaaatcctgtctctactaaaaatacaaaaattagccgggcatggtggcaggtgcctgtaatcccagctgctagggaggctgaggcaggagaattgcttaaactcaggaggcggaagttgcagtgagccaagatcacaacactgcactacagcccaggcaacagagcaagactctgtgtttgttaaataaataaatggaataggatgaaacagaaaaacattgtcattttttgaaaactctgaaataatctattctaaagtaattcaattgaaataataaattcactttgcattctccttttgccacaagattcaaatatttactaactggcatcaacactggtgttcaaattcagtattggcaatttcacacttgaagactgtctgtgttcccagagagtgttaagtctaactttgaggtccacaaatatttattggtgtctggtgtatgccagcaactgggaaaacaataggaggtggttcctacctcaaaaagcttgcagtttggtgaatttacagtctagtaagactagacctacgtaaaagatacagagcaatgcaaaacagtagatgtcagatgccatttgactaacatacgcgttaattgctgcaggatttctagggaaggagaatctggtgggctgcagtaggagaaattggaaaataatttactattctccattgacagtggcagtcaggaacctgggagcccaatttatttgtcccctcaacccaactcaaatgggtcctcccttgggaactttgctgccaacttgctcctcttctaaacccctccccaggcacagtctatcaaccccaactttgcaaaacttccattttttgttcttaactatgctaaagtactcacaatgcattgcaattgtttgtaagcctgtctcctctacaagattctgatttcctgttttgttatgttcatctttgaattcccctactgcttagtatgatacatacaatattgttagtgtccccaaaaagtgtttttttgtgaattaaagaaatgaatgaattcacaatgtatgacttgggccttaaggaagatggcattcctacatcttaaaattagtaaacagcatacctttaccaggcacatgttgatcagaaataaaggaaagtaagtagcctgtagaactggggtgctcaaacaccaatttttctcaggattactgaaaaacttaaatatacaggccaggtgtggtggctcacgcctgcaatcccaacattttgggaggctaaggcaggccgatttcttgagctcgagtttgagaacagcctgggcaacatggcgaaaacccatctccacaaaaaacactaaaaaaattagctaggcatagtggcatgcatatgtagtttcagctacttgggaggctgaggcaggagaatcgcttgagcctgggaggtggaggttgcagtgagctgagatgacaccactgcattccagcctggagtcagatcctgtctcaaacaacaacaacagtaaaaacaaaacaaacagacaaacaacctttaagttatacagctaaatataaagttcaccccaaacttagtaaatctgaatctgcaggcattcaggcaaaactgcagactgagcgtctgattttttttgttttgttttattttgttttgagacggagttttactcctgttacccaggctagagggtagtggcacaatctcagctcactgcaacctctgcctcccgagttcaagcaattctcctgcctcagcctgtggagtagctgggattataggcacgcaccaccacacccagctaattttgtatttttagtaaagatggggtttctgcatgttggtcaggctggtctcaaactccagatctcaggtgattcgcccgccctagcctcccaaagtgctgggattacaggcatgagccaccatgcctggccatgcatctgaattttttaaaggtgccataagtgatatacagccaggtggttactataaaatgtttgcagataactggcactggttgctatgaagaagcaaatatttttaaatttaataatattaagaattgtttgacccaggagtgcaaaagcagcctgggcaacaaagcgagaccctgtctctacaaaaattaaaattagaaaatcagccatgcatggtggtcccagctactctggaggctgaggtgggaggattgcttgggcccaggtggtccatcctgcagtgagctatgagtgcaccactgcactccagcctgggtgacagagggagaccctgtctcagggagaaaaaaagagaaagcacagagcctagtttgttatatcacccttgggggttcaaggtcagcaccatggacatcgccattggatgggttggtttttatcattccttccttcacaccagtctgtcaattaccccatcttcctttatttcgttgctaatatttatgcctctctagtgtcatcccacttgatgtatttaatatgttgttggcaagcatggcagttagctcaactttttagcagctgtattttgaatgaaaaccaacctcatgttccaagtcctcttgcttaattctagcaaattcctaaactgtatccaaatctagaagtctgacccctatgtggggtggttcttaggaaaacttatttagactgtattacaagtagttcggttctaacctcttaattttacatttgtacaaattgaggctcagagagatgacgttcttgagatggagagttactgataataaactaagttcaacagtgttttcatggtttggtccagaagttactataaaatcgtaaccacatccatggaaggaatatctagttactaataaaaataaatctaatggttgatacagtttctctaaatcctccctactctttattaaaacctatttaaccacatttatacatgtttatgtacaatgttatccaccccaataagtcctgggatcttgaggttaagagtcctggttctattcatctttgaatacaacccaacaacaaaaacagagattaattatactcatattttttctttatcatgctataaatccactttgcagttaatatctatgaaaattaatgaacatttaaaataaagtattcaacttaggaattgaatatatattatatatttattgaatgcgttttcatctctatttaagaaaaccagataattgcactagccaaaataaaaaaatttaaaatccacattaaaaagaaatgtattcagggccaggcatggtgcctcatgcatgtaatcccagcactttgggaggctgaggctggaggatcacctgaggtctggagtttgaggttggcctggccaacatgtatataatatatatattgtatataatgtatagtatatatcatatagactgtgatatattgcatatattatatatagactatgatatacagcatgtgttacatatagtatataacatatggtgtatattatatgtggtatatattatatagagactgatatactgtattgtatatattacatatgatatactggatagactatgatatactgtgtatattatatatactatttacgttattctgtatatattatatatacactatatctctcacctttctatctaaacctgcttcagttgcattgcatggagcctttgcatacagtttgttcacccctaaattatacatgcagttcaccagatcctattacgctatgtctgttccccctttaaattgatttttcacaagcacttagcttggtgtcttcagcgtctggcacctggtaggcattgagatgtttgttgcaatctttctcaaatgctgggtgtggatggtggtggtgtcagcagcagaattaaaagataaaggaaaccatctgtccttaaaggaactcaccctggtcacagagactgacatgcaaggggaaagggtatgaatgtatgagccaagcatgccagtgtccgttctcctggttcccaacaacagtgttaattttatggtagatgccatttcaagtcccacagccatcgatgtggtcaaatgaaaggtgttacacagggccgggtgcggtgggtcacacctgtaatcccagagctttgggaggccaaggtgggtggatcaccttaggttaggagttcaagaccagcctggccaacatggtgaaaccccatctctactaaaaatacaaaaaattagctgggcatggtggcgggtgcctgtaatcccagctactcgggaggctgaggcaggagaatagcttgaacccaggaggcggaggttgcattgagccaagatcatgccacagcactccagcctgggcaacaagagtgaaactccatctcagaaagaaagaaaggaagaaaggtattgaacagaattgaaaagtttgtcagatgagtgtttctggaagaccttaaaattaagaaattatttgttcataataaagactacccttttccctacagaatgtaattaagatatttattttttataacctaaaaattcgtctttgtcagtatcattttctgcaagataggaagctattatcctgcagccactggtttttgtgaaactgcccatggtttacgcctttgtatttttttcctgtgtcctctggagcactagttagccaaagtctaaaattggagcagaaattatggggcagtggagttggaattacagcttagactcctgtctctaccacatgtaactatggcctgccatctgatgttcttcatttgcaaagtgggaataatagtacttaatatacctgttgaaaatatttgactttctgactcagaagggatcttaaaaatgtccttttataattgaggtaaagaagaaatcgctaggtagggaaatgtatgtagtaaatgatgaaatctgtaaagatgttttaaaaattgtaaatacctctacaaatatcatatactactcaagcaacatcctaacatcactaggcatttgttttctgtttaactgcctttggaagacctgcatgtaaagtaacaaatatgtctcaccccagacgtgttcaactcccgtatctccctttttcattacagtcatctctctggctccttcactgcccccattcctatccatctgctctttgatgtcatatgcaccttacaggtttcagtttctcttcccggctttgctttcttttctgcttgtcttgagccccatggttgactagctgaagcattctcgaataaggagtctcaattcctttaatatccggcccacttttcttctttttttttttttttttttttttttttttttttgacatggagtctcgctctgtcacccaggctggaatgcagtgctgggatctcggctcactgcaacctctacctcctgggttcaagtgattcttttgcctcagcctctcgagtagctgggactacaggtgcacgccaccatacatggctaatttttgtatttttagtacagatggggtttcaccatgttggccaggctggtcttgaattcctgacctcaggtgatccgcccgccttggcctcccaaagtgctgggattacaggcatgagccactgtgcctggcccccagcccatttttctacgcttcttgcctaccttggttccatgataaaagccacctccttagcctgttaacccatacaatggaggtttagggagtgggtggaagagctttagtgtctttggtttaaatttaggtctgttttaaaattgtgtctgatacaaccacatctccttaataaacgtattggtttactattttcagttcagtctttagaaaacaagcagcctttcaggaagaatttcagagaggtttggttctcaaattttgtgtgcttctaaatattctttataccttgcttcaaaatgtagctacctgagctcacctttctgtagccatttcagtttattaggtttggggtgaaatgtgccatttgtattttcaacaagccccaccccagctgctgaaaatgatgcaaaatcaaatttgagcatcgctgctgtagaatacattctctctttcttccaatggagagttccattcctgaatgtgggatatgttgaaatggtgcagccaaatttgcattgttgttcggtaatatcagtggttcttaatcaaagacatgtatgagaatcaactgtggtgcttttgaaggtcatcactaaaaattgtccacgctttagctccacccactggcaattctgtgaaatacttttcaggtggggccccgctcgcctgttaacgtatcacaggtgatttctacttggtataatatggtatgacccatctgcagtggaaacaaatgcctgttttggataggagtatttcaattcaagttaatatgaattgataaatacacaggtaatatttgggttgttattcaaagaacttataaaagtcatatcttgtaaaagtctatagatttattacagccttttaaaaaatattgccaggccccaagccctgaaaatatgttgcgcttgctccttcccttactgaaatcacatttaaattcagaatcaccagtgctagtttactttcagttcaagacagcaagcctgaaaatagccttaatgacgcatgcagagcattttcctaggaacagactctggacttattagtgtctggagccatcagtcaatacttttctggtgcactggtgtgttagtaagggatgccagaaatgcgtgccttctcttatcagtcacccggagaattcacgtaacttgctttaaatagccgaagtgaagaaggagattgactttacagttgtgtttgcttctttaaaaaatatacttatcttttcctagctgtaaaatagcaatcgaaaactgccatctaaagtgaaaaataattccctaaggtttcaatagggtttttcttgtatcagaaccagggccagggtgtaactggatttaagtgccagacaaggagctagaagctgcaggtgcagctccccgccacgctgctctctgtgaccttgagtgagacacaaaattgctgggcttccgtttttcattttaaaatgcgagggttggatttgctcgctaagagctcttttatctctaatagttaagatgatggaacatgatgttttgagatgttttgctgaaatttctcacatagaaaatgggccttctgaaaacatataattatagttttgggtaggaagaagctgtcatggtggcgaaggggaacattgcaaatctgaacatgaccgcagctggcgggagaataatgtgttagaattgaaaggcaccctgcagacttgctgtttaatgtacaaagaagcctagggccggaggggcagggggactctcagggacagtggaatctggctcaacggtcaccctctggtagcaagcaagacctgtctctgtgacaggtctcaatcaatggagaagcttattttgccgacgttaaggacatgcctaggctcagcgtcctaaactaagccaagtgcaccaagccaggtgctcaggctcctaaactaaggtgcaattaggcaatcagcatggattgttagactgtacaaaggtggagatgccaattccccaactgttttcctaggggttgtgttcccacacacgcactttctccttagtaacagcgcacggctcctgacctggatgggtggccttagatctgtgaagcacatctaccttgccttgagaaagatgcaactcaatgttggcttccttagctccgtgccactcagcattgcagcaccgaaaggaaaactgtttcctctctactctcccactactctcaattcttccaacaacagatgtgggttgttttcccccccaacagcaagcagttctccagttctctgcagatgctaatgccacgtcctgcaattcaattctgaccttatctacctggagttagtgcagacccaacaggttgaaggctgagtcccaaaagactgtccccacttcagatgccagtcgcacaagtgatgagtctccaggttatcctcaacttctgtccaactcaactacagatcagaggttcccatggccccctactcaggttctataatttgctagaagggctcataaaactcaagagaacagccgacttactagatgactagtttattataagaggatacaactcaggaacagccagaggagagagggatgggagagggtgcagaacatccatgccgtatctaggtacgccacccttccagcacggccctggggtcacacacctggaagctctcagatctccatccttttgggtttttatggaagctttgttacttaggcaccattgactaaatcactggccactggcgattaagtcagtctccaacccttttcctgtctctagaggtcagggtgttggggcggaaagttcaaacactttaatattacggttggttcctctggcacccaggccccatcccaaggctctccaggagaccccagccaccagtcattcattagcatgccaaaagacacttaacactttggagagtataagagttttaggagctgcattccagtaaacaggtgtgcagatcagataagcatttcttattgtattgcagtatcagagatgatgctcaccgctggaccacattccaagatatggctccacttattgatctttgaatgaaggggtaccttattgatcctccccctgaccttaccccaaataacaaatcataccagtactaaactggcagaactcaagattggttaggaaagatcctctgaaacttcgtataatgacagttaccttgttttgagtgtgtcccctgtgccaggcactgtgctgagagctttgtgtgttcagactcacttcacagttacaaaaccctctttaatatgtgggaactgggcttgaaatggtttaggtacacggtccagttcatagccaatgttgtgttactagaaagggatcccaatacagaccctgagagtgggttcttggaccttgtgcaaggaagaattcagggcaaggccatagagtaaggtgaaagcaatttgttagagaagttaaaaaaagaaaaaagaatggctactccataggcagagcagcagcatgggctgcttaactgaatatacttatagttatttcttgattatatactaaacaagcagtggattgttcatgagttttccaggaaaggtgtgggcagttcctgaaactgagggttcctcccccttttagactatatagggtaacttcctgacattgccatggcatctataaactgtcctggcactggtaggagtgtcttttaacatgttaatgcattgtaattagtgtattattgttacagtggagggtgtccacgttcttggcgtcttcaacaaagaattggacaaaacccacaaagcaaggaaagaatgaagcaacaaaagcagagatttattgaaaacaaagtatactctacatagagtgagagcagccaaagcaagcagctcaagagcccggttacagaattttgtggggtttacgtaccctctagaggtttcctgtgtttgcttggtatacacgctatgtaaatgaagtagcgactctccatcagtctgattggttgtaggaggagactaatcagaggctgaagcgatgttatgaagttgcaccctatgcacacatctgattggctacagaaagtgaccaatcagatgctgaagtgaagttacaaagttatacccctttgtaaatgaaaacttggccccagaccagcctgaatggttgcaggagggttctaaacagaggtactttcaatttcagaggcagagcatggtagcttatgcctgtaatctcagcacttaaggaggctgaggcagcccaatcacttgaggtcaggagttctagaccagtctggccaacatggtgaaactccgtctctaccaaaaatatttatttaaaaaactagccatgtgtagtggcacacacttgtaatcccagctactcaggaggctgagacaggagaatcacttgaacccgggaggcagagatagcagtgagccaagattgtgccactgcactccagtctgggtgacagagtgagattgaatctcaaaaaaaaaaaaaatacagttctcatctgccacacagaaaaaggagggggagggtattgcaaagggcgtagcctttggtccttttgttatttgagcgtggaaagttggggtttttcttttgatttagttttaggaagtcagcgtgaatcagccttaggttccctgtctccaggccctattctcctgcctcataataaataataataataaacagggaagacgaccagagatcactttcatcaccatcttgatttaggtgggatttggccggcttctttactgcatcttgttttatcagcaaggtctttgagacctgtatctggtgctgaactcccatgaataagaatgcctaaactcttgggaatgcagcccagtaggtctcagccttattttatccagcccctattcaaaatggagttgctgttgttagaatgtctctgacagctggactcatccaaagcctttttagtaatgccatgactgtgtaaatccagaagtctctgtgacaggtctcaatcaatttagaagctcactttgccaagattaaggatatgcccaggagaaaagaacatggaatcactaaaacagtctgtggtctgggcctttctccaaaggtgaatttgagggcttcagtatttaaaggggaagagtgggctgcagagggaagatggagggtgtggtaattcacataatgcaggaggaaaggggcaggttagggaagagtcacttatatattcctccggctttcagtaaattggcactttacaaagataagatggacacagagtaggaagtatttaaccttttagttgtagttgtctgcttaggaacaaaagggaaggcaacttcttgcatggctcagctttcagcttcatttttttttcttttggcagagtgaattggggttccaaggtttgtttgttcgtttgtttgagacggagtttcactcttgttgcccaggctggagtgcaaaggcgccatctcggctcactggaagcacctcctgggttcaagtgattctcctgcctcagcctcgcgggtagctgggaatacaggcagcggccaccacgcttggctaatttttatatttttagtagaaacgggatttcaccatgttgcccaggatggtctcaaactcctgacctaagttgatcctcccacctcagcctccgaaggtgctgggattacaggcgtgagccaccatgcctggccggagtttttattttccttttacaagtgcttcctcttctatttcccacagaacattctggaaaaccaccagggtagaaccctgacttctatttgaccacagctcaccattcttatatgttttgtgattttcattttcccttaagaattgtctccaattgcgacattcttcagaacttattaaagatatctgaagtgtatacggtgaaaaatgtatagaatggtggtgtcaccacttgatgttgagtgtgaaatgtgtgggtagtaaacttctgaagctgctgctgtaagggccaagggaaacttccccttcaccctgtgaaagtttgcagaaaaagcaactcactaagacaggttaattggagaaaaggcatgcaaatgtatttaacatgcacacggggagaatctcagattacttattccctaatagagttaagaagcttatacagcatcctggccaaacaagttatgggagtagggagaagaggaattccattgagaggatcactagggagaatgaatggatccaggaacagagataaatttgtaaatagtctcttgacagttaaggtttggttgcattcttggtattaacagggaggggaagcagaaaccattggtctctttggtgcctctgggtcctgggcagatacagcctttgctgtgggagggatgtgggggaccttgaggcggcttcttcatttcagcaggccaactactcaggaggctgagtcgggaggatcgctctaagcccagtagttcaaggttgcggtgagttctgatcctaccactgcactccagtctgggtgacaaagtgagaccccgtatctaattaaaaaaaagaagacacctcttcaaattttgacagagtttaactctttcatcaaaatacctatatattttatgtaatatggatcatttatatatacacatatctgtgtgtacatattgttatctgtatacgtatatctgtattatataacatatataatctgtgtgtatatgtatatatctttttatgtgtctatccttcctgacacccattccctgaattcttttctgccaagataaatgcaaagagccagaaaatctgtgatcctatctcttaacagatctgtgctgagaaattactgtaggtatacctggagttcttaataaaaattctagttagatgacttttgagaaccataaaaaaaaacttaagagaacttctgggatctctagtagggactaactttctctttacaaatgttgacaaattgttgagattgtctgcggagatagtacatgatatggtttggctctgtgtccccacccaaatctcacattgaatggtaatccccatgtatcaaaggaggggcctggtgggaggtgattggatcatgggggtggatttccccctttctgttctcatgatagtgaggttcttatgagatctgatggtttaaaagtgcgtgtgtctctctctctcgctcgctcgctctctcgctctcactctctcttgctctcctgtgataagacatgcttgcttcccctttggtcatgattgtaagtttcctgaggcctcctgttaagcctgaggaactgaatcaactaaacctcttcataaattgcccagtctcaggtagttctttatagcagtgtgagaacagactaatacagtatatgaggtacacaagacagctcattacttttagagtcaagcattgtttttaatttaaaaatgttatctcccaggttgatcataggctgtattcattcagcttggctttgagtgactctgggctgtttgctaaaactaatttgtcctcaaaggaaagcgagttatgaataggggcattcaaaattttatgactttggttctgatgatactttcaaaaaatgaattttaaataattttcaaatgagagaaacaatcctcaaatatatgttcatttttttccaagggttttttgaaggggttcccattcacttggataggtttgtatatgcttgacattttttaattactcaaattatttgaggatcacaattcacttttaattgtttttttaatattggagatgtgggatttgtttttttctcttttggttgtcaacctggttactaacagactgattctccttgagcatccagaataagacaagcccgttggtttaatagttatctgtggtaagtaccgtcatacacagtgtgtctcctttgtaaaacttaagtgcaatgaatgatgttgttactagtccaacgtgtttctctcttgctagaataatagcctcacagagcaaaatctctgtcttgttgagttctgtgttcccactgccaagaaagtatcctgagcctaagaggcacttaataagcacttaatgaattacaaaagaaatgatttgattacagaactaagtctaccaagtgtagctagttcagttgcagaaaacagaatccagaacttttatgtttccagtgcatcattttgtctctaactgcttaggaactatggttagggctaagagaaaatagacgaatttatcccctgctggtgggcatgaaaattagcacatctccctggaggaaaacttggtaaaatatttatcacatcttttcagacgtaaacactttttctaaccacataggagacttacataaacatcttttggtcaataatttgtctaaggaaataaggataaaatgttttagatatgtttttaatatcaaaagaaatgtctaataacagtgcagacccctcttacgtaccccttgaggtcctctcagcctcacctatctgttccacccctctctgtggcaattcctctgcataaggccaacaggtcttccttgttggccacaggtggtgtgctgtgaggctgtgctcatcacgcttgtgtgcacaaagcactgggcagacacacccagtgcagaaaatctttgaccaagaggtgaccaaaactgataatattacatcttcgctatatatatatatatatatatatatatatatatatatattttttttttttttttttttttttttttttttttgagacagagtcttgctctgtctcccaggctggaatgcagtggcatgatctcggctcactgcaacctctgcctcctggcttcaagtgattcttttgccttagccttccgagtagctgggactacaggtgtgcaccatcatgcccggctagtttttgtatttttagtagagatggagttttaccatgttggccaggctggtctcaaactcctgacctcaagtgatatgcccgcctcggcatcccaaagtgctgggattacagacgtgagccaccgtacccggcccatcattcctttaacagagtgtcttgagatgtggcttatggcttctcagaagatagtccagaaggattgagccatcaatcaatcacacctagtagcagccaagtctattacagcccctcagatggtctcttcctctccttccctgattccttctctggcccctctcttctattccctgagattgtactcttatataagctcagtgcctcagtatctgctgtctggagagctgagaagttgtcttgttgattaaataagctatatcatcttttaagtggctacagatatggacagccattacaactgacatgaaaaggcaataaatgaaataagctggtcacaattttttttctgagacagagttctgttgtgttgcccaggctggagggctggagtgcaatggcgcgatctcggcttactgcaacctgtgcctcctgggttcaagcaattctcttgcctcagcctcctgagtagctgggattacaggcgcctgccaccatgccctactaatttttgtgggtttttttagtagagatggggttttgccatgttgtccaggctggtctcaaactcatggcctcaagcaatccatctcggctttccaaactgttgggaatacaagtgtgagccaccacaccttatctcttattggtttttacagagactaactgagatatatttaagcaacaggacttctacatagtaagcacaatatagttgcaaattaaggcagttattaattattacagtctaataatgtctgaaaaaaacaagtctgtttatcacgctgaatcacatctgtatactgccacaggtatacctcagggaagttcagattactacccaagggccaaccgctgcttctgaaacatcaactgacagaagaacctacggaagttataatatctcctggctagactgaagatgccttgagcagatatttgggtgtttttttctgttttttgtttgttttgtttgttttgagatgcagtctcgctctgtcgcctaggctggagtgtagtggcatgatcacggttcactgcaacctccacctcccgggttcaagcgattctcctgcctcaacctcctgggtaggtgggagtactggtgcccgccaccatgcccagctaattttttgtatttttagtagagacagggtttcaccacgttgggcaggctggtctcgaactccttacctcaggtgatccgcccacctcaccctcccaaagtgctgggattacagggatgagccaccacgccaggcctggggtatctttattaaagacctttagagttactacatgttattctcagagtttatttgtagatgttccaatgataaccttgcctctaacaatgcaccccagtcatagtggagcatctgtcattttagaaaagttttcatatattcagctcatctgtgccttcctcccgtgtctgctctttggaccttgtttcggccccttcaaacagagcaacaattggtcactaagctttccttcagaaagtctctcaacactgaagcaagggcagcagcaaaggttttaagagtttctagagagtgagtgatcacatggggtttcatgttcagaactcaccacccacaactctctgcactaatctaatccctgccaaaacatttggtttgggtcatggggacactcagctcaatcattttcgtttaaaaaaaaaaaacagaacaggctgggcacagtggctcatgcctgtaatcccagcactttgggaggccgaggccggtggatcacctgaggtcaggaggtagagaccagcctggccaacatggtgaaaccccgtttctactaaaaatacaaaaattagctgggcatggtggcgggttcctataatcccagctactcgggaggctgagacaggagaatcgcttgaacccgggaggcggaggttgcagtgagccaagatcactccactgcactccagcctgggcaataagagcaaaactctgtctcaaaaaaaaaaaaaaagaaaagaaaaaagaaaccaaaacatgagtataaaataaatgatgaaataaaatcgctgaaatttgtataacttctgatcgctagacctctgtgaacttagctaaaaccgcagctgttgcagtggagaagaaagtgaagattaccgaattaacataaaatataatgtgtctccccgtgcttgtcagcatgtactttgtaaaggctttcctggtgtttgtttagaatgctgctttggaaattctttgtagtgtataattttctaaataagtacagaatagacattttataacaatttaaatgccagcatcagtttaaaagggataccactgttggagtctcttaactctttcattactgtcctcgccacagaatacaattactgagtggaaccgcggtgacaaaagcgaaaacaactcagtgttcagggtactgtgaatatttgctgggccacatttcgtgggctgagactcttcaaaaaatgatgtcactggtgtctagcaagattgccttatatcaggctgcttttcattttgtttttgaaatgtttgtagtttaagaaaaacaaggccaggcacagtggctcacacttgtaatcccagcactttggaaggccaaggcgggcagatcacttgaggtcaggagttcaagaccagcctggtcaacatggtgaaactccatctgtactaaaaatacaaaaattagccgggcgtggtggcgggcgcctataatcccagctacttgggaggctgaggcaggagaatcacttgaacccgggaggcagaggttgcagtgacctgagatcacgccactgtactccagcctgggtgacagagccagactctgtctcaaagaaaaaaaaaaaaatagatacagtatagagaaaaccaactaagaaatgggagagctaagtgagtgaagtgtaactgataagcaaagagaaggaataaaaataccaagttatcactcaggagttacaggcagcagctacacaaaagatgtagccaaccaagggaagaagagagtgctcaaattagtgtgaacccagacacctgagaatccaaacttttcaatcgctgtagctaaagttctttggcccagtgtagacacaagctccctcactggggtctcaggatataaggattcaagccctgtctctcgtgccactctgtcctttcaaccacgcagtgctggattttaaacaggtagaaagtaaaatgtttattgtatttacccctttgcttaattcttaatcattttaaatttaataaatatctatatacacttgcacttacatatatatatgttgatcgtataaaacaaaatcctggctgggcgcgatggctcacgcctgtaatctgagcactttggaaggctgatgcaggcagattgcttgagtccaggagttggagaccagcctggacaacatagtgaaaccctgtctctacaaaaaatacaaaaagtagccagatgtcatagcgcatacctgtaatcccagctacttgggaggatcatttgagcatggaatgcagaggttgcagtggggcgagatcacaccattgcactcagccctgtgtgacagagtgagaccctgtcttaaaaaaagtatatatttgtttcaaaacatattgtaggaacttttgcccatatataaagaataaaataaagttgaaaagtttccttccttaatggaaggattatttattatcattgaaagttagcaagatgatagagagaagttataatcagacaaggataactagaaagtaagatatcagtaagtgctaaataaagcagatggctatgacctggttcctgtaagtatagtcagtacctcttcagttcctgggtgcttcctatataagacttgatagctacactcccacctgaggcatttaatataataaaagagtagaacaagttttataagaagttagtgtacacaacaaataagtggataaaaaaaacggattagatcttcttgacctgtcttttctatagtccctctctctctctttttttttttttttttttctgagatggagcctcattgtgtcgcccaggctggagtgcagtggaacaatcttggctcactgcaacctccacctcccgggcttaagtgattctcccacctgagcctcccaagtagctgggattacaggcacccaccaccatgcttggctaatttttgaatttttagtagacctggttcctaggtctactaaagtaggttttcaccatgttggccaggctgctctcgaactcctgacctcaagtgatctgcccacctcggcctcccaaagtgctgggattactgatgtgagccaccgtgcccagcctccatagtctcttacaatagggatctgggtcattttttttttttttttcatttctctaaaaagagcaaattgagagtagttaatatttaagacaaatccattatagacattaaaacaaactatgaattttccttttatgttattagcaattgacagtttcaggatgaaaattgaaaaccatactttgctatttagcatagtaaaattcacctttgtattaggaaatgaagaaatcaatgcataaaaatctaagtaactatattaatcatgatcagaaatttatttctatccttgagtgaatttcatttcactttttaatcataggtattcattctatcactggcacatttttattaaacttaggtatgcattgtgttatagcgttcaaattattagcttcactattaactcattagtcattgtttagggagaaagctagaactatagtgccatgaaattataatgtgtttattctatttcataaccaaagatatttttaagttaattatctcctcctataataattggtgcttagcagccttaggcctagtgattccagaaggctgtaagaaaataaaagttcttccttttctaaacattaaccacctctctgacaagagcctgtgggcctccacacagcaggcctctgtggagcaaatagagtttcctttggatgtgagaaaaagcaagtcttgcggccaaaaagctgtccactaatatccttccagccctgccagattagttcttgcgtatacccatctgttaatgacagggtccaggcatctgtctctaggcagaaaagagcatacggcagtgagatgagggacttcaaggccaggggatagagggcatgagtcagggcagaagcatggagaaggtgggaaatttggggagcttgaacagatgtttctggaccatccttttgggtctgtaggccagatagtaatgaagcattattgtgtggggtaaatatgtgaggttcattgtctcacggcagggaaatcgaggacgtggacgtggaagaaatgagtttaagagcggaggtttaataggtgaaagaaaaagagaatagctctctctctctcttgcaaagagagaagggctcccaagtgcgtcatctggtttcatggtgaaacgcatggggtttcatagttgagcttgagaaggcgctgtctgctttacatagggcgcgagagattgttcggaccaggtgtgacatttgcatggtgcatgaagatgctggccagcccaccctaatctttcatgcagatggggtctcaacctggccagcaccatgttgtctgttcctcactgtacttgtggttgacaaacaaaagggaagatggagccaccaggttgcacatgcctggcccccaggtagccttcatctattggcacagctgcggcatttacctgtgcagacttttagcttgtttatctatgctttcagcttgatttttcaggctgctttttgttagaaaagaaacaatatgggggctgtgtttcattagaaggaagccttaccgaggactctcttaccctcactgtttgctgaaataatttatttctagctcatatatcagtaatagtgctggagtcagggtgggaagggaggtggtgaaaccaggtggttggtctcttcagcagccttctcaagatgagtgatttgtggaggggcgcggtggctcacgcctgttatcccagcactttgggagaccgaggtgggtggatcatctgaggtcaggagttagagaccagcctcgccaacatagtgaaaccctgtctctgctaaaaatacaaaaatttgctaggcatgttggcgggcgcctatagtcccagctacttgggaggctgaggcaggggaatcacttgatcctacgaggcagaggttgcagtgagccaagatcctgccacaaattgcactccagcctgggcaacagagcaagactccatctcaaaaaaaaaaaaaaatgagataggaagacatacatggtctcatagtttataaaattccacaccaaggaccctgcacaggaaacactgaaaggctgctgcagcgaccctagttttacagagggaataaaaagtcatgcaaattgtacttttagtagagacagggtttcaccatgttgcactggctggtctcgaactcctgacctcaggtggtccgcttgcctcggcctcccaaagtgctgggattacatgcgtgagccaccacacccagccattcatgaaatacagctttctagatggtgaaaaagagatgtgaagagagaaacggaagatctaaataaataaaaataatgatttgtgccgggaactgtggctgacgcctgtaatcccagcattttgggaggccgaggtgggcggatcacgaggtcaggagatcgagaccatcctggctaacaaggtgaaaccccgtctctactaaaaatacagaaaattagccaggcgtggtggcaggtgcctgtagtcccagctactcgggaggctgaggcaggagaatgacgtgaacctggaaggcggagcttgcagtgagccaaaatcacaccactgcactccggcctgggcgacagagcgagactccatctcaaaaaaaaaaaaaaaaaaaaaaaaagaaaatcaggatttgacatcgctgttgatttcctgaacctcgagttttttaagtgcatctttgtacttaaaaggaataggttacctttatgagggacacccatcgttctaacatgtgaaggtgttcatttagtgtcacacgcaaggcagacctgggcccaatctttttttgcctttctttataccaaccaatttttagcattttgtaaattataactttcaagtcttcaaaatttcacataaacatgtaaatgttgtggaactgccatctacacacccctttaaatgaaaagcactctagtactgtaggagaaacacaggctttggagagagagagattttagcaccagctctaacgcttatggcctgggagaacatataaaaaaaaaaaatcttcagccgggtacggtggctcatgcctgtaatcccagcattttgggaggccaaggcgggtagatcacctgaggtcaagagtttgagaccagcctggctaacatggtgataccccatctctactaaaaatacaaaatattggccgggcacggtggctcacacttataatcccagcactttgggaggccgaggtgggcggatcatgatatcaggagatcaagaccatcctggctaacacggtgaaaccccacctatactaaaaatacaaaaaattagtgagccgcgccactgcactccagcctgggtgacagagcgagactctgtgtcaagaaacaaaaaatacaaaaaattaactggacatggtggtgggtgcctataatcccagctactcagtgggctgaggcaggagaattgcttgaacctgggaggcggtggttgcagtgagttgagacctaaccattgcaccctagcctgggcaacaagagtgaaactccatctcaaaaaaaaaaaaaaaaaaaaaaaatctttcacaaatgttgtcttaaaatttaactttttttttttttcagagaaaggatcttgcaatgttgcccaggctagattcaaacccctgaattcaagccatcctgttgcctcagcctcctgaatagctgagactacaagcgtgtgccacagtgaatggctgggagaacttttttgagcctcagtttcttcaccttggaataaaacaattgtagctggggttaaatgaaatgtagcaatctatgtataatatacagcacattgtttgtcccttggccgacattccgaaagtggtagctttcatcattttacagtaagtcctgtcatgtacaaggtaaagaaggacctagaagaagagaatatgaatttcttaacatctcttatcacttacacattcccttctcaacaaatattgattggaaacatactggagacacagtgttgaacaagacatggccttggtgttttagtttcggttttttgagacagggtctctctctgttgcccaggctggagtgcagtggcgtgatcatggctcactgcacccttgacctcctgggctcaagcgatcctcccacctcagcctcttgagtagctgggaccacaggtgcacaccaccacagatggcttttgtttgtatttttggtagagacagagtttcaccatgttgccctggctggtctcaaactcctcggctcaagcaatccacctgcctctgattacagatgtcagccactgcactccaccaaacttggtgtttttaaagcacttttacattattgtctagataaagagatgccactcttctacaaattggtacttacgaatttattttgaggatctgttcggctttagtccacaaaccaatatgccacaaacttttaattctttatcccaaaaagggggctacaatgcatagatgatttaccagtcgccctcatgctatgtagcatgtgctcatacgtcatgtcgaaagtaccagaaactggaaaaggaatcaattcctttttttcttggcttggaacagggagaagcaaaaactggtagaaaagtctgacatcacctcttgggcctgaccctccatagccacaaaacaagttggccaggaatccaggtagaatctgcaaaagcagactccaggtctcacactggcctggcaataaagtctttaggatgttaatagaggttgagtgaaagtgaaatgaaggaccatattgtctcccaaccaacgtagtatcctaatgattctgtagagcaggatgaatctaaatctaaatgtggatttcaatagaattccgcaacagccatccctgaagctccttctacaggatcctacctagggctgtgggctatttctgtatctgtgctttctgcttttcttccccatcttactctacagctatgaccaagcctttctgataaacccgggccggtgggggaggggggagggtggagttaaagggtggcaggaaaaggacagcttgaaggacaacctattaactagagtgcacctcagttacatttggccttgggatctggaatagcttcgctttcctcaagagccagagcacctcttgtgtcccagcatgtcccagagcactgtgtcagtttcttatcacagtgcccactgttcctggtgttcccgtgaaacctctggaacaccaagattttttggcttctttttgttcttgcttcttgggactcttctttaccttaaggagaaagcacaataagaagaaagagtaaatggcccactggcctcaaacattcatatccaagaatcagttctattcatcagtatttatgatggaccatgcaggagtgaactaggaatgagctgaaccatgccccagggccatgatgctggaaaaccataaaaatctggtagggcagggtgtggtggctcacacctataatctcagccctttgggaggccaaggcgggaggatcacttgaggccaggagttcaagaccagcctgggcatcaaagcgagacctcatctcttcaaaaagtaaaaataaaaattagctgggcattgtggcatgaggctgtagtcctagctactcatgaggctgagactggaggattatttgagcctaggaggttgaggctacagtgagccatgattgcaccacttcgttccagcctgggcaacagaaagaccctgtctgggggaaaaacaatctggtaggcttccagaccaaaagtaacttttgtagttcgaacaagggcaagagccctgaatggtaagaggaaagagttccatgtggctctttaccattctgagattaagccaaaaatgaagatgtcaacttaaaacaggatatatttgattaacaaatggtttcatggataaaaattcaatgattccgtaagggatattcccttggaacttcaagttggttaaaaaaaaaaaaaaaaaaaaaaaaaaaagcctgagcgtttgaggactatcaaagaaaatcagaatgaaagagatatgtatcagtacattcttgcattgttacactgttataaagaaatacctgagactgagtagtttatcaagaaaagagatttaattggctcacagttctgcaagctgtacaggaatcatggtgttggcatctggcttctaggggaggcctcaggagacttacagtcgtctaggaaggtgaagggaaagcaggcatatcatacatggctggcactggtgcaagagagaggtgggaggtgccacacatgtttagacaaccagatcttatgagaagtcttatcatgagaacagcaccaaaggggaaaatctacccctatgatccaatcacctcctaccaggccccacctcccacactggggcttacaattcgacatgagtctggccagggacacaaactcaaaccatatcaagatagaacactgtaaacaaagtgaatatgggaaaacctggccgggcgtggtggctcacacctgtaatcccagcacttcgggaagccgaggcaagcggatcacctgaggtcaacagttcaagaccagtatggccaacacggcaaaaccccgtctctactaaaaatacaaaagttagccgggtgtggtggcatgcgcctgtagtcccaactacttgggaggctgaggcaagagaatcacttgaacccgggaggcagagattgcagtgcgccaagatcgcaccacttcactccagcctgagtgacagagcaagactctgtctcaaaaaaaaaaaaaaaaaagaaaaaaagaaaagaaaagaaaaaagaaaatgagtatgggaaaaccttaccatttgctcaagtcccagagaatatgaaagaatctatatcacagaaaagcttcttgactttaacagcgagttagtttgtgtcgtgcatgtggcagatattaaactgtgttgatgagtttggtttgaggacgtttacagtggaagaccacccaggaaatgacttgtcttgggctttaatggggggtaaatacagagaaatatttacttaggtgtagcatttactttggtatatagcaaatgcctattaataagcacttactgtatatagttagccctctttatccatgagttccacgttcacggattcaaccaactgtggattgaaaatgttaaaaaaaaattacaacaataagaatgatagacttaaaaagcaatagaattgaataactatttgcatagcgtttaccttgtattaggtattataactgctctagagataaagcatacagaggatgtgtgcagttatgcgcaaatagtacgctgtctttctctttgtttgagatggagtctcgctctgttgcccaggctagagtgcagtggcacaatctcgggtcactgcagcctccgcctcctaggttcaagcaattctcctgcctcagcctcctgagtagctgggattacaggtctggccaccacgcctggctaatttttgtatttttagtagagacgtggtttctccatgttggtcaggctggtctcaaactcctgatctcgtgatccgcccacctctgcctcccaaagtgctggcattacaggcgtaaaccactgcacccatccaagtacactgttttatatcaaggacttgaacatctatagattttgagggtcctggaaacaatatcacggcagttatcaagggatgactatacacccaatactagcctggcctggtgcaatccattttctgtaatcccgttaccttaaagaatggcgctcttacccttgttttagccatgtgaacttatgcttaatgagactaaagaatttgcccaggccactcacctaataaatggcagaatcaacatccaaatccaggtccacttaaaatcccttgttcttgaacccatatgaatgaaattaatatggagaataccttccacattgtagacacactgcaagctgaagtgagaccagggaatcagaagtgacattgtcactggcctctttggtttagcatcctggggtcttttatcttggctacatctgtcccccgcatcccttgactgtactctaattttagaaatatagttcctgaagtaaagatattgaggaataggtatctgctgctcttgtttcctagttctataaagctaattcccatataaaccacatctaatggtagcatcattggttacaggaggtgaggcaagaaaggaggcacgttccaacttaacatcttaatctaagagcataaaattattacctgtggtctctggaattatacaccaatttccaccaccactttaatttctttttcctttttcagtcccctctttctgctactcagatgattgaaaagtgataaaaagttggtagaagtcataagattttctatggggtcttctgtcgagtcaggcattaaaaatgtgtcttacattgatgaaaaactatatgtgatgcttaaactctgtatcttccaaggaataaaagaaacatctgggctgggtgcggtggctcacgcctgtaatcccagcactttgggaggccgaggtgggtggatcacaaggtcaggagatcgagaccatcctggctaacacggtgaaaccccatctctactaaaaatacaaaaaaaaattagccgggcatggtggcgggcacctgtagtcccagctactcgggaggctgaggcaggagaatggcatgaacccaggaggcggagtttgcagtgagccgagatcgtgccattgcactccagcctgggtgacagagtgagactccgtctcaaaaaaaaaaaaaaaaaagaaaagaaaagaaacatctgaaagatgtgaaagaccatgctacaatttttttttttaaatcttggatctatacttttgtgatcagaaacttttctgaataatggatggatctactaatggaaattgtatttctagtggtaaaactgagtttgatgaagactacatccttaggaggctgaggggggaggattacttgaggccaggagtttgaggccagcctgggcaacacagcaataccctgtctctacaaagtttttttaaaaaaaataaaatgtaaaaactttaaaatatttttaagattacatctcactaaaaagtgcaccttgctttagtgctgggtacagtataaaacagtgtggcccatttggacagtagtttagaataaaaatttaaaagtcttaataactcatgtctgacacatgctacctctgggactccatcctaagaaaataattctaagtagaaagaggcttttgtacaaacatttttcaaagcagaatatttttcatactgaataatgttgtgaacctaagtatcaaagaagggtgaatggtgaatggttgagggagtctttttttttttttttagatagagtctcactctatcacccaggctggagtgcagtggtgcaatgatctttgctcactgcagcctctgcctcccgggttcaagtgattctcctgtctcagcctcctgagtagctgggattacagtcatgtgccaccatgcctggctaattttgtatttttagtagagatggggtttctccatattggtcaggctggtctagaactcccaatctcaggtgatcctcccaccttggcctcccaaagtgctgcgattactggcatgagccatcacgcccggccaaaatatatttttaaaagtataaaaactgtgtgtgtgtgtgtgtgtgtgtgtgtgtgtgtgtgtgtgtgtgtgtataagagatgaggtctcactttgttgcccaggctggtctcaaactcctgggctcaagtgatgctcccaccatgccctcccaaagtgttgggatttacaggcatgagccacggcacctggccttttaaaaaaatatatattttttgctttttcatttttttatgtttaatattggatgaaatgcaatatgttatgattgtagctctggaagtaaactttatatacttaagaacatttctagaaaaaatagaaacatcatactctcaaggattgtgtttcagttgtacaggtaaataaatgtacacatttatttacgtgtatttttaattcccataattccacacaagaagcaggatccctggtatcactaaaaattaaagtggatgtcattcgagaccagcctggccaatatggtgaaactccatctctactaaaaatacaaaaattagccaggcatgatggcgggtgcctgtagtcccagctacttgggaggctagggtagaagaatcgcttgaacctggaaggcagaggttgcagtgagctgggatcgtgccactgcactccagcctgggcatcacagtgagactcagtctcaaaaaaaaaaaaaaaaaaaaattacagtgaatgtcaataactggcttccaaatatttaactccacctcatgtctattgtgcctatatccagaatttggttttcctttcccaatctgcaaattgtgactagaccatagtaacatcagggatcttaagtcagtcttaacccagacaagaggcaggtagaacaaattaacttcggaaaatttggaaatgaaaatgggttctctctactccaactcccctgtgtcttctctggcaagtccaggtagagagcgcattgaatagggagaaactgctcccttctcctgagaggtcgaaataatttttttaaagaataggttaagccggacgcggtggctcatgcctataatcccagcactttgggaggccaaggcaggcagatcacctgaggtcaggagttcaagaccagcctgaccaatatggtgaaacgccatctctactaaaaatacaaaaaattagctgggcgtggtggcgggtgcctgtaatcccagcaactcgggaggctgaggcaggagaaccgcttgaatgcaggaggcggaggttgcaatgagccgagatcatgccattgctctccagcttgggcaacaagagcgaaactccgcctcaaaaaaaaaaaaaaaaaaaaggaaaaaaagaaaaaaaaagtaggttaaaaggaatatcacatgaaaaactatgttactttgtatatatcatgtatataagaaatacatagaagaggccaggcatggtgtctcgtacctgtaatcccagcactttgggaggctgaggcgggcagatcacccaaggtcaggggttcgagaccagcttggccaacacagtgaaaccctgtctcttctaaaaatacaaaaaattagctgggcgtggtggctcacgcctataatccaagctactcgggaggctgaagcaggagaatcaattgaactccagaggaggaggttgcagtgagctgaaattgcaccactgcactccagcctgggctacaaagtaagactctgtaaaaaaaaaaaaaaaagaaaagaagaaaaaaagaaagaaagaaatatatagaagcaatccacttgcccataatgggaaagaaatacaataccacttagaacaataccattttcaccatttctgagcttacctgtttctttcatcttgtggataaataggtattagctaaagagagaataaatgcttatctgtaaattcttttggtttgatttgtttttttcttttttttgagacagggactgactttgtcccccgggctggagtgcagtcgcgtgatcatggctcactgcagcatagaccccctgggcttaagtgatcctcttgccttagcctcccaagttgttgggagtataggtgcctgccaccacacctagcctaatttttgtttttgatttttagtgagaagaggtcttgctatgttgcccaggctgatcttgaactcctagggtcaagcaatcctcttgccttggcctcacaaaatgctgggattacaggcatgagccaccactcctggccctttatctgtaaaatttcaaagcatcaaataaggaaagagatcttaattaatatctttagtagctgaacaaactcaagtaggagaaataatagaagaaaaagtcattgctttcataattcgttgcagccatgaatgagagttgctatagttgtagcatattttccccggctcttttctcattcaatgattgtacctttcggaattatgtctttaatgattaattaattaaagtagatgtttggggtagcaaggcagtgactaagtcctttccactgaaacggaagaactggggattttattcatgtttgtgtttcctgatttacagttgctacaagcgccaatgttgaaaacacatatttccgtggctcttcttcaccttcattacttgtagtgctttcaaagagaacaatggcctttttctagttcagaaatgggtgttatgtagctcacagctgggagatttcaagtgttttgaatacgaacaagctgttttgtgataaagaaccagtgcagaggggaaaccaacaatgattacagtagttattcagtatgtctttgtgtttgagggaaaaaggagggacagtgttgttttgctcttatttttttccctcttccttttcccactttagacaaagcccgttgcatttgcggttcggacaaatgtcagctacagtgcggcccatgaagatgatgttccagtgcctggcatggccatctcattcgaagcaaaagattttctgcatgttaaggaagtaaggagaataatttcattttctaacagcatgatgtttcaccttgacataccatttcttatttcctattcatatgccgtttctgtgaagtagcattgcacatcgctgcagttgtataacacacataactaaatcaatggctctcaacctctgctaatataaatataccttttaaagtggaaagaagtcacaggcctcttgcaataacttcagcgctccctggggctctgtggcccagaaattgggaactgctagagtagatgatccttttttatgcttaacctatacttttttttaatgtttcaccttgactaggtgtagtttttcctgatgcctgaagtctaggcatctggggagggtttaataataatatctagaattcatgactcttctctctgctgacagtgtctcaatacaaactactgatgacctttttcctccttaaatgctaaatttctgcagtgggtgagagaatggtaagaattgacaccaataaggcaacaaagaggtatcaggaaaagtccttttcctacatgctaaatgtctccaccttctagtgagcaatgacacaacctgcaaattggaaactttcatccttaattaaggtttgtttggagtcaacatttatcaaatgcctgccttgtggagcactgtgtaaactgaccagaaatttcccctgtagaatattctcagtgtgtgatcctgaggtttttcttggacctgaaggaatttatacttggagctcttccatctagggtatatataatatgtcataggaagtatgtgtaaatcgaaactcttcactgcactaaaggctgtcagcaaaggagttgataactgccgattaaaagaacctagggctgggcccggtggctcatgcctgtaatcccaacactttgggaggccaaggtgggcggatcacaaggtcaggagatgaagaccatcctggccaacatggtgaaccccgtctccactaaaaatacaaaaattatctgggtgtagtggcacatgcctgtaatctcagctactcgagaggctgaggcagaagaatagcttgaaccagcgagtcggaggttgcagtgagccgagattgcgccactgcacccgagcctggcgacagagtgagattctgtctcaaagaaaaaaaaaaaaaaaaaaaaaagaacctagaagcctgggtactatggctcatgcctgtaatccaagcactaagaacctagaagcctgggtactatggctcatgcttccaagcattttggaaggccgaggaaggcagatctcttgagcccaggagaccagcctgggcaacagggtaaaaccccatctctaaaaaaaaaaaaaaaaaaaaaattaacctggtgtggtagcatacaccggtagtcctagctactcaggaggccagtggattgattgagcctggaaattcaagacaggagtgagccaggatcatgtcactgcactccagcctgggcgacagagcaagaccctgtcttgattaaaaatagaagagcctagagaatttagagcctaccattttggtaacctctgaaaagagatgtcaaatactggctaggtgggaacaatagaaaaagttatcagctgtgcctagaatctcactttacaccaggaagttagattattatgaggtctcttcttgatgattgatgctgaaagggggatctttccaccatgaaaggaaaagaaaaacagaatgtatattcttcttcgacgtgttcaaggacagatttattcaatcgaggaaaaagaaggcaaatcacaaagatttaagatacatattccacctgcaagacataaattgtcaacatcacacaagtagagaaatcatctgtgaacatcgcattgtatatttataaaactgtttgcacaaaggtaaattgtcctgtgacatgaaatatttaaggtacacttcaatatttatctctttctctcaataattccaattggtctgattatataaggggaagatttctgtaacagtacttcctaaagatctcttggtaggatgggctgttattctttgaacccagagagcttatccctactcatggtgacagcagctgctgcaagggaattcagcctggtcctacggcagcaccaggacagacaaggaacgcagagcctttgatagattgctgaggacgctaaatgcatttcttacatgtgaaacccatgagccgaagggtttcttgaatgataatatttaaggcatagttaatggtcattgccatatttctctcgactgaaaatagtgtggaagaacaaggatttgaccttctgtgcactgatttttaatgcttttgattttgtgtttagaaatttaacaatgactggtggatagggcgattggtaaaagaaggctgtgaaatcggattcattccaagcccagtcaaactagaaaacatgaggctgcagcatgaacagagagccaagcaagggaaattctactccaggtatgagacagatgtcaagtgtttgcataaaacttagattataccactatctgtgtactgttgtctgctgtattctgtatcctttattatgtattaacaaggaggctggtaatatggtttattgatagcatcacaaatcttgcattttcctgcatttaaaaaacttcagtccagcacctgattttcaccctatttgggaaagtgtcaaattattatcattaatgaaaagagctaaggtcatagagtattaaattcaggctccagggcagaggaaaatctgaaaccttaatcatttactgaaaaatagtctggcacatcatagccctggtgactaatcccactgtctgtagctgcctggtatggctgggagatgtttgagagatgacattctcagacatcatcaggcagtggcagctcttgtcatccgttagtttcattttcacctgagaaactcaattttcagttctacccactgttaagcacttaaagagaagcgaagtatgaaacaagttaaaactgcctgtgcagatggcaattagatgagttatgtaagaagctggggctgaataatccctcctaggatttgtgaggttgtctgtccctctctgaaagaatcactagaaaggcttctcgtagatgtactgaattttccatggaatcgtatgcagacgggtctaaggacgcagcatgcctctcccaatgtgaaaggatgggacatgggcaaggcctttcttaaatacgaatcgctggatttctcttttctccatcttacatcttatttgtttatctaagatgcaaatccctttgtcagtgataatactttactgtgagcaagtatttttttcaagcgtcagcagatgagtgaaacagaatatgctttgtggtttggaacacccatcctcattaactggcttttcataattgtcaagttcatttagttcagacggattcctctgtgttttgagacctccaccccagaattgactttcattaattcctgggttattgagagcactcagatggtgagatgcattcagtcatataaaagtagaggcatgcataaaaaagaacaaagattggccgggcatggtggctcatgcctgtaatcccagcactgggaggccgaggcagacagatcacctgaggtcaggagttcaagacgagcctggccaacatggtgaaaccccatctctactaaaaatccaaaaattagctgggcatggtggcgggagcctgtaatcctagctactcgggaggctgaggcaggagaattacttgaatctgggaggtggaagttgcagtgagcccagattcgtgccactgcattccagcctgggcgacagagtgagactctatctcaaaaaaaaaagaacaagatcatgtcttttgcagcaacatggatggagccggaggccattatcccaagcaaactaacacaggaatagaaaaccaaatacgggggccacgtgcggtggctcacacctgtaatcccagcactttgggaggctgaggcgggcatatcacaaggttaagagattgagaccatcctgggcaacattgtgaaaccccgtctctactaaaaaaaaaaaaaaattagctgggtatggtggtgtgtgcctatagtcccagctacttgagaagctgaggcagagaatcacttcgaacccgggaggcagaggttgaagtgagccaagatcgcaccattgcactccagcctggcgacagagcaagactccatctcaaaaaaaaaaaaaaaaaaaaaaaaaaaaaaaaaaaccgcatgtttttacttataagtgagagctaaacattgagaacatacaccaggaagggaacataagacactggggactacttgagggtggaggatgggaggagggtgaggatcagaaaaaccacctcctggggcattatgttcattatctgggtgacaaaataatctgtacaccaaacccctgtgacatgcagtttacctgtgtaacaaacctggacatgtaccccgaaactaaaagtaaaaaaagaaaaaaaagttgcctgtaaagataaccctcttaggattaaaatactttactctgaattaagttatcattatcattagcagcagtaaattattcattagaccaacatacatataatgcatattttgatatgcaatattaaatattaaacttttgttgaaaatgcatttcttaatgagaaaaaaaagtaaagacatgcagatgaacagcgcatgtgcattctgcctgcagggtgtttgaagacccgataggattctttcaatccttaatgttccattggccttattttgtgttttcctaccctctgtattgaaaatggtatcataatactagctaatgaaaccttatggccaagcacggtggctcatgcctgtaatcccagcactttgggaggccaaagcaggtggatcgcttgaggccaggagttcgagaccagcctggtcaatatggtgaaaccctgtctctaccaaaagtatgaaactagctgggtgtggtggtgcacacctgtaaccccagctacttgggagcctgaggtatgagaatcacttcaacttggaaggcggaggttgcagtgagccgagatcatgttccaacttgggcgtcagtgaaactctgtctgaaaaaacaaacaaaaaaaagaaccaccttatatggaaacattttgttttaatagggtgtagacattgctcctgtcaactaggtagtatatcgtttgttgaggtttgaagttatcccagctgggggtgttttgtttttagttaggacaattcagcatttttcagaattttcttgtcaaatgacttgagaaaggggttccaagatgaaataaattaaggatagttctaggtaatagaaagttacttcaggatttttttatagccttttaatgtcatcatgtacactgtgaatctctggtggaatgggaatttttttaagtatagtatttactaaaattgctttctcataaaaactcccctggctcatgtcttaggaatagtgttttgtagaatacattttggaaaatttgggatggatttttgcagaggcaggcttgtgtgtctttctttgcctcttcatatagaaactgagaaatgagaacaacttcaaagggagtagaaatctttcccaaaattgtttgagaaatgtagtctcctgtgtctcccaaatgggcttgcctaggctaacattagtgctccactcatctttgtaaggacctgtgggagcagtgggtattagatcttacaggtcacagatgagaaaacaggttaagagaagttagggaacttgatcgaggtcgcagagctagtaagcgtcagaaccaagatggtagcctgacctccacgctgtacagacttccatgctgcactgcagattaaggagccaggtcttgcctggcacagcaagcccaggacagatggttattgccatctgttattatttactttattagatatgttgttttgctcttgcatttttttcccttaggactctgagttatccgtatttgagggaatgtaacatctcagaacttactccagagaactagattaccttttcttacagccatatatcttttcctttgattttcttcattttattttggcccaagattttgcctaagtatgtgaaaatacttttacttgctttcataggtttttacatttctctccttttgtgtgtgtgtgtgcgtgtgtgtgagacagagcctcgctctgtcacccaggctggagtgcagtggcgcagtctcgactcactgcaacctccgcctccccggttcaagcgattctcctgcttcagcctcccaagtagctgggactacaggcatgcaccaccacgcccagctaatttttgtatttttagtagagacagggtttcactgtgttggccaggctggtctcaaactcccaaccttaggtgatccacccaccttggcctaccagagtgttgggattacaggcgtgagccaccgtgcccggcctctcctaacattttaaatgtagttttgttttgaggacataaccagaatccggcagtctttaaaaactctgatacagaaattataaaaattgacagaactcaatggaaatggaattggggtaccgttcaagaacttggcattttaatagaattaaaagtcaaggacaaatctgcatcctggtcattgtcaccatttgcagcatttgtcacaattttacataaataatattttggctgttactaaaattcaaagggaatataaaacccatgaacttaaactgaaattagacttaatacttcagaaaaaaaaaaaaaacttctggggaaaaaaatgttttggtcttggtaataggtccttgtataactgccagaaactgcttctatagatatcacttgtcattaatttcacatactgtctgatgcccttattaaatgtatttgagtatctcttaagaaccttaaaaagatatacagccctcctgctaattgcctaataaagtttttgatgtttatgcattaaaatgctagaacagtagcaataacattcagcctgttactgatactttaataaaacttttatttccatattaatatttacgtaagtaaatattgccctttgatgcataaacactgtagcaaattctttcaactagaccctggctcggccataataataaacattaggcagtgagatcattttgcccaaatgtaaaatgttcttcttatcttcatctgagagaggggtcattcggtaacacgttatttagcatgctagtaggctggtgaaaaacacaaatgctgttgttctaatattaactccaatgtttctgagacactgcagtatatcatatcaaactttcaaatttggtagttcggaaatgtatgatcttcaaattattcctaaattaaccacgtttcattctccacgtgagtcacgcttgagaagtattctgggtactatctgatggctacatcatatcatattctgtttagtcatgtttcttcgtgtgtccgttagtggttggcaagttttcatatggctctgttgttctttgatagattgctcatgaaagcgtgagtgctttcaatcttagtgtactattaataaaataagcctaaaacagaggagctgaaaccaaacaagaaggaaatattaatcttgggtgttagccttaaggttctgtgcatcgcctctgagggtctctaaaataaaaagcaaaataaatctgtgctatttcactgtctgtgatctgggcaagtaacttgggggctgcagaaattacactggttctcttccattctctcaggtccttttaaaattaaaccttgaatttgaaatcagagaccatcatgtggctatttcaagtactccaggaatctccactgggaaatattgttttcctccttaaatgaaagataaatttaaagttgaataaaaccataatgaattatgtttactgaataatataaatgtttgaggatgcgaaataagtgtcagatttaatagaaatttttgctttactccagtaaatcaggaggaaattcatcatccagtttgggtgacatagtacctagttccagaaaatcaacacctccatcatctggtaagtaggtgataaatgctgaataatacatactgcatttcatgctttccccagctctatccagttttgtgaatttacgtatacactgaatcactatgttaaccctacagatgttaaaaggaatcagaagtgagcatgcccttttggagttacaaacaatatggggaaatgtttttttctggctggaaaaagaagtatgtcaaagtgtttacattgctgtagatgatcaaagtgattaatgtatttatttatttatttatttatttttttgagacagagtctcactctattgcccacgctggagtgcagtggcatgatcgcagctcactgcgcctctgcctccagggctcaagtgatccccccacctccgcttcccaagtagctgggactacaggtgcacaccaccatgcccggctaatttttgtattttttgtagagatggagtttcaccatgttgcccaggctggtctcgaactcctgagttcaagcgatccacctgccttaggctcccaaagtgctgggtttacagatgtaagccactgcacccagccatattaacctttaatccctagttcctgcgatggtgcttgtcatgggcagtaaatgggtgaatacttgccaacaaccatagcacaatgtgagatataaccttaacattaaacagaaggataaaaactttagaaaggtaaggaacagagggtaaagtgaagatagaggattggcctgttgtgggctctaccagaaaagttctgtggaagacacagacaagaagtatagaaaaaagatgaaaatgtgtgtgggaacagtaactactgttttctttccaaagcagtgggttcatcctaatggttgctggataaaataaagcacacctacttaaatttgaatttcagataaacaataatttactagtttaagtacatattgcatggggcatacttacactaaaaatgtatggaacatacttatgctaaaacattgttttaaattcaaatttaactgcatttatatttgctaaatctgggaactctcctattctgtgtagaacatggaattctatatagacaggagactaatgatttgaattgcaaaaaaaagcacatgatcagtatcttagtttgctaagagaattgttattgggaatcagagtaagactgtaaaggttgactgccagggtgtttcagcaaaatgatactgtgtgtgatttctagaaagctggaaatgggaagagataaaaaacagagagttgtacaactatgcagaaatcaaagaactagtcacacagtgactgatgtgctttaaggacaggatttctctattactaataatcagcttcattcctgaatggtggtggcctttagagaccaatcaaggacttcttagcaaaaactataggattttttttttttaagagaaggggtttcactatgttgcccaggctgttcttgaaactcctgggttcaagggatcctcctcctcagcctcccaaactgttgggatgacaggcatgagccaccatgcccagccattggcaaactaagatactgatcatgggctttttttgcaattcaaaccattgttctgtttatatagaattccaagttctacacagaatataggactttcaagtgagcaaaatctgagcacaataaatgaattgctttaggaagcaaattaatttcaaaaactatctacttataacttgaagcaagcaattctaagatgctcaaaattaagtaaaatagtatgcatgaaatgaaaatgaaaggccctgtaggtattatgtgaaacttataccttcccttgataattacggagcccctgaatccacagaggaagggaggcctatcctgttccttctcaaatgtgtgaagttgcagggattcctatataaaccttacactcttatatatctcaaagatgatttcagtgatttctagggactgctactaggctcttaaagtggaaaaagactatgtcaccttgcgataaagcagcagttctgcctgcaaatgtcagcctcacttctttctatataccagaaaaattcttccattccctccagccatattgtagccctccagtggttttggcaacacagatgctccccaacttatgatagagttacacttcactaaacccatcataaatagaaaatatggtaactcaaaatgtacttaacacgtggacagacccagtaaaaagtctgacgtcaaaccatcgtaaagttcagaccttgacttatgataaggttatgtcctgaaaaatttgtaataaacttgcacaatcttaagttgaaccagtgtatgtcaaggaccgtctgtatagtgaaaggaggtgctgcattttgaagaacaagttagtatacatgtaaaataacattccattttgtaggcagatgtttgacattactaaaagtaaagttccatgaagagtgtaatatttaaaaaggtgatttaaatgttcaccaaggttttgtagagatacaccaactttcaagtgacttttctggtgactgagtcacttggagctataaccaactacaaaatgtataataagcatattaggactctgagacaatttttatatcaatagctcaactgatttaaaggaaaacttcagaaagctcgaaagagaagttctcccaatccacctccaggcacaactgctccaactatcaagtgtggatgggtctgtaatgatcattttcatcgtttccaaaggtctcatctattattctcctcactcattgccagaccaaagaatataagtatctgcctaaagtatatatgcttggatgctgtcaagaacttggaaaatttcccacttgacatctgggcattggtgtcatagccagttgcagaatacatacatcgcacccacacacacgtgtgtacatatgtgtcaagcccaagctctgcttaacttgacccaaacctttaacaccaaaacttaaatttcaaaaaattgttctcggtgccatggtcacgcctgtaatcccagcactttgggaggctgaggcaggaggatcacttgagcccaggagttcaagaccagcctggacaatgtaagtgagaccccgtttctaaaaaattagctgggtatggtggtgtgcacctatagtcccagctacttgggaggctgaggtaggaggttcactcgagtccaggaggttgaggctgcactgagccatgattatgtcactgcactccagcctgggccacagagggagaccctgtctcaaataaataaataaacaaacaaacagaaaaaatgttcccaaggctctctatcactaataataatatatgcatgctagtgaggaagaatgagacttttcaaatatatgaaagcagttctttccaagtaaatactaatgtttgctaaagcatggaaatataagtatgaaatttaaaaagagtaacatttctcattaaaaggagaaccatctgagtctaataaaatacatgtagctgaacagatttgaaaatgcttcttaactgccttggtaagtttctttaatatgttttgaaagtgaccacatgtttcagaattctacgtatttcaaaatgaactcagatgtttttagacctgagttaaccaaatgtcagaactagtacattatagaaagttctcaatttgggatatccagccctcatgtccagatacaggtaaatttcaaacctgactcaggctatgtgtgtggaaagccaaacacctgggcaacgttgcagccaaagatgtatacgtttccactctttctttgtttttttttgagatggagtctcactgtcacccaggctggagtgcagtggcacaatctcagctcactgaagcctccatctcccaggttcaagtgattctcccacctcagcgtcccaagtagctgggattacaggcaccggccaccacacctggctaatctttgtattgttagtagagacaggattttaccatgttggccaggttggcctcgaattcctgacctcaagtgatccacccaccatggcttcccaaactgctgggattacaggcatgagccaccatgcccagcctcactcttattttaaaaaacaaaaatacaactgatgatcacagcaggctagattcaatgggcaaatcacaaaattcaactcatgaacttgactgtccaagggtcctgtaaattctgacatccaactggttatcttcattttaggagagccctcaaagggtactatcccttgaatgtggtctttatgagcccaataaaagatgagaaagataaaacctgtgggaatttaccaccagcaaggaaactcttgattttggttaacatgtattgtaggaataatgaattcctgacgcagattttgtccttcatatccaggaaagcgctgacaacatgctgcttgagttgagattcaaggaaaaacatttctgaagagttttctgagactcttgcctggcttatgccattcaataagccccataaggaaactttcctatatgagcaaaggattagctataggatggtataaaagtcagcactggataaagccctaggcacattttatgttttctctacataccacatgttaaaccttttagcacatcagtatgcatagatggggcaaagaggaagacatacttactatattaggtctacgtaattaggactgaattaattccattattaccttttttttgatagaaaatcatacctcctgcattatgcaagcaatagctgattatttgtaatagtgtacaaacaatggcaggtattcactccatcacaggtttcctacctcaccaaatgaaaaggaataattaaataagagagcctagttttcaaaaggctgcttcatttaatattcataacaacttcaaaactgaaaaataatgtaatgcctgtcagatgatcttccatcctttgaaaaggttagaagaagctgctgtgagcagttcagcttgtgtatcccagggaatggtagctgtattgtaacaccaagttgtctgttatttcaaactggtaatttgttccttccttcaatctaaatgtactgtggtttttgttagagagctaacatgtataatatgatgctttcctgcagtgagtaaattttttttcttctccttgactgattcttaaccgtagaataattttctagctagtccagctctatgatgtcatcctgactcctgacatcaaggacatgaccccattgaggatgtgaagggaactgaaagagggcacccagattgagaagggacttcgcctggatgggcagtgtggtatagggacggttacagactcatttaggtgggcactgtggtatacggagggttatagactcacttacgcaggaggagtaggtctgaatcctgactgccaagtttttgccaagaacaagtcccttaaattttgagttttttaatcttaaaaataagagccttgaagttgatctttatttccatctctgactctgcagttgataaaattctgtagctatttcaattgcatgtggaaggattttgtaaaatttgaagtgagattatgcatctttttttcttgtaacactttttaagtactatattttcaggtggaacaatgggaaaagtaaatcatgtcaagcaacaaagctaaacctttcattttacagatgaggaaaccagtggcatatcctcttgggtcctcgtgcccttccactctgcctcttttgttaaacccagtggctttgcataagtcaccagaagtcttccaatgtcattttattagacagatttcactcggatatcttgggacccagtgttttcccattagtcttcatcagcctaaaatcatcttaatcctgtccttcctggagccctccctgaatcattggccttgtgtatgactcctttgcattgactggattgagaattttccattctctctttttctcaaatgtctgttgcaattttagggaaacttttcacactgtccttatttttacacaaaatctgcaaaaagaaaaatctttttttgcacattgtattgttggtgcaaatgtaattgcggtttcggaccatggattttaaatgataactaggcctaaatacatctttattaatcaaaataggaaacactacaatcaacacatttttgccaaggagaaataagtgtgtttattcctgtagcataaaactccatgctttgggattcggcaaactcttgaaaagcactttctgcatcctgctggttgtggaagaattttctctgcaaaaagttgtcaagatgcttgaagaaatggtagttggttggcaagaggtcatgtgaatatgatggatgaggcaaaacttcgtagcccaattcattcaacttttgaagcgccggttgtgtgatgtgcagccaggcgttgtcacggagaagaactgggccctttttgttgaccgacgccggctgcaggtgttgcagttttcgctgcatctcatcgatctgctgagcatacttctcagatgtgatgttttcgctgggattcagaaagctatagtggatcacaccggcagcagcccaccaaacagtgaccataaccttttttttttttttttttttggtgcaagtttggctttggagcttctcagtccaacagctgagctggttgtcagtggttgtcatataaaatccaattttcgtcccacgtcacaatccgactgagaaatggttcattgttgttgcacagaataagagaagatgcttccaaacaacaatttatttttgcttggctcatgaggcacctacttattgagttttttcacctttccgatttgcttcaaatgtagaaagaccatagaatggtcaatgttgaattcttcagcaacttctcgtgtagttgtaagagaatcagctttgattattgttcttgagtagtcgctgtcaacttccaatggtcagccactatgctcctcatcttcaagtccctcgtctcctttgcaaagcttcgtgaaccaccaccgcactgtacgttcattagcagttcctgggccaaatgcattgttgatattgcaagttgtctccactgctttacgacccattttgaactcgaataagaaagtcactcaaattcgctttttgtctgacatcatttccatagtctaaaataaacataaacagcaagtaataagtcattagcaaaaacgcataaagcgagaaatgcgcattaaaatgatatataacataaccacatttatttaagaatgtattccaatatcaaatggcaaattccaacagtgcaaaaaccgcaattacttttgcattcacctataataaaggttttcaaagtagttgtttgttatctcaaagctggtttaagatattgtaatgaagtcaaatgttctgtactgcacttttatacagttgatacagagaaaatcaacattatatttgaaactacagatttaaaatgtttctctgaaaatattcaagacgtctagcatgaaactgattcattcaagcaaacagattataagtgtatctttcagtttcattagatttgattaccttgcattcttaatgtgccttacctttaaatttaattttcttgcgtactgtgttgagcactcatgatagttttttttactatggttagttttatttgctttcattttattttctttataacctatttttcctctcctgtccacctgatttttgaattgtctgtatatagctatagacatagatgctactggcttagatgcagaagaaaatgatattccagcaaaccaccgctcccctaaacccagtgcaaacagtgtaacgtcaccccactccaaagagaaaagaatgcccttctttaagaaggtaacattaacttccaagctcccattgtccacctgctcaactgcactgcgtcacatttctagtcctgttgactgtctgcgtcctttgataagccaataacgtgcatgctctgttatttgtttcttttccatgctgctgtagctaagcagaagcagaaatcggtaagtttacattgacataagctgtgtttatcctgccactggcatcattagcattaattcccacagttgtattaaatacaatcatttctgtcccaagcaaagaacctatcaacagctaattgagttcatgcatttcaaaccaactaaattcagggagtgacctgttaaaacaccattacagtacttatcctttttgatggaataatatctaccaccaagggaatttgtttcaacattcagggatgtcaaacactgacagctccacataatgcacctaaattgtgcatgcttattctatctctttcttttatccagaaatttaacttatgatcaaacatattaaagcagttattaaattctgacttatgatatccagatacatagcttgtactaaaaaaaaaagtattcaagttttaatttagtcagtatttaaacttctaatccactaggtgcaaaatctgcagatgaacaagaccagtggaaaactgcaggcttgttttggcggtttactgtgagtttttcctattgtcatatataaatattctcccgatgttcttgccttctccatcagtcagattttaccatctcaccctttggacagtgcagccagtggtcatgcgtagagcctttgccattggccatccaagatgctacacagcgaggctccttgtcccctaaatggaaactatagggtattcctgagctctccttacttcagacaaagccttttcctcacccattttgtagctttaaagcattattttttaaggaccactaacctccccccaaatttccctttttttcccctcttttacccatcagtttccacagctaccatgctgtcttttagaatcatactaatgtcgccaagtctggcaaaaccatggatatattctcacacgcagatgtgatgtcaaatctgtctatcctctgcccccaaactctccacataatgaacacttttcctctgcaaacatgtattttggtttgtggaggaactcaagtcattaatgaggtgtcagatacagaactgtaaagttggctttttttgaatcaattatgattattttaataagggaaaacttcagcactctgggcaaaaattgcaacacttggatttttgtgttaacatagcctcagcttgatgttcacccacaacagtgggcccatttctggggtccgatcttcttgttacagctaaagcttgcagccaagtgactaacagtgtctatcattcagaagcttagaaaatcggcatcgctaagacatttgggccttgacggagcaggaatgtgagctaaaaccctgtttgtcaagataggtttgtgaagtttgcttacctttaaattctaaaactttaaaaacttttatcacaattttttcactaaataatttgagcaggcagggcgcaatggctcacacctgtaatcccagccctttaggaggctgaggcaggtgcatcacctgtggtcaggagttttgagaccagcctggccaacatggtgaaacctcatctctgctaaaaatacaaaaaattagcctggcatggtggcaggcacctgtaatcccagctacttgggaggctgtggcagaagaattgcttaaacccggaaggcggagattgcagtgagccgagaccatgccactgcactccggcctgggcaacagagctagataactctgtctcaaaaaaaagaaaaaaaaaatcaagctaaatggggttaacagggaagagtagataaaaatgatggcgtcattcttcatagggcacaaagcaccaatattccatcaaataaggtaatttctgtagctaccctattgattaagaagctgattgattaccagcaacgggtgaccctttgctagttggcagttacagatcgaaggaaccaaagacctatcaaacactgggccacttcagaattaaagtcttgagataaaatttcttggtagctgttactaaaatgcaggaaatttacattcataatttcaacggtggaaaaggtgttcttacaccgcatagttatcaggacttggcttctaaacgttttcagtatgatcccaggtggtataaatgaaatagtttaagaaatatgcttatgatgccttcggcactggtattcattcttcttatgttattgataatgtggttaacatcaatgtagaattcaaaaacaaaacaacagcctgagattcaatgagaagatcgttttctatgttttaggttgcttttagagtggtgcttgtgtggtacgtgtgctgtcactgtattatgtttgtcttgttttttttttttctgttcaaaactgtattctaccttgattgtgtcaattaaaattaattctgaatgctaggtgaaattttaggcagtgaaatttgacagcacagtcatggtaatatttttcttccctctgattatatcgtctgtgactacgggtaaaatctcagatggaagcttttgaatttgaaatgctttttaattctcccctgaggcaatgtgaattcaaatgaagccagaaaagtttgtaatgggcaattttaagcaacaataaaatgttcttgagtgacgggcagatgcaaaaatgacattcatatctgcacatcagtgtactgaattcttaaaatcatttacagaacatttttctgttggtgtgtgtgattctcaagttatattttttgacactccttagccagaaagattcatatagcaatgatttgcttatcgcagtgtctaaggccatatcactcttatgcatttttttaaaaagtcatttttgggtcaatttagcattttatgctatcaaaagagccaattttaatataaaccaatttgctgttacctaatttttggaaagatgttattttaccattttatttgaagcaattaacctgaaaagtgttgacagttttagaaattgctacaaaatttagctcctcccctcttattaaaaagaaataatttactgcagaaagatgtcattagttatctgacagaaaactacttttgagaatcatattagatatgcacattgataatgaaccttttgagaccacaatagcatggttgaatatattattatacattaatcaccttccctcgaagacacataaaccttacctttgaagtaccaaggtatagaaaccaaaaaattcaatagcattaatcactaagctgtgagcagggatcatgattactgtttactaaaataagcatgcatgttcatttaaactctcacaataatatagaattttgacagtagtgagagttacaatattttgagattaggtaaaaagtattggtagtgagagttataatattttgaaatgaggttttacacaggtaagacaaaaacctaagatgcaaaggtaatgcaatctttctttcctctgtaattaaccatgttaggtctaatcactacaactctttagaaaattcaaatgcagccgaaaagcaatattaacttctagtcaagcctaaagcacctatcttgcatgaggcatgtttctctttgttctgtcaactagtttttgttcaaaagcagcatctcttgctttaggaacgaataggtctgtagcatttcttgagatgagcaagaagactgtagacaacagtaacttgaaacttcaggaaaatgaacccaccaatctttgactgggtttatgtagaaaagaggcaagtggggaaaataaaatgtctggaaagccagtgcctcatattatggagttcagaaagagtaccttatacacaaaatatttatgttctacctgcctgtgaaacgtctaaaagcctctcctctctctgcagacagagcacactcctccgtatgatgtggtaccttccatgcgaccagtggtcctagtgggcccttctctgaagggctacgaggtgggtagcagccttccacaggaagcttaacttgcatgctgaacttctttgtgatgctgcctcctactcccgaccctctctctgaattttacagcttaaggagccaactttagagcttagagagctcacagcagcaaagcctgttgttctgcaaactggtatacactgcttcgtcctttttctgttttgtttacctggctgttgctttgaagatttctgctagctgcagtgtactcagtccaggaaatagtgtcaaatggagaccgactgaaaccacttgcaatgttatttgtcactaaaacatcatgataagttcagtttaattgtcattgcatcagaactcagaagcagaaaaatgcggcaacctcatattgccactctttccagatgcaaagctcaggttttcaagcattcctaagagaagtaaaattgttttatcatcgttagtaattttttttggtcatatcttaatttattgcttgctcaattgcaggtcacagatatgatgcaaaaagcgctgtttgattttttaaaacacagatttgaagggcggtgagtatttcagcatactgggttttgtggattttgtcttaaagatggcaaaacgctggtgggacatgcgtgtgattccaagagaaaatggccctctgatgtctatatgatgacaggaaacaagtttcactcaatttaatctgattcaatcaatatttatcatatttgcttggtacatctttaacccctgatgtctagttcctgtacctacatccataagctgaccttgggcaggacaccactggccagtctcaccctcaattcatggtcaactggccctctattgctgcccaggcatcgcactaaatatccctcttccattcacttttccactcttctaaaagacttctgtgccatctccccctccttaatcctctgataaccccttctcatctcacgctcccccagtgaacttgcttccgtgtcattgagaaaatagaggcaaacagagaacatccaggcatttctacaaccccgcctgtggagttgcatgtttgcctgcatgctctgctttatctccaatgactatgttcccagcaagggccaacccaccatgtgggcactagatctcattccccatcccctctctgctagaagtatccatacagagccgtaatcatcctttgctctctcctcatgagtatttcctgttctaatggaaactccatcaccatgtaaaaatgttaattcctatcacattgacctcatattgctctaggtgtctcatttttttttcttttctttacaggaagattccttgaaagaattgagtgtactggctttccttccactttcttcagcctaccccagttatgttttcacccacaccactcagctaaactagtcatgtcaagatcacccatgaccttcacattgctaaatccagggataaattttcagccctaatcttacttgaccatgagcagtagttgacatggtggattattccatcctctttgaaatactttgcttggtttctggaaccacacttttctggttttccttctatcacactgactgctcctttgtctcctttgctgatacttcctcatcaactggaaatcttggacagcccagggctaagctctatgatgtcttttacctacatttctttagtgatttcattcagcatcagatttttaaattccattcctttgccagtctttcctctaaattctagacccatgtatacaattgcctattcattatcactactaagatgtctaatggacttttcaaatgtaacctcccccaaaacttactcctcccatggtcttccctatctcaattaatagcttcttcgtctttcagtcccgagacccttcagcccagatcattttccttgactgttctttctctcttatatttcacatgcaaatgctgttgtctttatcttcaaaatatattcagaatcgaagcccttctcacacatcctctgccaccattttggtctgagacatcttcatctcttccctggattggtgcaacagcctcccaccttgtctccttgcttctgtggttgttcccttaaagcctgtgctcaggttagctgctgcatgaccctgttaagatgtgagctagtgcccaccactcctttactcaaaaccatccagtgacttctttttttcctctgaatggaaaccaaagtcctacagtggcctacatgacctcctatggtctattcttccacacgtccttacctagattttctcttgctgctcttccctcgctcattctcaccctgccgtacttactcccttgctgttctttgagtgttccagacagattacacaatcacctcagggctttggcactttgcagttccttctgctaggaacacttttccctcagatattctccttggtatacgtgtgtacatgtatgcacacatacacatgcacacatttgttctgtgtctctcctttccctctgttttctagtgctcttttatgtatttccagtactatttttgtttattgtcattctcccataattagacgataaactccatgagggcagggtttgagaatgttttgtgaactgttgtattctcagtgcctggagcagtactcaacatgagcagtggccagatgaattttgaatgaacgtctgctgcatactctctgctagagaaatgcggagatggtgaagccagtctctgcctatgaacagctctcatggaaaccataaattgaaacctgtagcagtaacactgcatataagtaaaagggcaacttggttatatgcatgcacaaggtgcaggtagcataaagggaggcgtaattaacaccaacttcaggacatccacacctggaagaatttttaaatggtgcctaacgtttgaccaaatggattacagggaagagaagggtatgttcagcagatggtatatagtgtgtgaaggctttgaggtatgacacagcattatgtgtaaggcaactcacacccacatcttaaaggacatgggcaaggagtgactggtaacaaatccaagggtcatatctagtgtgtcacgccaatgggcttggacttaatcctttctttctcctcctcttcccccggtcactattcaacttgcctcagtaagtatttattgagtatattctatgtgccaggcattgtgaggagcaaaaatagacaagggccttggctttgtggggcttaaagtctattgaaaggcagtcttgaatcaaataattaatgggtgccatcattgaatgttaagccagctcctgaagcatcaaagacatgactagagtccaaaatggaaacctcagagtttaagagtaggttattacaggggacctggaagatacagggctagtgtatatttctgtatttttaaccagataaatgcagtgcttctcttctccacattcctttcctcctcccatcctaacaatgcaactacaatagatcaggagtcccaaatccccgggtcacagatcagtactggtccatggcctgctaggggccacacagcagacggtgagtggcaggggagtgtgcaaagcttcatctgtatttacagtcactcctcatcactcacacattattgcctgagctcagcctcttgtcagatcagcagcggcattagattctcataggagcacaaactctactgtgaactctgcatgcgagggatctaggttacatgctccttaggacagtctaatgcctggtgttctttcactgtctcccatcaaccccataaaggaccatctagttgcaggaaaacaagctcagggatcccactgattctacattatggtgagttgtataatcacttcattatatattccagtgtaataataatagaaagaaagtacacaataaatgtaatgtgcctgaatcatctcaaaaccatctccccactcctaccaaaccggtccacggaaaagttgtctttaatgaaactggtccctggtgccaaaaaggttggggactgctgcaatagatagtatttgttggtttcaggattcttttagatttcttactatagtactttctttctagaccacacctactactacaaccatttctaatttatattgacttttggcaggggaggcaagggtaggaaggaaagttttataggaggacaagtctttttagtaagtgatcaagcaggctgggcttggtggctcctgcctgtaatcccagcactttgggaggccgaggcgggtggataatgaggtcaagtgttcgagaccggcttcgccaacatggtgaaacctcgtctctactaaagataagaaaattagctgggcatgttggcgggtgcctgcagtcccagctactcgaaaagctgaggcaggagaattgcttgaacccgggaggcagacgttgcagtgagccgagatcgtgccactgccctccagcctgggaaacagagtgagactctgtctcaaaaaaaaaaaaaaaaaaaaaaaaaaaaaaaaaaaagtgatcaggcaaagaactgaaaggagagagaatgaggaaaacaaaaactattataagtttcaaggtatgaaaagactttataatcaaggtcttctaaccaaatattcctaattagatttttttaattttccatatctttaagaaatatttttcagtttgtgacaggaaatagaccctttagcttggaccaaggctactaggcactggccaagtataaaaggcatagctctactctgctccatttagcttgtttctttatccttggctctgtcatttatcacaatttggaattgtcaacatgagcctgaacactaaaaaaaattctgctaacaaaggcactgtgttttccatgcctgagtcaacccactgccctttcctaaatgccaaagatggggaaatgggatggaatttcctggattactacttgtacttaaacctgagtaagttttgaatttggaagacacattccagccagagagggtggattttggacccatgttcgagtgtatcagccacccagattggttttatttaagaaacagataaacaaaatatcttaaagtatctgttatttctagccagaagtaactttcatatggtttaattaatagacctgccttggctcatcttgacttacagagctggggttctatattctagccctgttctccccagttaacagtcctcagaggaagaaacgagtccataaggcagaatttaaaagctgtgtacaaatttaacatttttacccatggcaagacatctagagtaactgaattattgactgtctttgcttttggcaaggcaagacagcaatagaggatggaaattcaacaaaagtatcaggtgtgtatatacatatgacattctaaaagggaaaaatgaattattccttaatcatctattaaataagctaagtttattttttaaaaacgtttaagcccaagaggagaaaatatgaaaggaaatgttagttatgcgaaaggttctaggtagtcaagaattcctttttcttttctgaaacccacttaaattcatttgcagcagccctagggggttgtcagaatcacattctggttaagtagtgtcagtgtgtcagatcaaagaagaaataaatcatcctcctcctcctcctgttgtgtgcaataaagtagcccattcaaaactggattcacagtaaccaactgtgtcatgtaaacaaagcaatcttcagattcaccttgtaggatggtgacaggtaaattaacaaggaagttgagaacaagaaggaaagctacctgggataaattcacggttttttttttttgtttttttgttttgttttgtttccttcagtgactttcaaaacgtcagcaatcagccctgaagtgtttggaatgcatactgaattgctacagggataaatataccattgccagaatcttctgtaggacagtcttactagaaatcagtaatcctgaggctgagcacagtggctgtcacctgtaatcccagcactttgggaggctgaggcaggcagatcacttgaggccaggagtttgagaccagcctggccaacatggtgatacctgtttctactaaaagtacaaaaattagctgggcacaatggtgggcacctgtaatcccagctactcaggaggctgaggcaggagaagcgcctgaacccaggaggcggagattgcagtaagccaagatcacaccattgcattctagcctgggtgacagagcaagactctatcttaaaaaaaaaaaaaaaaaaaaattgagcaaataaaaagttgtttatctcatggaaaccacgaggaaaatacacaagaaaaagtatagtaggctgggtgcagcagttcacacctgtaatcccagcactttaggaggctaagggaggaggactgcttgagctcagaagtttcagaccagcctgggcaacataatgaggccctgtttctactaaaaaaaaaaaaaaaaaattagctaggtgtggtggcatgcacctgtagtcccagctacttgggaggctgagccagggggatcacttgagcctgggaggttgaggctgcagtgagctatgattactacacccttgcactccagcctgggtgacagtgagatgctgtctaaaaaaaaaaaaaaaaaaaacacattatatgacatagttcattgactattatttacatagtttcaataaatattaaatatggagccagccaaaattaatttgtctatttgaatccctctgggacattctagcctgttgcagtgtagatctttctttctgtgctgggtgtcattctggaacattccgtgttatatgcttggggattcctttcacctttgttttgggttgaagctcctgtttcccagatcccttgatttctttcaagctttactgtcattttagtcaaaaaccttctcatttccctaggaagggtatatacatgtttttttcaatagcctgaatgtttacaaacctttctgtttaattgctagtttaaatgcttatggaattctgattgaaatagttttccctccaaattttgaaggctttttgcttcattaccttgtggcttccattgttgctttgagaagtacaaagcattctagtgctttgattctagaccctttgggacctgtctttttcctctgaaagcttatgggtttctctttgtccccagtgttatgaaattcataaaaatatgtcttggtgtgggtatttcaacccgtgtgccggaccctttcaattcagaaaatcagatccttaattctggaattaattctttattttctttcctctgtcttctttattatctttttctgaactcctgtaatttggaatttgaacctcttgggttatgtctacttttcttacttttcttctcctatcttccaactcttttttgttttaccctttggaaatgttacatttcttttaacctttcttttgctttttttctatttctattatcatgttacttccaaaagctcttattctaagtctttaaatagaaatttgttctagtctcatagataaaaccatcttttagcttttaactgtgaataattgtcataattgatttttctgtttgttttgctctctcatgaggttttctgaagatgcctgacaaactgtcctgtgctcaaattttaaaataaggcataaaataattaatcagaggttctgtgctcataggcggagcttgtcaactttgtgtttctgtgtatggcaatcttgctagataatttacacaggaaacctccaatatcattatctttgggtccttacaatttggcagtcagattccccagagaagaatcttccattctgacccctggggatataaatataagcctggctaccaaaactgtacaatgagaagaaaggctgaagactcaacattcagaatcctttcttttccatccagtattccctgctcctgttctgtctagggtcccctggtcagaggccctcttgtattgcctgcaagataacaaatgtagggtcttgtaccacacaggaaaagaactgtcacctggctatttgatattgtgagggggcagtggagggctgtaactgaaacagacttttgaaccaaacttttccttttcgccctaacttcattctctaccttctttagaaatattgtgagccttcaattttgcttcacagctttttcctactgctgacttgaatattcagctttctgcagtctaagtcatttgctatttccagttcccaaattttgttgctctcatttctaccttatctaaaatgatactcccaattcaatattgtctctcataataccctgtatgttctttccacaacaatcatcatctttaattattttcctttattatttatctctgccactagaccattagctatctgagggaagactggttcttatttatttttcatgcctatcacagcaatgaactatggcacagagactaggaatatagggtcaggagtctgggttcaaatcccagctctcccacttagttacatacatacccttggataaaaaatctctctgtgagtctcatttttcatcagcaacagtgggataatagtaaacgtttctcctagagctttttggatcatttagtaattcaaataaagtgctcagtacttatctgacacttgtaagcaacaagtaagtgcaacgtaaggcaggtgcaggatagggccgggcgcggtggctcacacctataatcccagcactttggaaggccgagggaggcggatcacttgaggccaggaattcaagaccagcttccatagtgaaaccccctctgtactgaaaatacaaaaattagccgggtgtggtggcacacacctgtagtcccagctactccagaggctgaggcaggagaatcacttgaacctgaaaggtggagattgcagtgagccgagaacgcaccactgcattgcagcctgggcagcctgggcgagactctgtctcaaaacaaacaaaaaacaaagtaaggcaggtgcaagataaaaatgaataagtaaaaagaaaaaaaatgaataagtaagtatcctaacacatatggtttgaaaatatggttgctatatatatttcatacttagatgaatttggggcatacacttctatcccctttgattagaccaataaccttaaggtcttctgtgactttttcctccaacaggatatccatcacaagggtcaccgctgacatctcgcttgccaaacgctcggtattaaacaatcccagtaagcacgcaataatagaaagatccaacacaaggtcaagcttaggtaagtctgtgcaatgagcttaagctttttaaactctcctctcccgatgttgatgatgagaagacctaacaagatgataattccatgtgtcacagagtatagaaaaaacaggtgtgtgctgccagtcgctgttgctatggtcttactgatttcatggtgtggaaggatttgttatgatagtttcaagttaagaattccacaggctgtcagcattaatgttttggttgtggtttgttttcactaacatgagctttggtgtctgcagactctaagatctcctggctttgcatcagtgttaccatgagcaagtttattaaccttttgaagcctccatttcctcatcctaaaaaagaaataaaataactacctcatagaatcattgcaaggattaaacatgatatgtgctcaataaatgatatccattattatcctaaatattccttaattccagttatatatcaataatgaaatcattctcaggagagtgtaatttgtgggtgtggaaattagtaaaagatgaagtcaattcctggctatatttattgatagatatcaatatgtttgttttatttgtaaaaacagtgtagggagttattgtgtttacagagatggtatgtggatactgcttattaacgtatactgaattgatcacactgagacccttcagctgctatttaatctttttggtatgtgcttggagttttaggttaatcactgttacacatgttgcttactggatggttaggtttctgtttttataaagtaaactttctgagagttgtgtcagatctttgagcttaatttttctctgtttataggttagatatacaaatcctctgagaggctggtttctaacatagaagttcttcgtttactctgaagtatgattatataaataacagaaaaactattataaataataagctttatatgttagcaatgagcatgatacattatagaactcagttttgtttctcacctaacaacccttcgttggcaaaacttcagtaacaggtttagaaatatatttgaggaaaaaatgtaatcatgtgttttgcttatagcaattcctttttatgtccttatcatctgtcacagttaaaactctttccacacatcatttgatgctcacaagaattactttttattttgacttttttgagagagggtcgcactctgttacccaggctggagtacagtggtgtggatcatggctcactgcaccttgacctcatgggctcaatcaaacctcccacctcagcctcctgagtatctgggactacaggcacatgccactacattgggctaattttttgtagagagggagtctcactatgttgcccacgctggtctccaattcccaggcttgggcaatcctgccttggcctcctgaagtgccaggactataggtatgagccactgtgcctggccaagaattattataaaatgcttatttcataaattaaactgaattaacaaagtcaagtaattttttagactcatcagtggaatcaattacataacagatttccttagattgccaagattttttttacaactactgattatacattgtttttaaatgaattttccagtctatgtatttcattgagcatacactagataccaaatatcatgtggaagcccatgaataaaaaaagaaactgatgaagccccttccctcaaggagctgggtgtagccataaggcgaatcagtgaagagccctttgagatagagggtgatgagcaaagtggtcgagccatgaactggctgccaaagagctgttgctgcaggaggcacagggaaaggcttttccagggagctgatcctgagctgagacttgaagatgacaggatttagccaagaaaaaagggaaaggagtggagagggtgacagtgattcgagacagtgaaagccacaacaggcttctgaaaaacataggtgcttcatttaagctaaaatatattgttttaaaaagaaggacatgggagatgacatgacagagagaggcaggcataagacatgaaaaggttggagcttatttctattagtctgttctcaggaaaaaatgtgatcatgtgtttcgcttatagcaatttcttttttatgtccttatctatcacacttaaaactctttccacacatcatttgacgctcacaagaattactgctaataaagacatacccaagactgggtaaagtaaagaggtttaatggaatcacagttccacatggctagtgaggcctcacaatcatggtagacagtgaaggaggagcaaagtcacatcttacatggcagcaggcaagagagagcatgtgcaggggaactcccctttatgaaaccattagatctcatgagactcattcactatcaggagaactacatgggaaagaccaagtcccatgattcaattaccccccaccaggtccctcctgtgacacatgggaattatgggagctacaattcaagatgagatttcggtgggcacagccaaaccatgtcattattcttaaggtggtaggagaccatgtacagactggaggcattcattcatttagcaaatacttgaataccaaccatgtgccagccattattttggtgcccagggacacaaaagtgaaggacacaaagtcctctttctcatagtgtttgttttacaggaagacatggacaaaatcttgtatatatagacagacagagatggctggtcagtggttgagaattctaaaagcagcagcagaccaaggaataaagagtgagccaaggaggaggctgtaatattattataataaaatgcaagaagtacaaaaatgcaaaaaaaaaaaaaaaatgcagttgggcaaaccaactgcatctaacaccaaacccattttataataaagtgtagagtatatcatgtaatgtattgaatactaaaagtgaaaaacagaatggttgtatggggactcaaagttcggttcccactgtacatatattgctttcacactcttataaagttgaaaaatctttaagtcaaaccatcgtaagtcatggactgtctgcacttagtgtaggccaagtactgcagtaactataacggaagctttgcatgtggattaatttagtcctcatttccgtaatacagattagaatacttaggttctaagaggttcaatatgttacccactggccataaagctctatgaagcgatgacgcttcacttctgccccccaagccactttgatatgtggcagtgggaacagagaggcagaatttactgagcctggggagaaaggtagttagagaaggcttatacagattctttttgcaagataaggcaggcactggtcaaaattaagagttttgtgtgtagtaattatgaaaatggcattggaattacacatatggcattaaataactcatactagagctacctccaggtcttattaattcctaactgaccacttaggtgtccctcaacactagccgcaatgaaagtaaccatctctactctgttattacagtattttttgtttgattacagaaacctccttctaaataagttaacttctgttttttgttttttaacttttaagttcctatcacccaggtattaagactagtactcaccagttattttttcctgattctcttcttcctcccaccctgataggccccagtgtgtgtgtcattaaccctctatgtaccttgttttctttatccactccatcactgatgggcctttaggttgattccacatctttgctattgtgaatagtgctgcagtgaacatatacatgcgtgtatctttataatagaatgatttatatttctttgggtatatagccagtagtgggattgctgggtcaaatggtattcctatctttatgtctttgaggaattaccatactgtcttccacaatggtttaactaatttacactcccatcaacagtgtataagcgttcctttttctccataacctcaacagcatctgttattttttgactttttaataacagccattctaactggtgggagatggtatcccattgtggtttgatttgcatttctctaatgatcagtgttgtagcttctcttctttatctaagaggaaacattgttcctgttgttgtttatagatattagagatataaagcatagaaaggtgttcatttttcagtttaattcagtgggtataagaaactgtgggatgtggggagatgaggaaggcttgccccgtcttcaagatgctgagctgcattctttcattagctaggacaactggaaagaatcaaattgactttcagtttcagaaacgaacattggggaagtttctgacatttctttattagagtaaattctgagcatgatatactctgtcaaaggaaaattcctagcatggatacatccatttttaaaagcatcatttttactttgaagtcaaaagtattatcagaatttgtcatcgattcttaaggttgtatctactaatacagtgttgcaccaggattctgaaagtccactttaaaatattttaaaactctttccctttaattaacggagtgtaaagtatgtatgtaaggctaccacaaatatctttatatatgtgtatatattaaaacatgttaatatattgacataatataaataatatccatatatgtaatatattttaaggctatccaggttttatacaatcagcacatattagggctgggcgcagtggctcacgcctgtaatgccagcactttgggaggctaaggcgggagatcacttgaggtcaggagtttgagaccagccttgccaacatggtgaaacgccatctctactaaaagtacaaaacattagctgggcctggtggcacatgccggtaattccagctatgtgggaggctgaggcgagagaatcacttgaactgaggaggtggaggagattgtggtgagccgagactgcaccactgcactccagcctgggagacagagagagactctgtctcaaaaaaaaaaaaaaaaaaaacaaaacaaaaaaacaaacaaacaaaaaaaacaaaaaaacccacatattaaacttgtactactcaaacctttaaaagcaaggagttacacgggatgctgtgactgtctgaacacttaacagatgaaacaaagatgaaaatctttgtgatcagatttcttaatgcttacagtaaatattaatttaggttgtaacttgactgggattcagtggcccaatgttattttaaagctagtatctcatgtagtttgggccctgattttttaaagatatctaggtaaaaaaaaaaggactcaagtcataacatattgtgaggcagatggattagtgaccagagagttaccttttcttcaataaggtactagttaaaattatctccaggaagcttctggcaagaatccaacggcctaagaggaattaaaaggtaattgtaaatccacatttgctagcataaaagtctcatggaattcaacctccacgactgcagtgggaagtgaaagctatgtactatgctttatagacctatgctgcctagtaatagtagcttctgcctatttattaaattttaaaaatttacacgcctgttcaagtgctcagtagcccattagctgctgccacgctggaccacatacagagaatatttccctcattgcagaaaattcggtcagacagtccggtttttgagtctttggagatcacagaacagatgaactgaatgccattttctcggagttcaactagatattctaatgttttgtgataagtttctataaattttatactttagatttctgtagtgctgcctctgaaaactgcccttttaaaacatgactactttggttggaaaatatgaggtgtgtttttggataagtttctttctggtgccattcacgtctttgctgttttattttgtatttcatcttgttaataaacatctagacggcatacaggtgacatgtaaacatagatcagcccgtgcactgaaaggaaaacctgtcatggttgctaatgcaaagtggtctgcaatgaacacacggaagatatgtcaaggttcttattttacagcagttttatgaaatgatttcatagactgcaagcacaaagaatgtcagcagagagctaaaaatttccacaatccaagtattatactaaaagtaaattctgtagccggttgacagaaaaattccttaaatcctaatgatgtgtggagaaacagccctttccaaaaggataaattactgttgtaaatttttatcaattctattgcctgtaagcattaacataatggctgacctactcacctttctgttgaagaaacagtataccattttactttatcttaaaaatactgcactttaactgaattgtttcgccctttacagcggaagttcagagtgaaatcgaaaggatttttgaacttgcaagaacattgcagttggtggtccttgacgcggatacaattaatcatccagctcaactcagtaaaacctccttggcccctattatagtatatgtaaagatttcttctcctaaggtaagtaggactgctactgtttgctctataatcaaactttcctaaaatgtattttatgttctgctttctataattaggctattgtaatagcctttatgatgtatagagaatttgaggagacatgatagtcaagaatttttaaattgatatagtttcatggcttagaacagctgttctcaaagtgtggtccatggatccctggagagtgttgagacacttttagagggtccatttagtcaaaactacttccatgataatactaagacattatttgccattttcactgttttgatatttgcatggctgatgcaaaagcaatggtgggtaaaactgctggcgtctaaacataaatcaagactgtggtatcaaagtaccagcagttactgtattcaccgccaccatgctttcgcagtttgaggggaaaaaaagccaatttcacttaatgtccttataaagtagtaaagtttattacttttattaaatcttgacttttaatattcagtgtactaaaacaaagtacacacaaagctcctgctgtataccaaaaagtaaggacaagcactggtttgattgagttgtgaactaaactagccatgtttttcatagaataccatttttatctcaaacaacaactgacaggctatgcttattccgacttggtgtagcagatattttcttggacaaaataagcctgtcacttaaaggagaacagcatgtgttgccaatgataaaactcaagctttcagacaacaatcagaattttagaaaacttgtatgcatctctgagaacttgcaagcttcccaataaagttttctctgagatcaatggtaatattaatgaatatgatgttttaataatgtataatgaaatatgtcaacatttggaagatctgaagtcagtgaaccattattgtttgtatgatcaatgaataacattaattttcaagacagaccaatggaatgtcatggagtaagaaaattgcactgcaggttcagattccacataacaaatagtctttaaggaaccaccatttgttgagttttagtgtagtatcaaagaagactatactaaattgtttctccttttctcaattacaaatctgtaggaggttggattttcttcacgtatttcaaccaaaacatgacattgcagcaggttgactgtagaagcaaacaggagactgcaattgtcttctatgaagccagccagccagccattagagagatgtgtaaaaatgtagctatttttattaaaaaaaattcggccgggcgcagtggctcatacctgtaatcccagcactctactaggctgaggtgggaggatcatgaggtcaggagatcgagaccatcctggctaacacagtgaaaccccgtctctactaaaaatacaaaaaaattagccgggcgtggtggcgggtgcctgtagtcctagctacttgggaggctgaggcaggagaatggtgtgaacctgggaggtggagcttgcagtgagccgagatcgcaccactgcactccagcctgggcaacagagcgagactacatctcaaaaatatatatatatatattttaacatgtatcagatttattgtgaatttttaaataaatgttttaatagttttccattttagcttctttaaagaggttgtgagataaaatgtttgagagctgctagcatagaaaaaatgtgagtgcttaaagcttgcaactgtgatttatgttaacatgttaattttgcagataatcttatagctccatctattataagccccttgtgctgtatataaaaaggccccagagaaaggagtcaataatgtaccttgtactttacctggatgtagttattactctgttaaaaactcattatcttttacaggttttacaaaggttaataaaatctcgagggaaatctcaagctaaacacctcaacgtccagatggtagcagctgataaactggctcagtgtcctccagtaagttatctctatatacagcataatccagttacagagatcagaccttttttttttttttttttttttttttttttgggggacaaggtcttgctctgttgcccatgttgggagtgcagtggtatggtcttagctcactgcagccctgaactcccgggctcaagtgatcctattgcttcagccttccaagcagctgagactataggtgcatgccaccatgatcggctaacttttttttttccccctgtagagacggggtcttgctatgttgcccaggctggtctagaactcctggcctgaagtgatcctcctgccttggtcttccaaagtgctaggattacaagcatgagctgccatgcctggccagaactggcattatattttgaaaaaaacagtcaaacacctgtcagggaagagaatcctcatcacttacagtggtattcattccaaagtaaactgtcctccctccttccatgatcatgtgttttgagcacaagtaatccaaacgatgatcatagcttaccaaaagcttccgtacatcctgcagtaacttcactttgttaatatccaacacaagatcctggttccgaaaatttggcttgtatgatgagtctatttggagttggtatattattcatttctgatcatagggatcaagttgtctgctcttaataactgtctgagacatttattttcacatggtctcaaatcaatttctaagtaataagttacctagattctcacttgtcgtctatgctttacatgcaatgccttgaggtattagagctttcctaggtttagttttggaggcagggtcttgctttgttgcccaggcaggagtgcagtggtggtgtctcagctcactattgcaacctctgcctcccgggctcaagtaatcctcccacctcggccctccaagtagctaggactacaggcaaacgccaccatgccctgctaatttttgtattcttagtagagacggggctttgccatgttgcccaggctggtctcaaactcccgacctcaagtgatccatccaccttggcctcccaaagtgctgggattacaggcatgagccactgcaccaggcttttttttctttttaagcatagccatttcagggtctataaatatttgattgcttaatatatgttaaaatttataataaacactaaaaaatcttttgaaaagtggcattattttcttctctactgaactactgtgaagtttggacaatgtcaaaatttcacatcctaatcttaccttattaatttctaaattcagatttcataatcttgggccgggcatggtggctcatacctgtaatcccagcactttgggaggccgaggcgggtgaatcacttgaggccaggagttcaacaccagcctggccaacatggcaaaaccccatctctactaaaaatacaaaaattagcagggcttggtggtaggcacctgtaaccccagctacttgagaagctgaggcaggaaaatcacttgaacctgggaggccaaggttgcactgaaccaagatcaggccactgcactccagcctgggtaacagagtaagactctgtctcaaaaaaagaaaaagaaaaaagatatcacaatctttatgtcaagaacaggcttcttcctattctattctattctgttcaaatatatatacatctcttttctaccatagtatctatgcctttttcattgctgattgatagacaacttttctgggttgccatgtccttaacaactgttacctttctggccattatttattagttaagcattcagtgccctcaacaatgatttgaggtagtcagacacttcctaactaaataaaaagggagatagtagcagcacttatagaagcaggagcaagtacaaaggggtgcagctcatgagccccttcctcctcttatggaggtgggaagggggtgaaaactgggctggcatcaatgtggtctggaatgtctgcctctgcaggagctgttcgatgtgatcttggatgagaaccagcttgaggatgcctgtgagcaccttgccgactatctggaggcctactggaaggccacccatcctcccagcagtagcctccccaaccctctccttagccgtacattagccacttcaagtctgcctcttagccccaccctagcctctaattcacaggtaaggggagtttttatatatatctatatatacaatcttcatagaaaaaaggttgcctatggtgacacctctaggatccaagcccagtagcctgcttggggcttgttctagtatattaactcaaagcaagtccagcatgagctgtgtatgtacctgtaagaaaagcaccatcaacagaatatattgggaacatacacagactaccgaaactttctaaacagtagcatagactgtggaagtggatcacctagattcaaatcctggctgcacctcttaccacttgtggggtggataacctggggcaaatttcttaactgttcttacctcaggaataataatggcaacctgtccaagaggctgctggaattaataatctcaagagatgatcttatagggctgttgtattaatgagttattatatacaaagggtctacagaacagtgcctgtcccatactgtatcactgtatcaggtaagcatttgctatttttaatattctcacatacagtcaagcagaggtagttaagtttacaccgctgtatagaaaaatctcagggacctgcatctgtatttgagccacaggagaataaataaaagaacattttccctgctgctgcttttttttttttaaaggaaaaagttaccatgggcactgttctaggcacttacaaaagtccaatttaatatagtatagtataaagccttataaatgccactggatgttaccaaagggatgaagctaggttagacttcatttcagcttttcggatgcttaaaaaggactctgcttgaatgcacttgctctgggacatgttctttacacactgaccttggttaacgcctggtgtgctcctttcgctgccagggttctcaaggtgatcagaggactgatcgctccgctcctatccgttctgcttcccaagctgaagaagaacctagtgtggaaccagtcaagaaatcccagcaccgctcttcctcctcagccccacaccacaaccatcgcagtgggacaagtcgcggcctctccaggcaagagacatttgactcggaaacccaggagagtcgagactctgcctacgtagagccaaaggaagattattcccatgaccacgtggaccactatgcctcacaccgtgaccacaaccacagagacgagacccacgggagcagtgaccacagacacagggagtcccggcaccgttcccgggacgtggatcgagagcaggaccacaacgagtgcaacaagcagcgcagccgtcataaatccaaggatcgctactgtgaaaaggatggagaagtgatatcaaaaaaacggaatgaggctggggagtggaacagggatgtttacatccgccaatgagttttgcccgtttgtgtttttttttttttttttttgaagtcttgtataactaacagcatccccaaaacaaagtctttggggtctacactgcaatcatatgtgatctgtcttgtaatattttgtattattgctgttgcttgaatagcaatagcatggatagagtattgagatactttttcttttgtaagtgctacataaattggcctggtatggctgcagtcctccggttgcatactggactcttcaaaaactgttttgggtagctgccacttgaacaaaatctgttgccacccaggtgatgttagtgttttaagaaatgtagttgatgtatccaacaagccagaatcagcacagataaaaagtggaatttcttgtttctccagatttttaatacgttaatacgcaggcatctgatttgcatattcattcatggaccactgtttcttgcttgtacctctggctgactaaatttggggacagattcagtcttgccttacacaaaggggatcataaagttagaatctattttctatgtactagtactgtgtactgtatagacagtttgtaaatgttatttctgcaaacaaacaccttcttattatatatataatatatatatatatcagtttgatcacactattttagagtcttaatgccaagtcagcagatttgctttatgaattacagggactagaaatgcccacattcaggaaatttgtaataacattgtctagacacctatcctcattctagtagaaagtgtgtacatactgtaaatatgtgtgattgcttgacttgaaaaggtttgaattctgaatgttataccatccttgtaagtaagtttgtaatttccaccataaattatggtaaatataaaactccagaggttgttctactccatacagttcacactgattgtgacacattcttagtagctagtgtctgttctagtcactgcactggagtctacgagccggaactcgctatatgcacgtgtgtgtgtccgtatgtaagaaagtgtgcaccgagtgactgaatggttgagatgaattggaatgctgaagactaacgaagaaactagagactgatatcgagcattctgcccacctcgctctgtatttaattaattgtgctatatgttgctttaacaacccattgagcagtcagggaatgtgagtaagcttgctgccaaaggtaactaggaaagcattcatctgctgcctccttgtttttgctcctagagagtgaaaatacaggcaattttactgtgagtgtttcactggaaatgtacaatctttgtgtgttagagtatttgttttagtaagaaatgtttacacagcttgtggaattatttcgtgggaaaataaatttttataacttctcccacttcaatttctaaccttgcctattgttcctgttgtttgtttacctcccagttacctaccattcctccccaccaccgactccagcaggttcactgtctgtcagaacccagaagtgcttcttataaccaaagtttctgttcttcagaagaaatcagggcaaaatggggtgacttgaagtgaataaaatgttaagaatattatcctacataagacatgtacacagaaggggaaccttgaagacattatctccatgcctcaattacactgctgtaagaagcttacaatgtcatcatgtttaaggctaagaccttttccgtgtctcaagtgtatattttgtccagttataactggatggtaagacagtattaagagtgcaagtacctggcacttgaagtttgtcccaggaaaatgcctgtgtataattacctaacttcagatctgcacattaacttatttaacaaaataaatcagccgggcgcagtggctcatgcctgtaatcccagcaatttgggaggctgaggagggtggatcacctgaggtcaggagttcaagaccagcctggccaacgtggcgaaaccccgtctctactaaaaagataaaaaattagccaggtgtggtggtgcacacctgtaatcccagctacttgggaggctgaggcaggagaattgcttgaacccaggaggtggagcctgcagtaagccaagatcacaccactgtactccagcctgggtgacagagtgagactccatctccaaaaaagaaaaaaaaacaaaaaacaaaaaaaactatccagcaaaattataaaatctactttgttttgcttccttgattattccaagttcttaccaaatattcttagccttttataagtaaaactgttttacatttaactccttatttcccttacccccaagaaaacgcaatattaaaaatgattaagctggggtggtagagtatacctgtagacccagctacttgggaggctgagataggaggatcccttgagcccaggaggtggaggctgcagtgaaccgtgactgtaccaatgcactccagcctggtgacaacctggtgtttaaaaaaagaaaataaaaattagttacatatataatgttttatcagcttatatatgaaaaaatttccctcagttcgttaattagccctacactgtttacataaatttatttactgagtataaaatcagtagtcataataaacttgacaattcttacattggtaggaaaccatattctaattaaaattgaatttataaaatatttctgataaaacttttgtcatggtaagagattcacaattattagttcaatcctttattatttcatcccaattaatgattttagaatatttaaattcttgaaacatagctagtatttatcttacttgctgctatcattaatccctttcaaaaagtagtggtgagagtttccatcttttttattttgtatctagattcttagcttgcactttactgtagaacatattagtgcaaatcagaatattcctcaaagaactagcttgaaggatttgacataagagccgctatatgtgaaaaactgtatagtggacatatgtgtaaactgtgtagtaaatctgtaaatgaggaaataatctcaagggcaatgggatatttactgacctgcggaatgtaaagttacagtcttttcacacaacaaaggcttaaccttaacctactcagttgtagagccatttttgtagtcaacctagaaaatgctggaaatgtatttaatagttttttttttttttttttttggtcatatccatttcagtctttcctatgctctttctctactgctcatttaagttactgttacaaaaaggtgctgctaaatgtaggatgtcttagtcatgttgtactttgggacaatgccacatttttaacatggtctgctatgcattcctgttaaacattcactgtcagctacactgaactgtctaacaaacctggtttaaagtaattcatataaaacaaataaagagctggcttctgcactgtttattagtagtagtattaattgccatgttagaaatgattcatgtagttgagactatattaaatattcaacacttcccagctgcagggcatctttcttggggcaatgctaaatact

SEQ ID NO: 81 - DNA, 338290 bp, Homo sapiens
  source 1..338290: mol_type = genomic DNA
tctgggagcagaaagccagctaagcccaaatggtccctttgcttttccatcttttgtggctgcctggctgtgctcttacgggttttgttgtcaacaaactcctggcttgcctttgagcactccaaattattgaaaatgactacagcttaagactggcaggatgattgttaaaaacagccctggcattaatcatagcttaagagcttttggaaaatgattctaattcagaaggggtggcttacaaagagccttgtcgaaagtgaagcagacatcaaattctgaaaggcaaaaagcctccttggtacccacacctggcttcttctgcaatccagttggcagaactgcatggggggcacggcttaccccaccagctcaccccatctgagaccaccttgggttttgcccacgagtcctgtatcacccctacctctgatatggggaccttgagatgggagagacttcagggagcaccagcagttacagtcttcctggcagtcctgggactaaggaagaggtggccttgttttctgtcaacagttggcatgccttagaccagtgctaaaataagctgtgtgcatagaggcagctgcgtaggcaaacacatggtcagcatttgcaaggagccaggcagggcgacgagctaatacttctgccttttgcctgcctggcacaacaaaggagaatgatttttgccatcagcattctccctatcacggaatcattgcacaatttagtatgattaatggtttccatttaggagaagctgagaatgaaaacagtgggggagtggtggcactcgctgggggtgtctgcgggtgatactagagtgaaagggagagagagctggccgttgcctgccagcctgtatcttccaacctttacttccaggcacgactggggagacacggtggggcagagacacatggcttttgacatgcttttgcagaaacagtctgaaagctgcaaacttgtgaggcactgtttgctgtttcattcttgcatccttcccaatgtttgtgactgtgaagccactcccttttacctgccaaagggagtgccaatcccagaagttcctaactaagggctggggctgagagtggtcagggcacagtgatgaggatagtggaactaactacaccacttcttgacattcctgatggccacgcggggatgccacacagggagggaaggaccccacccatgtgctgggactgtaggggtggcctccaacgtagccgtctgtctctggagcacccagctggtggtagacctagtctcagctctcatcgggtggctttcctgggagttcttcttctcccctcagtagcatccttttatttccacttctgtaggcttctttttgggtctcacggctgctgcaggtgagtggtgagacaaaaggtgccatagccagggacttgtgggtgctgatggaaaccaaccaggaaaacacagagaattcaaaagggtctgcatttttttttttttttttttttttttttttaaggcatagcctttgtaactgaagccagatagagagaaaattggtgatcttggctggggctaacgtgactcaaggcccttctcgatgcattggtgtctctgcaaggaaatctattattttccataaactgtcttaagcatctcccgggctacatttctggctgtgttaagaatcaagccatcaagaacagctgtgaatgttatacaatttcagcagcagcaatgggctttggcagggaagtaggagcaaaaaacccaagtaggacatttcagttgacagtaatggcattttcccttccttgtccaaacgataaaagattcatgttcctaattgcaacactatagctgccctcatcactttattctgggagaggaggttagagaaaacaggcctagagagagggagagaaagagaaagagagagagatggatagtaatttcgtcactagctaacagagactgattagtgcagaagattcccttccatagcaatactttttaatcaggtctgctgtgtctgggcaaacagcttttgtggattagctagacttgcacttgccagcatccattgcaggtttaaacgatgaaatacacaactacagagaaaacaaaccaaaaagagtaataaagtcacacatttcaatattcagcaaccattaagggatttaaatatttgcttgctattaaaggcctgcattaggctcttccaacaccagctctggaagactgaaatatcaattacggatcaattttccccctaagtaaacactaatgcaggataaacagtattagaagatgcaatcgtaacattgctgacttcaggatggacttcctgctggtaacagcaagtttaagcctggtgattaattaacctgagaagatagcacttaaggaagatttgaggcggtcacgtctgaaatatgactgtgagcctgtgcacgtctggagggcagctgaagtcccgggcccagagaaccggttgatttgcccctcagtagtggttctcaccttccccagatcaacacttcgaaggattaggagggagtaaaatgggaggcgcaggtaggtgtgcatgtgtgtgagagaaaaagcagtagacaatgtcaggttccttgttggaatacattctgcatttcaataggcaaggctcgagttgtatttcccagcactgaccaccaggggcagtagacattttatgttttttgggaatgaaaaaaataaataaaaacataaaaatgaaacaaagtttcctgtgtactgaagaggctggaagctgaggtttggaacacctgaaaacagagaagattcttgctttcaggtctcagttcagggatgctcatgtgtaatgatgtgagtgttgggtggggggtggtggggggggactgaatcctgcagttcctattagaggcacatttcaacattttgagataaacacagataaggcaaggactatagtttgcatttttaaaagaggccatattgcattctgaaggcccctcacaatatatgatagcaatactaaggctttgcttggccattacccaaaatgatattccctgatactattccagtgggtccttgagaatgatagggccaatcgctctaaactcaggactggctggcttgtcccttcacggccaacctgaaagccacctgtagtaaggatggacatgcaaacatcaaggtttgaaatacagcatcggtggcccattcagattaagtgtaacgtaaggctcagtcagccaggtgctcgactcttctccctttaatcagctgatacttgctgggtgactactgcgtgcctgacaggaactttaatatggtattgacctacaaggtcatggatgagccaagagtcccttctttcttctcctgtacggggggccagcgcttcaaaaactatacatgtatggctgtgaatacaaatttcaccctgaaggaatgtggctgccagttcttcatgacaaagggctgcgtatttgggatcctggcaaaaaggtgtattaatcttgggcatgattttataataaaacaaaaataccttcacttaagcagggtctttctacctgtaacacagtggccacatggtttctttgaggttcttgatgacagaatcaaaggagcatttctccatggagcaagtccacagcggtaaaagaattacatttcaggtagacagaggacagtgaaagattgcaccaattaacacccgcatatcacctcagggttccagttgatgtatttggagaatgccaggccaaaacatttgtgaaaactctctgggggaaacgagggccattttcactctcgtacgcactcttctcaaatgaaggagtgggcaacttatcaagatcctttgagcggggacggcttctagcaccttctcatttgcataccctgtggagctcaaaaggcaaatgtacagcagtcaccacctcctgtctgcctcagctcaaggaacttctgggacttttttctgtagggtacagctaaagctggagcctcatgctgcagacaagagggagaggggtggggagactaaacatactgcatgccacgtggcttggaataagtctgctaatgaatggtgaagagaaaagggtcattaaaccttctaagtcgtggtttgcaagggcatgatgtgtctatatgcagaggagccctcagagctccctctgagtagtgaccgcttcttcgtagccctgggtaaccttctatcgttttagtcaccatttgcctctatcctgtgactgacatgtaatgaacaagtagtgtgtgtctggcacctttttggctgagcgctgactgcatatctcactgatctttcctaacaaccttcgaggctatggtgatgtccaccttgcagagcaagagactgaagccaggtaggctgggctactcacccgaggtttcactgctacatggtgggacagggatctgaatgcaggcagcctctctctagtgtgtgcttttgatccttattctatctctctgggtctttttatagagatgcaatgaatgagtactccctactgctccttgccctctggcagaggctgggagaggtcactgaagtatcgagtcctctgcccggacttttcagtacagccacaagacccatcccaccctgcacacggaattgctttcttctccccatacaaatcagcaggctggctgggcttgttgccctctgtacttttgactcacattccttctccacgaaaccatcctttaagatccagctggggtcccagctctttgtgaagctgtctagggactcaccagccttcactgattacccttctccagaaaattctcatagcactctctgggcttctctgtgttcagtggggcacccatggctcagggtcacttcaagttttcaggtgatgtaactgatgctctacttggcctccagagaccgccttatacttctctgcatccctcaccatgctggacatacagcaggtgctcaataactgcatatctgatttttttttttttttttttttttttttttttttaacagagacaggtaagagaccaggccaggatggaagtggctcaaggggagatgcacagccttcagtctttctggagcttacctttgcttttcctatggaactttccccatgacgtggccaagggagaaaaggggaactcatcaaccacagctgaggggatggtgggaaaagggcactttgggcctggccagacgttatctgcacatttataagatcggccaccatgaagtgtagtcattgctcacttcagcctgcaaggcaaggacgatgacaacagagcaaatcctgctgtctacccaggcctggaagtctcagcaacctaaacagcaagtgagaacaatcttctgcaggcagccaagccagtcctccacagctcacgtcttctttttatgaaaggagagagaactttcaaggaagaaggcagaatgaattgttaagacacaaactcccaaagtaagagacaggtggagcagccaacacagggaagttggtgagggtgggggggcggtgagagaggggatgagtgcggaagacacatctacgggagcggcctgttccggcgggcccgccacgacagctcgcacacctgcacaaatcgctgagtccacgtgggagcccagactcagccacggcacagcacttggctcacctgtccactgagagtggggaagagaacaaggacaggaaggatgagcggagaaggagagagagcgcggcccccagcaacccagccggcagcatgtcctagcatctactgccagcgttcctggccccgtacatggtcctaaggaggaagctgggaccagaggcccatctcttctctcactcggaggcgtccataagaagtccataaagagattaaaggatcactttgtaacattaatttttttttattaagaagacagatattttatagtacttcttttttttctttttttttttgtaaaaatggtatacatgaaccaatacaaaatgcgaatgggaacatatggatatggagtttcttacactgtaacattgtccatgtacaccttaaaaacagaactggcctaaagggaaaaataagacgtcggtgtgactaaagaacaagcttatttggcatcaattatacatccttcattattttatattcctttaaaaaacacaaaaaacaagtttgttctttcttcactctaaaaaaagtgatcaacctgtacaaagtaatactcaacaatacatttcaaacagtgcactgtatacttaagaaaaaatacataaaccaatatacaactaaaatccataatttcctgtttttgctttgttttattattattttttccaatgtgtggggcctacactttgcaatctacctgagacggaaaacaccaatcgcaacacatgaacctgagacatgtcaacattgtaagccataaagttacatcaggaacactgcactactgtacacttttcaaaacagaaagatgggaggtcccaaaaatgagatgccaattctgtgagcaatggtgtgattttttttttttgtttttgtttttgtttttctttttttctaaaaagaacaactgaaaaaaaacctttcaacaacatgctaaatgattctcaccctttgatatgattatactatggtcggaatgggtgctaagggctcggaatagagctgcagattataaaattcattgaaaaagggatgttcattgtggctttttgtcttggttaagtgcctagggataggggaggggtaaataaaatgctgctcgataatggattttcttttacataccagtccgttcccaaaaggcccccatattgcaatggttctatcaaaggttaaaataaagacaagaaaaataaacatgttttcaaataacaaagagttgacactttttcccccttaaataaatcagcataagttttccacataatgtaacaatagtaaaaatgcaccttgcaaaatccaaaattactcactgaaaatgtaatagaatatatatttatatatatatatagatctatcttttttgatgccatctttccatagggactgttagctggagtctggagtcttaccaaacatatggtaagagtttagtttctgtccttcaggactacttctagatttcctagacgtttcagtgaaaatccccacacttctttctttaaaacatgtaaatggtaacgtgactcctctaccttttcccgaggctccccatctaagatatgttcaaggtcactgattttagtagctatgcactatggctgccatcatgcgaggatcagtaatttttggcagatggttcttaaggctgaggaaagaggccaaggctagtgtatgaaaggtaaaaagataaaaacactcacatttgagttttgattaagtaactgaaaatccgtacatgctgtttttccacctctgctctgacctatcgagaactgagagcgacagcagaccagtgtgagaacaataccagcccttcttttgtacctcctgcctttgtcaagccaaatctgaaggaatgaaagtttcacacagattcgagttggaaatcccagcatgacaaatatctgtaatatacagtacatgcaggccacatcctactgccttcctaactaagcacaaaggaaaaaaaaaaaaaaatcaactctgtcccattcagtcattcgcacaacagacgaacttgctttttcctacaaattagtgagaagtaaggccgattgggaaaggtggatggaatcatttggaacagaaacaaccagagcagaactgtatttcccccctccctacttcccctcctgtggcaactcaaaatttgtccacttatataaaaggaacagacctcacctgtcaggtctgtttagggcatggaaaaaggaggagtcctttctgccccaaacctttctggacagcgtagggtatctatactgagccgtctacagatacagaattaaagacagtgaaattcaatctcattgtgacacacctcacttgcagataaccctgtacagtaatgtagttccacagcaaacagaacattttctgaatcacagtctaattttctagtcttcactgctctaagtatttgaaacatgggcagcagcaaagagttttcattgtttgttcacccaaatctttacgacaacagagaagaatgcattatggatacactaaattctgaactatgaaatctaagctgtgctggttctccttttatgaaactgaatttggaacagaaagcagttaccataaaaataaacaaaagtaaaaaactagaacagaaaagggaaggaaaagagtctaaggaatcccagcaggcaaattccaaaatgggagattttggaaaaaatccgaaattggggtagagggaggaaataaatgtgcacaaagggggaaaagaaaggaacgcaacaaacaaacaaaaaacaaggcacagaattttctgcaatctactgaaactaaatccaagtatccaagtttgacttggtaggaagaaataaaaattaaacaaacaaacaaacgaaaaaagaggtgtcaaacagcagagtgtactttccaaagaacattttttttttttttacacagcaaatcccaagccttcccagtctcacacctttccacccattcataaaaaaacacacgaatttctcgcaagttccaatatcactgtctctttatcatctaaatagggccagttggacacctcattgaaacaaaaaggctgatctagatgaagtactctttcttttcttcggagttgttctgtcctccttctgcattgattatagctgtgtctgcgtctgctgcgtcatcggctcctttggcttcatgagtgaagtatgtacctgaaagatgaaggggtaaagcaccgtgactgtctgatggcctctgtgtaaagtggtacagagatggcaacttgctttatggccatcatcagccgaagtggtgtgcaggcagcagaggggaaaaaacaattggaagaagagagcggggtgggtgagacaaagggggatccgggggttccaaaggcaccactccaactgaaccgctgcgatataattcagcaaatgagacattagagcagtgattatgaccagaggatgtcagcagaagaagacgtgagtgggagctaaaaatgcagaaagctggagaggggctgactaacgtataaacagtaaacaccaatgaccaatgaccagatatgtgcacgtacattgttaaagaccaaagcaaggaagagcaattagccaataaatgaattagggccctgatgatgcttctgttgtcacctcagctcatttatttgaaccaccgtcccgtgtctatatgaatcattgttgcctacccataggtgagaaggtgcttgaacttgcacaagtatgtttgattttcctgtcttccacttcagagtgaggttccagattgagaaagaatttgacattataatagcagggatcaaggtttgggatctgtcttaatgagcaagtaggtctctctcatcgtataactctagcccggacccggattcatggatttgctaattggcacagccactttataatgacaatagacagacattacacagctggggacactcttatcaccaaatcccaacagtttacatggagaacaacaaagactgcacctcagtatgctatataggtagaagttaaactgcctaccataatcaaataatcttcctcccattacatactgtattcctgaagagtcttctatttaaaaaggttgagacatttgctatattttcaggttttcaaagtaacaaatctgagaaagcaagaggtcaaacgcttctcagtatccttttttcttgctgcagagtgacacacatgttcccctcccctggtccttcacagctgctgctcggatgctgccctgctctctggccttacctcctgtctctgtcaagcttaccaccgagaggctgggagctcttggccaaacagactgcctcctgagtgtgggcagagggcgaagtatggacagctctgatcgtcctaaactgttttatgcttgagacaggcactctgtatcctaaaggtgcctaagtaccttagacctccactgctgtgctcaagggaccttcccccaaacccaagttcaacagtcaagcagtatgcaagcacctagaaaaccccgcaagctcattgcacagtgcttgagaaaaataactgagagagacaggggcggacaaagaaaaggaagaataaattaccaagagggaagaagaggatcagagcagcatggggcagacaggaggggcattggaaaagatgattgcccatccagactgcacagttgataagtgtgatgattaatggcaatttaaatcaattgcactgataattttaaaaatacatatttatgcggcttttaaggcaaaaaattttctttaacctgggcacatcaaaccaaggcagtcttctcgccattgtgaccagcttacacagagtctggggacaggggatagggggaaatcctctgcctcccagaaaacagtaggttgtggatgtgctttttccatgtttatcctttgcggcttcatgccacaccttgcacaccagcctctactttatcatttttcctctatccccaattatggatggcagaataacaactctacaaagctttatatttagagaaaatccaaatcaaggagtgctactcatcaactcccagagtcctaatcagcggctgctaagatttctggttttgtttttttttttttttttctcttctctctcttccagtttcaggaatcagataggccgtgtggccacatacatcaaattgcctatcaaggacaaccttgtaaagtctccaaaggcagaagctgtggggacacgctgcttctgtctgctgaagctttgcttacctttatgtctggcaaaatagcgccccagaatgatgagcaagcacagcatggcgaacaccaccaccgccacgacgccaccgatcacggcatgatccactgccctgatcgagccttcttcacctgctcgggaatctgttaaaatcagaagaggaatagggatgtagagcttattacaaggcaccagaagccccggcgacactgtctccagggtcagagggtcaccttcttttttaatggaggagtcacagagaacaatcgagatggatcaagttacactgaggtaacaggctgacctgtccagtgctgaatcgatctgttctccccacgaggcaatttcatgataagcagcataggagggttaatgcatgtggaacaagcttagggaggcagggaaggaagaaatagtctatccggccctgacctagtcttagcgttcactctgtctgtatccagttgcagagcctaattaagggggctgacctgactatttgagggtgctctgaatgacacctttaggcaacagaagggtacagcatctttctatagacgcccaatgacttttattatctggtagattagggatatgcataggagaagtaaggtgctcaaaagccacagttgcctagagataaaacaaggattataagactaaagacaaatgacaggcttgctacatttaggatgtatgaaggagtaagcctcaatttaaaacctaaaaacctatttcaaaagagacagcaaggaataattgtccattgccaccaacggtttttattttatttatttaacaccttgcaatgcaattaattttcctttataagcatcaccccctcaggatgtcttcttctgactgaggaacgacatgtttggctggggaacaactccaaaatgaacccagaatgagctatggtgatgcagaatggatgtatggcagtgtaaacaattttaatttaggaatgtggctacatcaccccttgctgaaatcctaatggcatttgagatttataatgtagtaaaaaacaattattctcccgttgattaatacattaacattttggagtggaagctaaaccattgtcttttttttttattgagtcaagtacgacacctccattaaaatgatttactagctgtaccttacaatttaagcacagcagcaacagaaacggtaaaaatcttttaactttacatgatttgtgaagtcatatgtgaaggatttaccatttgaatctttcagtacaagaagcacatggcctataaatctgtcccccttgcagttgctggatgcctaagagaaatgcatttcaccaggaagactgagagtgcaaattcaagtcaatttttaagaaagatttatctctgtctctctccaaagaacagagcaaatctctgaagcctctacctctaataatatttgaagtttatcgatcaagtgtacagatccgtgacagctaaaggtaatggtgctcttttgagccgaaacctgatacaacgctttcagcaggagggcatgatttacactttctatcgatatttccaattctgctccgagattaagtactgaaggatgtggggaaataactcgtgactgagggttccatgaaaagtgctttaattaaaagagtttaaattttaaaatggagtatttaaagtgtttcattaagttatctttgaaaggactacagaaaaaccaaaaccaaaacccaaacagaaatgccaaatcagaggcagcagcaggtcgcccaggacaacaggatgatgggagtttaattggagaagggagctgggttggaggcagagtgcactgcagccaattagcccgctctgagctgagcgagcccctccagcaacgtgtctaataagctcaacttgaaaagtggtggagaggaatctccctcctcagccaaaagtgttgccaactgcagatgctacaacccccattgtcttgaaagtcatttcaacaaggcagaactcggtcaagggatttttttttttttcctttttagagacgacaaagctcgttgaaggggagcattccccgtggggtgctgctggacacggggtgtctgctggaggagagcgcttgacacactggagatgttcagtccaactgcacagatgcaaaattgctcatgggggacaaaagtaacagaaaagccagcaagttgtgttttccttagggagctgtcaaaatagggaatcttgggggaatgagaattaactcatctccaatggccatgagcttcagacctattaaaatttatgtgtctttcgatgaactctgtatgttttaaaattgggggaggaaaacaagtgagactagacattgaggacaggggaaagttaggcacaagaggcaagaggtgaagagaggttccaggaagactgagaacagagagaagcttcgagaagctgtccaggacagttctaacccatctaggggaagacactatcttgtccactcttaataaaagaccgcctcctctccatgcctagacacaggaatattctggaagcctgaggggggaggggggaggggagagacagagagaggctctgtgacaaagaaaaacaaaaacctccctcaaacaaaaagatctcacgaggtatatgtatctgtgagattaatttcttgagccgaaactccttacttgacctttgccctccatgaactttgagctaaatatgctcagtgttgctatttttccctgcactttgcccaaattaaactagaaccttagatgttctagttatcttccccaccctcaaggacatacatattttacagatacttatttataagggtaatctctccagctatcttctgatacccactttgatcagaaagtttactaccaccagttaatcaccaagacatttctcctgccttcaattactgcagatggacacagaaggtaactgatgtttaatttacagggaacactgccggttacgagcgcctcaccgcctcttcccacccccactcccacctcctgggtttacgtgggaggtgttaatagagttgtgcctgttcactgagtgcctctgtcttggccttccctatgaaaagcagagctgtttctggagtcatctcagtccgttcttttatttccacgtgtggggagggtgggggagtgtttataatgccatggattggctcaaggcagcagggccggggtgagctgcctgcacctgcgggctgtgcctcactcatgacatgaagcagccgtgcaagatgctgcccaggggggaactgggctactggagtcgcacgaaaaccagaaatggaaggaaataccgagcactaagagaagcatggctgcgacaaagtctgtcagctgcttgacctttccttccattcccaaggcaaggactctaaccaattccatgagaaatgacttctaagtgggaaagctatgggtttccccatgagccacagatcctggtcctgcagggtgcagaccccttcttcaggtcccatgaagtgctggctttcctggggacattctcttcagattcccggctcattttctgaatcgggcaggcaacgaaaccagaggcagattctacagctgcccctagcttgtcaattgaaaaataaatgtgggagtggaaagcacttttaaacatgcctgatgctcaggcatatggacatcacttcggtttagaaagccatgttttcttgttccctaagaggctacaagtgttcctcttactagtaacaagtgtaagagtgtttcttttctgggactaagccctgccccatcatcctgaaaagtaaagccatgtttttgcttggtgaatggttccagcataaaggttattccagcctcagtgaaccaagcatgattgcataacacagttcaactggagttaagaatctcatccaaattatttcacatgtgacctcaggtgaattaggcctagtccttgaatgattctgacttgcagatgaaccctgtaaaggttattgtgtatcgctgtgtcacccttcactcctcctcagaggtagaaagcttggtgtccttttggcaaaaagactgaccttggactctgtagtcgagggcttcagggcgggcaggcagcagttgcagggaggtgttcctgacagctcacagttgtggtacaaccctccctgcctgtcgtgtcccatcccgcagccacttccatggctctaagtgtgacagataaatcatgaggtgtttagtattcgtgagttagcttttcttttggcaaaaagctgaaacaacttggctccaggtgagagtttaccagctgcttgcagaatgttaagttggccactactgcttgggtcacagcttcaacaaccctgggctcgctttagcatcttagaaattgcgggacagagaaatctcaaagaaactcccaagagtgatgccccaaactgctcagatttctttaccttgggccagttgacctggcccgatccattcctcatgggcaataagaaggggaagttctaaaggcagtagttccccagggcgtgacaagaaaggtgactgctagtggaacttcagtctcctttcccctccttctaggagacttttctttctctacttgttttcattcctcaaactccttgccagagtcgtcttaaacgcagcactctggcagccatgctgcctgtattaaacagggctctgcaagagatcctggtttctatggctactttaccacctggcatgagatgtgtagcataaaccgccatgcaaatgccataatcatggatctgtgataagcctagaaggctctgctgccaaagtggggatccatggataactggagagtggctagtacatcctagacaagctcctggcaaatagggactttggcagaaggactcactgagcagaaccttcactgcaactgctgcctgcccaccctgaagccctcggctacacagagtccaaggtcagtctttttgccaaaaggacaccaagatttctacctctgagaaggagtgaagggtgacacaatgatacacaataaagtatgcagcatgaggcatgacagccacattgcactgggtcaccctcacatctcaaacatccctggctcaggctgtaaggcacatttagcaacatggcgcttaaacgcacactttaactcttttcataggtcataaactacctcagctctcatttttacgtttaagccatggggaggttctaacggtattagtcttcctacttctgtttagggacagttcagatgctcagcgttctgtgcttcccccatccgtggatgactggaggaaaagaattgttgcggacttttttgcaacagttctgtcacgtggctcagttttagttcctttcctgggtggagatcttgctggacaagtcagtttaattacaaactctcagaatcggtgtttgtaatggaaatgctgcctccagcttcctagggttgtagggattagtctatttcagagaaagcttagtgactatgatgtcatttgttacttcttgctaggaagaaagaaaaagcctggtagtggatttcccaaatctgaagcaaaaccataatctgacctaaaaaaaaaatgacacttaagaaaacctggcaccatctgaaaaatgtagctacccattctcatcatctattgtagctcccgtccatggcaacaaaaataagtgtgcattttaaaaagcacaactttattactgaaggggaacaaactgaatggcatgcgctgacaaaatgccacattatttgctaatcctaatatgttattcttctttaagatttgcttttctcagcaccaattcaattatagatgctacaaatccttctgacatttaattccctcttgtcagagagtagtaaatgtatacagtacatgcacagctttcccattaagatgttaatatatattggagcacactagcctttatgcagcataacctttcttttctgtcttcttagaaagtggacgagaaggaataaacgtaaagcaagaaaatcatgaagactcccatatagcatcccaggcatctactactacacgtcagctgcattcaattctagcaatgtaactgcatctatactaacgtttcaaaggagctatgttaagctacttaaaggaaaactgcagtgatcatcctcatggtgccacccagagctcagtatgtgttcatttaaattagaagtactgcacacagattttggctgtaccttgtcactactcaaatgatcaggactcagggctctcttagactatcactggctacattgctttccagaaacaggcctgaacaggggacgagctaggagctcatctcctgcatggtccattggaaagagcactggacttgctgtcatttctgggacagaacttgagcttcattacttttctctgtgacttcaggcaggtcaatgaggcactctgagccactgagtacaattacgtacttcacagggtcactttgagaggccactgttttcatttcctgagccaaatgaaagtgcctatttggctcagggcttggagtatcatagggacctggtgtttgccaaattcaaatctcctgtattagagcctaaggagggcttttccagttcttatcaccgacccaaggcaaataattaccagttcgttaggggtaagcgtggtactgcatactcagcattgcccacacatggtaagatgcccaataaacacttactgagttgaagtcaccaagttcttttcatttatacagaattgacaaactgtgtaactaatggcttagctgtcctttatgaaggtcaaggctgtgggcctggcaggtgaaggccgtctgattcaggtttcgattcgggtgtaccatttgagtatcaggatattaaatactattgtagctaaatatgaaaacaagtgttttgggttttttcttgttgattttttcccctctcaaattccttgatttagttaatttaaccatgagtggaaatgacttgatccaacaggatgcaagatttctcccaaggcatttaacaccgccagagacaccagaagtcgtgcttgagtccactctgttcatctcatgatagcacagatttagaaatgtgatcatcttttccattttaagcaacaggaaggcactgaggatgacaccagagtttcccttaaaggaatatacgcctgataaacaggacagttgtcgagtatttccaaacatacatttcccactagaatctctctctggagaaagatgcttcagtggacctcaggcatttgggggtgtgaggaggatggattaatgaatatggtgaagtcaccccaaagcagtgtccaacctgtagaactagaattcacactcaccgtggcctgccaactttttaactttggaagaaaagttcccgtttgatggtctcctcccttcccacggtggaaacaggagcatgttggattatgagaaagaccagcagcaggatgcagttcaaacacatcgtggggaagtcgtgggtgagctggcatggacccaatgtgatttcttcagtctactgccttgtatgaaactcagttttaaaagggaattgatgtggtttaaccttttccagccatcactttcccatggcacttagggtcacctcccaggggaaactgatcccataatttaggggaatcagtgggacaacagtactaaactactgaagcagagtttaggtcttctttgaggagaaagagcttgatttgatgctgggaaaaaaaatcttcccaggttagtcagcacattgctctatgcctgatgggctgcagagagcctgacttttccctcattccccgggtgcgcacagtgaattgaaaagggtcaagaggattaccaaaggctccagcacacaggaagctgtggatttcatagggggaaaggtggcccctgcaaaccaaagtcctctatttcctctagagccaggaagacccatgcttcgcttctcactgtctcctaagcaaaccgtttagccgtttgggtcccagtttcctcatttataaatggagaccaagagcccttccttaacaatctcaggagattttcatgaaaatcttctattatctggctcattctcatctatctgggtcttcctgtcccaatggccttccctggtaaacttttctaaactgacctccaccttcttccagccccagccctcacttccactttatccggttttattgtttcacagcatttgtcactgtccaagattaactcgtgttttgggtctgtctccctcagtagggtgtcgcggtaggagagcaggggccctggctcctggacgccatggcagctccagctcctgttggtcttgttcactgcagcatccctggtgcccagcccagagcccagcacaaggatctcaaataattttgttgaatgaataaagatcaaacgaagtaatatgtgtgaaagagctttctaagttacaaagtatgatacagatacaagccatatcatgccacactttagatttatgggctataacttaaatatatctatacagctcatctggtttttaatgttttattatcattattgttgttattactctaccaagggaataaaatagcctgtttgccaaatctgggccactctttatgtgggggttaggaaagagttccccctaaatggtacagctactgacagtttctcacacacatttcaagtaagtttagccaggacttaagacactcccagtaaccggaaggccatatatccccacctccgggactgataatctagatcaaaagagctttaagtgctcctattagctaaatgtaggtttgttattttatttattttttgagatggagtctctttctgttgcccaggctggagtacagcggcgtcatctcggcttactgcaacctccacctcctcgttcaagcaattctcctcagtcaacccctgctcccccgcccccaagtagctgggactataggtgcatgccaccacgcctggctaatttttgtgtttttagtagagatggggttttgccatgttggccaggctggtctcgaattcctgacctcaagtgatccacccgtctcagcgtcccaaagtgctgggattacaggtgtgagccatcgcgcccagctaaatataggctatattttgaagccgtgtttcttgtataatccatttaggggactgcagttggttcacctagattcttcctaacacctagatgagggttagcaaagccatttagaattgccctccgaggcccatgctttcttttttggatcgtgagggacatgttgtaggagttttccagatcactttcttgtctgtaggacaagagctgataacatgttttgaggaatcatgacagctctggaatttctttttggtgcctttgcttccaaatcagaagactgatggatttcttgaactgtgctggagggccattttctggcacactgtatatttaccacctcactccactaaacagttccccaaggcccctccactgctgaagggagagaggcagttggagacattttgaaaaagttttaaaataaaatagaaggataaatatgcttaaagctattctattccacatgagtggcaataaccaccagctgtcaccaggaaagagcagatgtaattgacaaaacaattcaaaactcttatggatccatcatcaataaagttaacacccaaaaagtaaatgaaagggttcaaagtagaactgggtaagctccccaggcctgccaataattaaatcactgaactacatacgagcataatttctttatgcagattaaagaggaggatcagctgggcaacttgctttgctgggtgagaatggagcaccatatgttgcttatgaaactgtcattaatgaaggtagcactggtgcgtgggggaggtcggggcaaaggggacaaaaggaaaatagaccatcattatttggaaggaaattgagtacgtaacatttatccataatatggaaaggaggaaatttctaccctgatgcagcagggaatggatgatattattcattaccacagtttagcattaaatgtgcaacacctactctaatttattgatggactgtttaagacgggtgttaaccggtttgtcttgtattataattgaattcagtctctaggctacagaaatttgagaagttcatcctttctcaatcaatatgctccccttcagtgacccatttcaagacagcttcataaaaataatgtattttgttttaataaatttaaacactatgacagctgctcaatttttattggttgttttttttttcccttcagatgtctctttgctgctgagtgaagccaagctcacaatcaatagtaattgattaatcagcatccccttcgaacaaaggtgctaatcagtttttgattagttcatcaaaccagatgcaaaggcagcccggcccagcctgatagttcatcagtgttctacatgacttacggctcctgagcaatatatgactgcagtgttcctgcagggagtgggggagggggacaacataattattaatttaactgaattattatgaacacaaacagttgttggtttattgcttctgacttgggtgattgatagaactgcagcagggacccatctgacatggcgcagtgctgaggcccagagtattcctaattgatgatgctggtggaaggggtggatggctgattcagtcacattttcctaaagaggagaaaaatgacttttgcatatctgagtgatccttgtctggctattgtgccaagagggatcagggccaacacacccaccagctttcttaggatctttgagaagatccaattgccagggctactgtatcaaagagagttgttttctttacggtcaaccagaactgagactgtctattaccagaaatgcaagcagaaattgcttacttccagcatcacattttacgtagggaggacttatccacccttattttaaaataaaactaggtaaatgtttttgcaacttctccaactacaccacaaagaagtggcaaaaaatgaaacactctcttgattggctgtctatctttctaatctatttatttatctatgcattgggatttggaaattcattcattcatccaataagtgtcaactgggtacttagtacatgacaggtgtacaacagtgaacaaaaccagcatggcctcctggagcttccagtctgtagaaaaataaatccgacagctaaactcaaactacaggctacataacagcaaagtgaagatatccctgaggttcgtcagaagcacgtagttggcaataaatcaattgcactttgaaaaatcgagtagtactatcttattctctcaccgggtcagacttatagttaaggactgcacctcaatagccaactattaaaaggagcttcagtaaaagcgcctctggaatctttctttccaataggcttgagtaagtgtctacagtcctatgacttaatttctccactgcaataacaagaagggccttgcttactgacttattaagtgatggatggaaaggtttaagccatagctggttggcagttaagtcccacaacatcatggaagctcatataattgtttagctctgaccactttaaatctcctccctccctcctttgtaggatatgcttcttattctggattagtaacacctaaatcctggaatcaagcatgaaacctacttttgcaagagctcagtgtgctgtgaaagaggtctgaggtggataattagtttacatcatggtgtgtgacaaaacaattgcttccccctcctccctgcccttccccacccctgacttctaagataactacaacatggctattctagtcccctccacagaagtaggcagtcaatgagttgcttgtttttttttttaaaaaagatcttgtcacataatccaacatccttaaattgctttgtaatacaacaaaatttctcccgacacattatatatctaggacataaacattatttgaagccactgaacagaggggctttagtacaatcccaaaggtaacttgtcctctcctgcgttaattaaattgtccccattccgaaatataaatatcgctaccacagagaaaacaggtgagtgggtgaccggggaggaagacagtattgatacaaatttgttttttgttagtctcaaaatccacactgattgctcagcaaaccaaatggccattttgtagaagtggatagagcacccacaggttggacactgcagtgccttacctaatgactagcccttacctgagaggtcctcactgtccagttcttctgcggaattgggcaactgagtaaggccttacaagtaaaaacaaatcgtttttcttttcattcctcgagggacataaacaaaacacttaagaactgaggatgaatttctttaaaaacatgagccaaatctcttgctatctatgtttttgatagcatgaatgtattaatccataagtacatttcttcaattatgtaattttgttcttaatacgcaatcgaggcagaaagattcctcagtctccactgttcaaaggacatgaaacatgaaggtgaatgcttaaaatcactcattcgtaacagcatgcaaaaagaaaatcaataaagcctgattgttagctgtcgatgctctgatatctcttaaataaaaatgtatttagatgttacatactgatgtatgtacattttatttcgcattttactgtaaattgaaatccgctgccaatactgacaaacacagttcattatcaatttatgatgatcttggatcacatatttcaaaatggtacagcatctgctaactgcagattgcaggttatgccttcatcagaaaatctgattcgcaaaatgatttttttaaaaaagagaatttcataaatcaatggtattcctgaaaaataaaaccctcaaagctgaaaaagcagttaggtcaggaggtaatcaaatcggggcttgaaatgcctatatccgagtcaattccaatgctggccagctgagatgcttctcagctagctctgatttgaattaaaaggggtgaagagggaagtagataaacaatgggaggctcagataggagatggtttccatttccttttgctttatttgtgagctgatcctttaatgaagtttatttaataacacaaaatgttagacattcaatgtggctttacttgttctttgctgttctgctcaaagtccagtgtgactaactgcttaggtcttttaagttgcacagcagtttgctcatacttctctagtcagatttgtcccttttgaagatgtctgtagacctaataaactgcaaggtctttggagaagcaagttgtgtttatttttgcatctttcccttctgctacagccaacccacaaagtgtattctcagtgagtatttgttgaattaataatttgggaataatgcccaatcagagcataaaagcaaccaaaacaaatgcttttgaaacaagtaatgtcaaactgatcactatttttaaaggcccaaatgaaccacaacagtcatgtgcaaatgatcactgaagcctgcattttgtaagttgctttatagagaaaccaaacgaacattgatagccaggtcaattctgtgaaagacggctgtcacaccatcaacccttgaggaagaagaacttccatcatgacccttgggtgctaatagttaacagcaggtgctgattaaaaatgggaagattttgagcccacaggtattcccaaactatagatttaggcaactaaagggaaagcagtgagcaatgcaatcaattatagaggcaactgagtagagatgatatccatttgttctgaaatctgattggttgacaatattcctatttctaattggcttatacattgtataaagactgatgaatacaattatttaaataactgttataaataggcaacataaagtactcctttgtagttaattataaatttgcagttctcagaaggctaatctctcacttctacctggcccaacaaatatcaaagcgtcctacatatgtgcttggtgcccactgaaccacattaaacaaggatgtttcaagtaggtagctttactgctgaaggcttatttcctcggggagggcattagaaagctaattaaaaaacccaaaaagacaaatatgtttatgaaatatcattgatatgcaaaggtttccattaaaagcaacagacagttgatatacacctcattaaagtggaaactgtcatttttaatggcataaactttaaaatatatcaagttatctggaatctactgctcggattacgttctaaagcaggaagccatttaggctactggcattaaatttgtttttgtagcactattatattgtgtgaacctacaatactctgccatagttggacaatttctgaataaatataattcaaaagaatttactgaagcactgggtgtgcaagtggggacgagcaaaatttatctcctaaaactgatttggcttaggtatttttctttcatgttaaaaattatacacttttcattttctcaaagaaaaagacaaagacgtattttatgaagcagagaacattcttcaaaaggagacttcactctaacaataagtgggaaattacttcttgtgtattctcttgaaactttcatatcatccattaaggcctctttctagtcactgctaattaaaatgtattcaacatatgtctttaaactttgttaaacaaatgaaagtttactttttgtccatatgggattatttttgagcaattaataaagtcctaaagatgcaaacatggtaatttaatatatgcatgatagccatctcttctgcagagatgagtatttaactttttcatggtgctacaatgtgctataacataccctaagcccgctcaggtaatgcttttgccgttgtgattcttccttttcaacagtaattgctggcttctaaaagtgatacaatgtggccatttaaaaccagggtaagaaaaacctcaaaaaattagaaacagtaagaaattctagagatattaaatcaattcaaggtcaaatacgatttaaatgcttatgggctcagtttttcagggtatcattttttttttccagaaaattttgaaatagaatgatcgaataaaacctccagaaaacaaaaacttagcccaccggccctagtaccattcccattatgaaaaacaaagtaggcgatggtctctctcttacctaagcagcatacatctgatcacttggccatattatggaaactcttacttccaccaccagccatgagttcagacgcccccgggagttttaatctaaaaactcagtcatcctgttcttcctgctttgtcagcttttgtggagagttttcccttcttcccattagcagaaatttggttcacgccgttagacagtagcacattgtttccaaactgcatatcaaggctgaaacacaatcttcaggtcctgcagccattcgtaaacctcttgagctttgctcttgtgtagaacgtacaatgtctgcagagtcccgtgactgaatgacagcctttgaatgccattgttatgtgctcatacagagagatgtacatagaggcacatacacagatggtggacatagcggttgtagtaatgcgcactgctggctatgtttctttaaaatgggcttaagaatttccccacaactgaatataaagtataataagaaaattgtacgtgcttttagaatttgaccatggtttgcattatttataaacgagtcaggaaaaggaagagctacaggggcagttttctaagggctgtgctcgtagggtacgagcatgtagctagcacaggccaaacattctgaaaccaaaactgaaaatgagaaattattcttcagaggggtttccagtttgcgtcttaccacaattgcatactgaattaagaacaatttaaaaactcattggggatatgaaaattcatgagatcatcagcctctactgtattaagaggtgaaaaagcaagaggacaggtagacttgaaaataataaaatggagaggggagagaaggggcacagagagaaagagagagagacggagacagagagacctcaaacccagaggaagccagctgactgcagtgcagcaaaagcacaagcactattccagaccatgggcatgctgtcacccgacccctcacattggggaggagggtggggaaggggagaggggacacacagggcagaaggaacaaggcacaagacacagaagcgcccacatatgaacaaacgaaaaccatcacacgcacccacacatcaagaacataatgactacaccatccgtgcgttaaatcactcatgcatttctcagaccatgtggtatcaggatttggcagagtgttttttgcattgctcaacatgcacacataacacaggattcttcctgtccaggccttaaggatgagctccaaaaacacaaatgctcaagatccttattcaaagaagatcccttgtgtcagcctagtctaaaaatcccattcttaacactcacatttatctttactatcagttaaatccttaaaagcacattgtggctgattgttgtttggctttctttttggagaaaatccacttgattttgaatcatgcccatgcacttctaaccttccaatacatgcttattccaatcagatattggtaagaacaaatggtcaacatacataaacaactggtataaacttcatacatactctagcaaaacaagcttgaataaaatattttaatgagtcttcaaagggaaagctttaaaaatttttattttttcttttcctttttataaaaacacagaaatatagaaggaaatccagtatgaaaacttttaagaccaaataagatgcccatagctgattgacttaatgtcttgtcatttaagttgctaagttatcaaacctttcaacatttctaggcccagatcaccacaacaaacatctcgagattattctcaaatgaatctaagtcaaatggttgctgtaatgaagaagttgggttttcagctacaattcattagaataaaatcagttctgtatcatcatctctttggaaatctcagatgttgctttgtaatttccaccacgttctattaccttttctatcctgacaactgacctggaagtttttccccgacatcaagcaaaattttagatattatctggctttcattacagcttctttgctgtgggttaaagagtatgctctttaaaacagtggctggagccctttgtgaagatgctacgaggattttggacaaggtaaagaatgtatttataagtgtattatacagggatcagcctagattatctatcacttttctatccctctgccattaagaagtcaaattccaagtatatatatacaaaatacaataaatcccttggctctaggtgtattcttcatgcactgctagtcaataacatcctactgaggtttcaccaacttgaacatcgtctccaaactaataggaaggcagttgcttctcacagtacacaaacacctctattacctgccacagaaatgctataaagtcccattccaagtgtctcttccttataccacaaaaagagatcaccttctctttctctctctccagggaaagacccgattaaaactagtactctaaaatcaggatcagcctgtaagttaacttcttatttttcagattaggggacaaatttcctacttcgaatagcctatccaactctgagacctacatccactagagtcacactaagaacatgaattttattgaagggacctagaaaatagaattctggagctttaggagacaaatggtcaatatttcttcaaggatctcacagaatttaggaattgtatggttacattatatcaggggtgtccaatcttttagcttccctggaccacattggaagaagaattgtcttgggccacacattaaatacactaacaatgatagctgatgaactaaaaaaaaaaaaaaaaaaaaaaaaatcacaaaacaatctcacactgttttaagaaagtttatgaatttgtgttgggccgcattcaaagccgtcctgggccgcaggtagcccataggctatgggttggatgagcttgcattttaccttgtagttaattacagtaagctcaaaacttaaagtatcttaaaaagaaacttaagtatcttaaaaagaatagaataaaatctctctaactacattaaaataaccctttgagaataatagataaaagtcaggaggtgctcaattaatgatgaaatctacaaataactgagcttaatggactgcaatgcctgagatgtagcaagcactatggggcattaccttagaaagtggaagttttatacctaattgatttctcatgactgtcagcacacctagcccctttaagttattttatgaacttttccctttgcaccaatgaccagaaagggcagaaagaaataggaatggggtggggaaggatatattgctcagtacccaagttcgttttgctttctcagaattcgtcataggaaagtcaaaagatggggtgacctgccaagcatcaaggcctgaccttcaaggacagctcctacagagctcagagattttccaactggtgagttatcaaatgtaggtctctaagtgagtcagtctgtgccaggaaatgtttctctaaaagttgaattaacatggcagggttggctgatcacctcttgtcatttaaatgatagatttccaccctgtacaacaacaggcaaagcgattaaagtaggccctttaccaaataattcccttggattcaattattaaaattcagcccagttttaaacatatcttttctaagcagtcttgtcagggctagatttgagctaagtaataaagtaatatacagatgaaacatgattctcattttctgattggagagacatagaaaagttaatagacttattccaatccagtaagtcattggtgagatggggaaaaagagatcatatttcctgatgcccctcctgagctttgactcacccagtttttatcactttgtggttaaaaacgtattactattttacctgcaagccacacacacaccagtaacttatttaaagtcccagttaatgctgataaaattgacacatggtatcattcttggtttggaggagttttctgccaaatgtgagcataaagttatatgaacacatagagattaggagtgaaccagtgaggggtggtggggtacatatgattagcaacataattaaagtcatgacctttctaaagaagaacaatgaccttcctcatcagaagctcacgattttaaacaggaatcttcttccctggtctacccttccatctcaactttactaagtgacacaaatgactcctcttcaagatttacctgggactatggcctatatataaacaaagcaactgggcctttaattcagatgttacaattttcctgcgaatactcgtttgtttgaagccccatgtatttcaaggtttggtggagttttgtaaggaggactctgtgccactgaaactcctacaattccagccacccagtggggagaaggtctcatctcagcttgcatccattgggtactgaactcacaacagaaatgacaagactcgacatcttttcaaaccttaaaaaattatagtatatttatgaggtcagtctacttgaaacatgatttcccttgaagactacatttctctttttcccaggcttgccttgcctctcagcagtgctgagaaagtagataaacagtaatgtgataccaaccgtgaactgctggttctgtcgtcgccgttgtgtctacagacgggaacagaggattggaggaagggaagaaacaggaggaacggcatgcaaaaaaagggaaaatggaaaaaaaatggaacagataatatatgagcaagctttcaaagaacatcgcgtgacaagcaataataaatgaaaagcaaaaagcatttgaagtgagttgcactgttttaagacatgccttgagctcaaagctgcgagccagtgaggaaaacagtaaattctttggttctgggggtcttgccaggacacatatatttgctagtcaatagtcaggtggacatgcaaagtgatgagaaacaccagtgcaaactcagtggctggtagatggctcttaaagcatcaaggctcaggactgcgacagaaaagctcagtcgaaaggctggttaaacaatggattcataacattcaaacattgcctttgttttaacccaacccacccgggcacttgggcttcttgactgccaattaggcatcactgactcaatcacacttttaggatccttttactgcttatgctcagatgcctgtagatgaatagacaggtttaagttttccatccagtgtattatttcagcatagtttagccagaaagttcaattaactgggaggccatggcaatgaacatgttcaaggttttcacagattagtttctatacacacacacacacaaacacacacatccattcttcactctaaagctcttcatgttaaaatccaagagcagaagcctttaatgaaaacacccaagttcacacaatctgccaaacgctgcttctaatcatatgacattccaaaaatttaagtatccagccatcctttcgctcacaattcagaaccacgttcaccattctgaggggctgggagtcctgctttcatggctggagtaggagagagtgcagttttttgtttttgtttttttctttttccattgctagatgaacttgctgtggaaggaaatgtattttgtctttttcttcttctatttctgatgctgttcaagttttctccttcttctaccaggcttctaagccaagcttgctgtacttgctcctgttcacaagaaattcctccaaggagctcaaggaattttctctttatttttggctacaggggaagtggaataaatatctaacaaaatgcagggtgacattctttttccagagtcattttatcaccactcttctagtcaacctcattccaatgtcaacccatctggccatactttcattttgagttctaaacttcccaggcacattccttctacgactcattgctggcaaaaagaaatggtgaaactgagacaggagttagttatctctagtcaaatggtggtggttgaagtaagattctgggttaaactgcaagcaagcagttcactgtccttttgtagaatgcagctatttagctggcaattgctttcatgagctgtggagacgccaaaagactttctgattcaacacaggcaatgtttaaatgcactggaacttcatatgaagcttttttggggggcaaatgagcctggtgcttctgatgtataaatgtgacacatgaattcacaccggcattccccttcagttggcatgctttccagaggatcctataccatcaaaaattagatcccttctaaggagccagaattaaccagaagtctgaaaggccaatgcagcttaatattactgatagcttagtttctgatgaatagatgaaggaaagagaaacatacaatataccgcataagaacaaaatacttacaagtcaagtctgtgtgcataaaatagcagtaaaaaacaataaactgtacagttgaaacacactctgtcacagattctcctgacacagatgacacatttccttagttgaaacatccaagtgcagcattaggtactttaaatttgaggggcaggatcaaatgcccatttgtacagaaacatttatatgcatgttaatacattttatagataggcatcggctcctttccaaaattacaaaaaagcaatcaacactctggctcattatttttgtagtagctcttctaatgtgctttcttttcttttcttttttttttgagatggagtttcgctcttgttgcccaggctggagagcaacggcgtgatcttggctcaccgcaacctctggttcctgcattcaagcgattctcctgcctcagcctcccgagtagctgggattactggcatgtgccaccacgcctggctaattttgtatttttagtggagacggggcttccccatgttggtcaggctggtctcaaactccagacctcaggtgatccactgccttggcctcccaaagtgctgggattacaggcgtgaggcaccgtgcccggcataagctttattttcaccaggtaaatacttaagtacaaatgatagaagggcggggggtggagtaagacctaagggttagagtcatcaaaaataatatcagcattaaccagtgaccccaatttactgtcttcctacatcacaacatcatgtcagctttaagatgaaattaaaccaagtgaagctaggcgtctgctcctaggtgagtactagaaaataaatgaaggaaaatccacagtgcatcttgcttccccgttctggggatgggaaatccatcaactgcacccaaaaggggaggaaagggggatgttgagaagaaaaaacacattctaaaatggttaacagcaaacacatgttcaagtcacacacacgattactgcagctggaaatggcaaaacccggagcagcaacggggtaggagactgcaggagaaacacaggctggctacaaagttcagagcaagattgatggtgtgtctggggagtcactgactccatttctctaagagcatctggtatgctacttgaacagaggttattttcaagtaaagaattaagaaaacattctttagaagtaactttgtgctccctgcaggagaccacgatgacagaatctaattctccttcataattgcgttatgacttcatgcagaaaccacagacaccctggctctgaagtgagtgcaactctgtgaggcaggatttattagggtatcttaatcagaaaactggagaaatgtgcaaacacaccctgtgaatcaacttgtgtggtgaccatattgttgggtaacattctaagcgtagaggcaaaatgcaaatactaaatttcaatgtaagtgataaatgctataatcagcttgaaaaatgaaaatgtctaattgccctaacaaagcctttttaaaacctcatcttgctgctgccttaaaaaaaaaaaatctttgagctagcccatgagaaaaacaggtcacaaaaaattgagctggacttatggtggtgttgggttatatagacatttaaaaggcctagctgagctactgtctcttaattttaattacaaagagagcaaatttattatacatttatattatatggccaagaaaaaacaatcccatcttcttgaaaacccattaagtgtgtacggtcttaacagtcactctctggctattttatgagtacagtcaaacaaggtatccaaagaagggcccagcaatattatttgaaagatgcacattctactcaaaattgacttctcttcttagtctcctagtcctacagtttatcagaccccatcttgaataaatgaaacatcacatacatttattgtggcagtatatttacaaaataaaaaaagctctgacaatgtgtgaaattagagacactagcaatttaactaagtagcaaaaaaaaaaaataatactgcaggagaggcagctgggcaatatttagttgaaacagtcatgtgtaagctccactgtggcacattctaatcctttcatatggattctctccaacttagaattgttcattgagtgtgacagactgggggtttaaaactaatccataaattggtccatgttctcaaacacaacgggtgccataaatgaaaatgaaaatcctagaacaaaattaaatttacaaccttaaatattttttcccccaattgatctgcggtgctcctgctttacaatgcgcagactgcaagcctgcattttagggtgtgtttgagtaaggtgtacattaaaaaaatgcacggtgtgataacccacaatctactcaaaaccagagcttaattgtaaaaaatttaaattctctcatttttgattgtcataagcctaaatgaaagcatactaagcagttagacatattttaatacactttctcccagtttattttcttaactaaagtcaataagaagccaatgggttttcttaattgaattccccttcagtttgtgttatggaggtgctttaaatctagacactagggcaggcaaggaattcccctgacaattttattttcatagttgtgctgtgctggccaatatatattaaatatatggtgggttttttttttttcttctctttcatgttatttgaactcgatcgaaaacaaaaataactgctggaaaattaaactctggaatttattttctcctggtttcctggctaattttctttccatctatgttatgttttaatcaaactcccctgtcttagggatgggagaagtggataggaacagaatgaaaactaaaaggccaaaataggagagacaggataaagctctcttccttgttaaagtcacctcccctgtgagtgaagagattgtgtgctacagaacagcagcaacgggggatgatttttttttttggataagcaatttcaagttttgttaaaagcttcttcagaattgttcactagtgctgttgtgcccctgagatcttttcatttgcaaaccagatgttctgcaaaataataggaatctgtatagtggtttcatttaacaagaaaaacaattcctatatcatgttgtgtgtgaatgctcagtggaagggggtacagaaaagaggaaggcagaggggagggaaggaaaagaagaggatgttgccacgagggtagtgatggagacaggaaagaggctctctgtaagttgtagcacatttttaagtcttggcaaattttgtgttagatatgggagggctgggtccttccagtcaagtcttttatttttcactaccaagatagctgtaaacatcactttttaattctgggaaacctgtattcacagtattatttgtttgcattgttgattaggtctttagtatgaaaacatgtcatatctttatctccaagattatttttaaaataaagagcataaagttattgaaattatgatagaggcattaaaaacttttccactagcatcacatttctcattcattttttaaaaaatatggggtcaggtggcctccatcactgtagtattcaagtcttttctcattccctcctaaatcaatataggtcaaaagctggttagctatgttgttatttgtaacaggtttacaattatcaggaaaaaaaaatgtagacacttaagacagtatgaagaaaaatggacacatactttttggagtaaaaacttgaaaaggtggcttattatgtaaaaggtggctcatgagtatttactagtgcccccaaaatattcttgtcactaggtatactggcatatcaataacacttgatgaatattccataaatgctgaatgaaaaataatcttaatgaagtagatgtcaactctagagaaaaaggcaatttagtaaacattctaggatgaagatgtgtatctcctagcaagagtggcctaatctatgcctgaaacataaatacatgcaaaataaacacacattgaagatagatgcttgaagtaacattggaccttcatgtgtaacttccaaaatgccatcctttcttatccacattttgtcccttctttgatggcacagaccaaagtccactgtgacactctcctcagcatctgcggcaccttctgcctgtgccaccgaatcaccccaattgtacagtatctcttattgggttccaatgtgtgtaacctgttctcgcaaccacatgataaggggtttagggagtattttgtctccataagcactagcatcgtgctgtacatattatgggcactcaatatttgttgagtgcataactaaaagcagaccagctcttgaaccatgcaaatatcaatagcaaagagtaggaatcattaggctaagaccctggggaatagccagctgtatttggaggaaagctctctatcatcatttagatggtcatgacatagattcagtcttaaggacaggtgtgcttctttgctttgtacctaaggaactaaaaacatgtgttctggtgtcaagtttccccacttgggcatattctatacatatcactgaaggataaaggctatacccaccttctttatgtgatccaatccacattacacaaaacaaaagcttatgatttcagactatgaaagccaaaaataataatgtgggcctgggggtaggaatcatttgctacaagctatattggtttttgagtacttagataccaataagaaaagcctggctattttcttttcctaggaacacaaaatatttaattgggtacgtacttttaaaaggtggaaaactcatttagaaatgacctacttcattcttatgaaaggattttttaatgtgtttcacaatttggccctatagctattcatttcttattctaaggtggttttaattttttaatttatgacagtcacatgtctagtgtgacctccaggttgaactcctcccagcctgaattttctctgtaagttgctaagggtatttaaaactgagtgtggagtcctttctatgatattcctcatcaagcatctaactcaagatgcaaccaggtacaaacaaaacaacagccacgctaactaggaagggaaacacaacatgctttcctgagatgattacaggaaaaagtttgatccaactggaagacaggggctaatactatcacagaaatgggtaagtttatgtacacctaacacacaaagtcaactaattacaaagaaagttaaaaacaagacagaacaaacactccctactcactcacactcccccacctcctcccgccaccccagcatggcatcagggttttcttctattctagtttttgacaggaatctgtgtgaaggactcttacccggggtaatggctggctgtctccactttttcacaaaggattccagggacaatttaaattatgcaatttatgcttccacatgacagcatatgtcttcatgaatgaaaccacacggacaatttgacacaataaaaaaaaggaacaggggcttgccaatagcaatagttgaaacagaaatatatggtcagactatcaatacacaggaaagaaaacagactccaaggaacctcgtggcaaatcatagtgaggctctgaatggctcccaatctaaaactgttttatagttggaaaaaaaatttaatggtactataatggcttaatggttttaaagccacaacaagttgatacggcaagttgacatcaaatacagatgctccttgactttcgatggggctatgtcccaatcaacgcaccctaagttgaaaacattgtaagctggaaatccatctgagacacctaacctaccaaacatcacagcttagcatagcctcccttaaacatgcacaggacacttacattagcctatagttgggtaaaaccatctaacacaaagcctattttataaggtgttgaagatcttatggaatttattgaatactgtactgaaagtgaaaggctgtatgggtacggtttctgttgaatacgtattgcttttggaccatcctaaagtcaaaaaattgtaagatgaaccatcataaatcagggactgtttgtattcctttcagtactttagagactacaaaaatttctccctagataaggccacatttagatgtgtgccttcacgtgtaactctccagacctgctccgtgtagggtaagcaggaggcagaaaacgccctgtgctcccacccatgaggggtatgattctgggtgggcaaagcagagtccgatttggcttataatttttctctctgaagggtctccacgatgaagctttaacatgtttcaaggaagtcaggcgactcagaacagaatgtcagtctgccttcctaacaaggggaacaatttgattatcctggttacggaagataaaagataacactggaacacttcctttcagagaaatcagaaatcaactatgacttctcgagtttaaaaatatttttctattgcatgtgtacatttttcttgtaatgaaaccctgacctagggaatgggtttcagttattgcatttgactggcagaaaagaaatagatgactgtggacttctttttttttttttttttttttttttttttttaagctcaggctttatgttactgtcaccgaatttggctgctgcagcttttaaggctaatggtggctgtaatgtaccaaacagtgcaagagagaagaggagtggaaattaatttagctatccatttgtcaggattcagactggaagattttttaggaactaatctaaatctaggggatagcctggacctttaaaatgggacacagaatcattcagctgcataacctttaatctgtttggagaaaggagcaaatgttaaattctacaagtgtactttctgggcaagataaatatatataagactgcttgttaagacacagtaagcctagaagatcacatccattaaggcaacgaattctacaatgttgtgttagtagcaattttagtttaactactcttgggtgtgccagtgagattctgggcattcattaccacaaatgtattttgtgcgcagggaggactcaactgctaacatcaagaggctaaagtgcatctatgagatcatcttacattaccttgagctgagagtccagtagcagagagacagaagcaaagacaagtttctgttagaggtacctttgatgtggacagaaatagagcattgtttattttttaaatttcctcttaaatggagtctctgcagtcggaactgtgataacagtgagttgtagctgtttgaggacataagattagctttagtctggagtgaaggattaagagctgtgaactgaagcgactctgctgagttgctgagattgattgtgagggggaggagttcagcgagtgctaagaaaggtcttaaaaaaaaaaagcataagctagtgagaaggccagccgcaaatgaaaagtgttgttccatataaaagagaaatgtggttgtttatataccacgtgaataaggtctcgactgccttaaaatgtaaacctggatagctacctaactggcaccttctagaatgagtggtaataaatgctggctcatacctgggcaagttctgcgaagataaaatagactggtgatatattttcttaaagggttaatatatgtagggcaatggagaattacgcagtatattttacactagtatctaaagggcacttcacaagagtacgagtctaatttggcttacgaactgggtagcaggcaagaaatgtgaaaaggtaaaaacctagttcttagtatgaaaagctgatagcacagttactctggaaatcagagttaggaagaagcatctttgatatgctggtgaatagtatagaaaatggaaagaatcaattcactaggtcaacaaactgagtttacttaagtttacagaaggaagtaacaaagagccaaaacagaaacacacacagacaagaatctaggaagcagcctggttggagctgagtttagagtgagacatgaaaaccaactgatggattttcagaagattttaaattaagtgctggcactgatggttttgtaaccaatgttgagaagcactggcttccttaagggttcttttttccactgtaatgggtagaaaagtgaagaaaactgagattagacaatctgttgtatattctatcaactgatgaggcctcctctttctttgaacactctgaattttcatcatctctatcttactgactcccatgaaaattggaaatgtctctagcatgtcaatgaaaaggacagcaatgatatctagggtgttaaaaggagctgaccatgaagggtggggagtcaaatactcagtgttcataaagaagtccagagacaggggtgggtaccagggcacacggttcagataccttgcagtctcaccagctaacaaaatgcagcggaaaagttactctttcaagagatatttttttctcacagaataattactttcacatgtttttgtgttaagtccctgtaaacacaggttgggaaggccttatctagggaaatccttcatgtcaagtggacatagtgtggccagaagctttcctacttaggtaggcagaagaaaccccatggctcccagacaagccacatcaagcagtatgagagagccactggatgccaggaagggctggatggcatgccacctccctcagtgacagaaacaagagacagtaaaactcatgctgaataagagtttcagacagtccaaaaagataaagccgcagagttagaaccacagtggctgcctcttccactcttccaatatgtgaccgagggcagggaggggcacatgagtgctcagcatggaaaagacagtgactccctctgatctcttgtgactacctaggcaacacaaacaggtagtatcacttgtcagcgggtactctctggagcaggaaggatgactatgcatttagtagcatggcccaaataggcacattgaagttaggtgtgtatattttcccttacatggactgagatgaaactaagacagagacaagattgaaagccacagtacttaccatttcatcaaacatgtctaagcagaagctataggcgtgttctctagtagccagctgccattttccctagcattttgctttcaatagtgatgcttaaaaaagaattcttttatgcataagctgcaaaatatctgacgtactgttaaatgctgggatgtttctgaggtccttaagattcaacttaagaacatagtatctaatgtcgttggagttccaaaataaaggaacgattaaattccaaggatttaaagggaacttttcggcttctttttatacataccagaaagacaatatacattcaggacattttcaatggtaatgaagataccatacctgtgatgatggtaaggatggtggtggtggtggtggtggtggtggtggtggttgttgtgggaggagggatagttgtggggggatctggatagaaaaaaaaaggaaaatcaaacccacaatgctgaacacaacaatgaccagtaatgacaaaacaaaggcatgaggacattgagatgtttgtttgatggcttccccctttaaaaccaaaagttctttccctgcaagatttatgtcttgtaattatatcccaaagccttagttggaagagctgagaaaagaagaaaagagaattttcattaatgaagtgaattagggatgaggagatgtgaagagaggggaggaaaaatcaaaacatacgacacccctcttccctaccagatttcaaaggtgaggttaaatcaactcagtaccaagagggtacaatggttgtcatttcgtttcagcttttacagatggcaggaaggaggaggaggaggtggtgctgctctattagggggctcatatcagccaaggatgagcgtgcccctgcacacttgctctctgtgactgttaacttcattattctccatcaatacaacccagcaggaagtaaaactacttctctactcataataaatacaaagaagagagaatgtcaccactaaatatcaagttccaggcatgtgagattttactgagattttattctttaaaagtcaataaattttacaacttataaatattaataagttgcctttgctcatattaaaagcttgacctaagtagactacagtgataaaactgaaagaacgttttccatcttgtaaacaagagaactaaatataaatgagactcgaccttcaaagccaggaacctgatagggaaccctctgtcagatatttgatatactgtatattcttctatcatctcaaaaattatttggagacaagggaggggcaaatatgaaagagaaaaaaaaattctaagcccaaatgatcaaactgaatgtgttaaattgtcagcaagactttgaactaagcaatcattctgctataatagagcataagacgatttgaaagcttttgattttaaattttatctaaagcatgtcaactttttctccctgacacatctggtgtccttttatcttcaagtgagctctcagattgtctaattaatacatcaaaactttaattatatactgcacctttattgggtttggtgcaacttcccaaaagtttatagaaatattattttggtgcttggttgcaaagtctacttaaaatgatatctaccatcgatcaacaatctgagcttttaattttcctcacaaattgcttctctcacacaaacacacttggatgaaattaacagagaagaatcaactgttctgttcaatgggaggctccgttcctttaagatggggatacaagcagtttacactttcatttaaagcagcctcacgtgagtccaaaaaaggatgtcgtttaaaaaaaatctcattctcctccaagaggtaaaaatggttaagttagtgattttaaactacctttttaaaagaaaggcagaatgagaaatacggtgattcaggccatgtgttcagtcttgctccttcacactttttatggaggccacaggtagggaagcattttgtgacctggaaactcatttggatgcacctacacacctgctgcaggtgtcagcatagatataaatgaaccaagtgcactgacccctgagcccagcactaaagacgtcccgctccctccactacacaactaaactatatccagagaggtgcctgctgcccagcacagggtcagttaatgtgatttttctgttttgcttcaattactatatctactactgaaaaggaacatttgttcctgggagatttcccctgatatactataatcctatttctttttttttttttttttttttttagacggagtcttgctttgtcgcccaggctggagtgcagtggcatgatctcagctcactgcaatctccgcttcccgggttcaagcaattcttctgcctcagcctcccgagtagctgggactacaggcatgcgccaccacacccagctaatttttgtattttttttttttttttagtagagacggggtttcaccatattggccaggctggtctcaaactcctgaccttgtgatccacccacctcggcctcccaaagtgctgagattacaggcgtgagccaccacgcccagcctataatcctatttctgcacctattctaaaagtgttgacataaagtgtgtgatgtccacaatacaataagagtagatctgaaggtgatttgaaaatatgattatgaaccaaggggtggaccagactaatgaagacacagacttcagagaaaggtcatcagtccctcccattttgtgcaaatcacacactttcaattatctttatcacgactggggcaactgttgtccttcacatctggctaaagtgacctgaaagaattagattcctttaacaggtaaaataacttcagtgcttagatcatttctagcaataagagcaatgtgaggccaccacttaagaaagtacagagttggagttaatgagctgtgcttgacatgtagaggctaaaagaataaaatcagttggggctcaggcactaaccagctagattcttcatgtgtagaagttgcttctagagagttaaactttatgggggcttgctaacttttagttcataaaatacttccaaaattatggtagtaatacaacaaatcagctttggaaagaaaatctactcaacaccttcccaaactgctagagtattttgttagtagactagtaataccttaggctaatattctaatctgtcatcccaagtattgttactaggactgattaggggagataggtagtatattacagatctagcaaatccctagacaaggataggtgtaccatcttggattagggagacatgtgtatgtagctgtgtctgcctttaacaggtggatccctatatttcttggttttcagataatgcactctggcccagacagttaattctaaaaggatcatctcatattgaaggggattgttctactggaaagcagtgagaataagagaatatacaaagaaagacatactttgttgtggactttagagccaaagtattttggttctaaaacacatttagaaacctggtgaagttggggaaaactgtacaacctttctgaacttcagtttatcatctgtaaaatgggatcgtgataatgcctgcctcctggtgttattgtggagattaaaggagaccatgcttggaaaatcgttaccatagggcatggaataaagtgagcactaaataaatgctagctataaactactatccaaaattattcaaatatatctgtccatcaaacccacaaaatgtttcttctcttgaaatgtaggggcagtaagtacaataaatcaaaactgtttatccagataacttagtgttctgaatcaaggatgcacataacagactaatggaaatttgtcactgctttttataacctgcagtttgtaaagagctggactgaaagccagtaaacccgggcaacagcaatgtcggggactcccatgaggcgcaggcccttgtgtgaagagagcacatgcagaaaaagggaggaatgtacttttcacccccgccgagcagtctgtggaaagaggtggctctgcatatcgccagctgaaaacgggccatgctgtgtcccctctcacctatgtagaaaagctgtttgcttcacatggatttccttaactactgggagaattaatgttattatgtgtgaacagacataatacaaccacggacaacattggtagtgcgtaaagataaaacatacttcagaagtctacaaataaggtgattagatgtgatcttttaattttgcattatgctaggaaaaaaacctcaggtataggctaaggattatattttaatatccatgcagatatggtgtaaagcatgcttctatttgattaaaaagactgccactcctattttcttcataagcaaagtaccctggttctaagacactgtggtgtggatatttcaaaggtataatttatgtgtatctaaacatttattcatatatacttatatttggattatttacactggtaacatcaagaaaaaaatacccccttcacacacacacattcaaatatttataacacattgaaatgccgatgcctctggttactcattctttgtcatgtcagttcatggctattttttggcatatgaggcttcaattgaacagaagagacttaatttgatattataaaactagagaggaggtgcacatctcaactaaatagaaaatattcaccatgtgcaaaatcaacagtaagttataaacaggaagtaagtttaagatgcctgaaatgtagtagatgctcaataaatatctgttgactagagaataaaattcatgatgttttaataatcctgtaaaatgatattaaaaaaacagacacattttttaaaaaagcttttgttctgaagcagtagctacaggtggttcatgtagctacaagggaccttgtatttgttctgagtatttactggcttacaacatcttttggaattaatagcttcatgctgaaaatagaatagttctgctcatcaaagcaggagaaagctagcccaggtatcatagtaaaataccactgggaataaactttctgagctgaaaagctgctaattggtaaggctgaatgtttcagtcattacttctaacgtaatctccatggcttgtgcctgaggacacagctttccttctcagcatgaccaaagactgtgatctagtagaaacacccaccattagagggagagaagaaaagtcactatcccaggtggagacactagggtccacctcaggccaggcttctttaagttctagaaggaaaccaactggtttttgattttcaacttgaccaaaagctttgagagtaaatcacaagtagcagctccatgtgactgactctagtagaagagcattttatcttctcacgtaccgtatacatacagcatataatccgagtgagctttccccactatgtttgaagcttcacagcggtatgtaccattatctgttttgtttaggttattgatgaacaggttgggcccagacagtacggcgtgttgaggcatttcatcatcgactctcacccaagttaccatcacaggcctgcagggggaaggggaggaagacaagtcacattatcattccccattgcatcaaactgctcacccacatgcagggtgacacaattaatgaggacctactggagatattttaagttcacagaattacaactgtgaagtctccaaaaatctgtttggtatacaatttttttcttttaaacacgatcaggtgttgaaaaactttgaacagaccacaagcaggagtctcattatttccaattcatgttcgacaaatcaacaaataaaacagtgtgcctatttttatgccccgctgtgtggtttcacaccaactcaggcaggacagacctcacccattgttaacatctcattaattaggaaagaaatcaagttcttggctagtgatacatgcattcatctgatggttactaacacaccaagacttgtttagaagcctcttgtgatatttagatggattttgagtttcaccaaaaggaatggacttttatatctgaatagtgcttttcttgggcctctgtttgaaaaaccacctttgattctggaaagatgtaatcatttcctcttccctttaacccctccccataacctgcatccccctacccagaatgccacccctgtctctgatgccctagtccaccatgtctatctgttccttggcaaattgccttctttactggctctccaaggcctgcatattgtgagaactttccctgtgtgtgcacctgcagctccccaagctcgtgggtagggctctcaggctaatcaccatggcatgcattccacatggatcccttagggcccagggcatttgctcatcagagacaagtttgttttagtgatttaaagtgccacatttgtatccatcaggaaaaagcaaatttcataagattcgccaaagctaaaaatgcatacacaccaagtatcttttgaaaacttccattcttcaaggcacttccctcaacctcctatgaagttgaggccacatttagaattgtgcctgaaaactttcattttgaaggaaggacaacagagatccagcacacaagtgacttccttccagttcctacagctgcctctaggagcagcgacacgacaagagacccatgcttaatgatgaacggatcctcaagttagccctgtcaagtagcattccaattttcaaatgggatgtgaagttacaatttttctttaattacacatgggtttgtcatcacaacccagtaaattatttaaaaattagtactgcatatgtcctccttgtaggcaatggcaaatgggcctgcctggcaatcagacgtaatgtcctgctgcttgacagctgaaacaatcagtaggggtaactgctgagaatcttcacaacatttaatggcaagttaaattaccatttttattgtatgcaatttcttgagaaaataaataagtaacatgctagaaggggtagcagtagagtaatgtgagcttgctcacacaaccatatactggttcctatttgaaaggaacaaacaaatcccttctctggcataaatgtcctgaaggaaacatgtaatttactgtccccgtggcacattcaattgaacgaagtaccttcttcaggggaaaaatacaaaaacaaagtataggttagcaagccatagactgtaactgtggttaatgtggccgagcacgggtattgcaagcggcaagaggcctctgagaatttttttttcttactccattggattattctggaagaaagctgctaattagggaataattcaaactgtttacaaaaagaaagatctgaatctttggcagtgctcaaacgagaaaaagatcactctgctgaagctcgaagcattcaaaaccaaataacttggaaacaccagagggaaagtgaaacagaaccaagaccactttccagctcctaaaggtcatttaaaactccacatggttagcacagagggaaggaaattccagcacatggagaggtaagtgcaaagatagggagggttgaaatgagaagagagaaccaacagcaggcagagccccctttggctttctggtctcttgtcatagatcattccttagttaaagtagggaggcttctttccagagatttctggggaagctttgttaagatgctctgaattctttatatgaaaactgtgatgacgctggctagcaaaactctttgagggaaaaaacaaaatcatactacggggacagcaaagggagctcaatgctgttttttgttgggtaccactaaagtttgagcgtccttaatcccaacattgacctattattccatttcatgaatcctcaacttgtttttttctttcccccactaaggaacagttaaaaacaatctttactagaaacactaaagaagtgtcccctgcccagtaagtaaactgaataatagttaaaatggtaccactgtgtggctttttttcttgtattagtgatgatatatgtagttcctcaaattcactttggatcatttcacagggcaactcaagtggctcctttatactttcaataaaataagagtcttagttgtttcttctttttctcttatgaagtggcatatatatcctccttaagaaaagttcctgagcttttccttactaacaaaaatatttctgggagtcaagtatgaatgacacttttctttgagggaagaagatgcaaaattaaaggtagggcaaattcatttgcctacagctggccctaaacatagcagcttaatgtaagtcttaaaaccatctttctagcagcttagacattaacacaaaaggtggcagatatatcattagattgtagggacaccaataatttattaggattatttttttgtgtgtgagagaaaatagtcctgacaatcatgttgataataataaaatagaattagctgagatttcaatcttagcgggcatttaatttttctcccagtcctgaccattaagaactatggatatttatttccactctcactgaatattctttagttcctgaaaaaccatccatcctttgcagcaggagacaggtgacaggccaaggactggtgaatgcacatgtctgtgttgtgacatttactgcgcatgaccctctgccaactttggccttcagaacttactggggcttcccgatggcttcacatgttaactcaagcgcgtccccttcccgggttaagccttgtagaggataagtcatctgaatgtgcacttgaggcttatctgtgtgacaaaaacacaaagtataatgtttagcaaatgatatcatcaggcaaaatcagactcacacactgcctcaaaaccacagtaccagcacttactctctcccatccgatgccttcagtaacacccttctaattagttggtaatcctggcatttgctcaaattaaattgactaataactctaaggagtgaaccgcaaatagataagagattcataagccaactgcgccacatcaaacatttcctgtgaaatacattttgttacactgaagtttatctccaaactcactcaagctaaaggaaactcatttgccttcatgctgaggtgaagccatagatatctgtggtgctcagaattgatacattttatcatatatcatatattactatgtgacaatatgttgtgacactgcatgttaataaatttgcctcttctatgttcttgttttcaaatgagaaaggcagactgaatgactttaagaaaaaacaactgggatattttggaagccctcccagtgaaaactctgacatctcagtgtaaacattaaaaagaaaaaatactgacatttactcagcatctactcccctaggaaccatcattgggggtagaataagcctagttttagggatgggaactctggtacccacagattgaagtagctcatccaagatcacagagagagagacagccccataagtgtatgttgggatagatttctgatccataagtgcatttccaatggcaatccataattaaagccaggtatagcttcctaatgcagtgaggtacttaggaaggagatataagtattctcatttccaccagctacttaaaactgtatttgtcagtgtggggatatggctatgagagctgaataatgggaggttcagggaatagggagggaagctacagaagttggaattaacatagatacacatacaaatacattaacaaataaaatctgaatgtaattaggagatcgtttttttcagtgctgaactaacaagctattaatccctaaatcggttttctcatttaattctgtggctctgtaaatgcatatttttggaaatgtacccaagagtaataaatgtgagagggcaagacatcggttggctgaaaggtcaaaataattaccatagttttactttctcagacaatcataccacctaaacaacagccccttggccttttacaagctgtggttagctcattaacattcatcctatggaataagggagaagatagaaatattacggcaaggctcaaccaatctcatcttgtacacagctatataagctgcacaaggaagtcctcactagagatagctgctttctagatgcattcttatagtctctttcctatcacaaatctttctctcatgtctctaaaaattacatggcattcaaaaccttttaagagagcccccttgttcacccaccagtgtgcactgcatactgagaattggtagtgctttctgagaagctaagtctcttgccagagaacgtaaagttaacaagcccagaagctccagctgacccttgcaagttacacagttctattcttggacacgttggcaaagaaactgtttaagagcaaaatggtgttgaggtttccagatactgataactgggtcgggaaggtagtcattaaagaaaagcagaaatgcttgtaaaggataaacaggatgaccttgaaccagcactgggtggctcaagagctcctgggcaccccctttcagagacagaggccacatattaggctaactacaactgctgggcatcaggtgtgggtttattgtttgtagtcgtgtaacacacacacactagttagtgaagtttagtttttaaaaaagatacaaaaaaaatgaaagaagaaggttatgacactggacacacagaaaacagaagacctgctacctcacagttcatacccagaaacagcagcacttactagagttcctagttaggggacctctatcattcttacccatgaaccttctgggtgaggctaaatttaaagcccaaaatttgggctgaaatgtaacatctgcttataggttaatctctgatctacagaaaggctacgtttttcatgcactgctgactttggccattaattaagaagaagcagaatgcttgctggcctatgtggaaggattttgtttttcttcttttttccttaatgtaatttacaagcaaacagagagggcatatttttcagcatagtgcactaaggattttacatgctcaacttccatcaataataaagacagtgttgaaaaacttaatccaccctgcttcttcagtaccactgagttttagttaaatgcttttttatgttcctaatgagctgtttatcagttgccaattattcacataaattgggaagaacaagctaaggatttgttatacccaaaatttattttaaaaaccatttactaaatcacaaaaaatacaccttcagttttgataactgattttcccaatttactctttaagttctggagaaacatctactatctacttatggctacagctgccacagttaccgtaatagctggctgaaaaggtaagcgttagtcttgcctgcattatacagaaaaatgttcccctctgttgacacatgcagtatttataggcatattatctgaccacgggcagatgagctatcctctcgcccagcctaggaatcaaatattatagaaggtctatgtgccgagatctatccctgggtgatggaaacttaaaaataaattctgttccccttcctttgtcctgaaagagaaacttaagcgttttcaacaggtggaatagaaaccctgggattccactggcacctctagaactaagggacattaaattttccattgaagagcctaactacgatatgaatatgtcaaaataccaaacaatccagatggctgattgaatagcccagagctcatcatttatattttaattatgttcataaatcaaatgttataacccaccaaaccttttctgaaacagaaccagcctccaagatttatttttaagtaatgaggtaaagcctagtacattttctgggggatcattttacgcctcggttggtgttgtaaggcatgaggccaaaagccagacgatactttctacccaagtgcaataactgcccagaaatgtatcactcagaatggcttaatgtcattataaaatggaactgctatataaaaataagaaaaatagttaggtctgtacacttaaagaacattacagttatagacatggcatcatcaacagccaatcaattaggtcgagggatctgaggttttcataatacactgtgaatttttttaaaccctgtaaaagacatttagcaagactgctatagcagacaaatttgttcattagtcaaagttgcacagagggttaaacaccaggaggctttaggtcacactacagtagcaaccaattaaaaaaataatattagaaagacattctgatttgatgagactttctttaaatgtactttgctctctctataaagggaaaaaatatataaaaggaaactcttaaagaggttggaatgggttgctggcagattacaattgatttcatgccagtctgaccttgcaccacattctgtgatcttttcagaagatgaaactcaagattctgaacctgtatttcagtttcctatgtaaatgaaaagacacagtctcctctgtaggtccaaacactaacgtatcaggtctttgcattcctttatttagaaaaaggtactttgcagtttcttcatgactgggatgtcacccttccagggtagcagagaggagcagagctgagtcagtggaaaaggcatcctcataccctggcaggagacatgccagcgggagacctattatccctggagtccccacaaccttccctctcttcctaagaatttctaaatcaggaaatgcaggtgtcatattttctttgatgtgctcaatgcaactaggtccaggggcttgagtgcaaatctgtttctgcaactgcatttgggacacaggctcttcttcatgtttcttacttagatttcacccaatattctgaaacaccaaggagtatggggatttgatgcttgtggatcaagtgctaattgtttcaagtcctaccagggagaactcaagggcagcatgagcacagatgatatcagaatgtctgggtagcgggtctgggtcagcccctgtgcattcaagtgaggaagcattgactgaagagtctttgtcaatcatggaggattattggagtttggagtagaacgacaatgcaaagattaacctgagatttggtgagtgttagaagctgtttgagctcaaagcaagaatcaacccctacaatatggctgtctaaattgttgggggaggacagctttgcaactaaaggagggcaatgtctagcaatgccaggtgactgggattggtgaatgaacggagtcacacagagctctcagaggagttaaagagaacatcttgcaaaatatttgctttctattgtcataatacattcatgaataattttcactgccgtttattttgtttgtttgcaaggtgaagaacctcctgctgttacatctgttgttatgactcatagtactgaaactgggcttcctgaagagggctgaacgattgtgagtgggatgagtcaaatctggtgggactgacgtaagaccaataccacagtagaatgcagtcttctcttgctgcaactttcaggtaggtttgtgggtattagaattactgtttacaaaaaagaatcaaatttgatcccatggtgtggtggcagaaagctttgttcccactgctttttaaatgggggtacatactcacagaatattcttccatgtcttggaagcaattctcatcatttgtaagcaaacactgggcaagaaaatccctatagcaagattttctgtacaagaatcttccctctgtaacaagagaggggtttttttgttttgttttgttctgtttcttgaagtcttggtaactagaacggtgccagggactggcacacagtaagcattcaagacatagttgctggatgaatgaatgaaggaataagtgaatgagaaagtgaagaaacattggggcatggacttctccttccacctttactactgattaaaaaataaataaaatcagatcacgagttcccgttagtcctcatcacagaatataattttgtttttcttttggaaggtcaatccagccgcccaaatcagaggttcagcccaggtgttctgctttacatatttccacttcaccatacatttatttagcacttccgatgtgtctctaagtggtgtcttacaggaaatcagaaaggatgttgtttgaccattccttttagatttttagatgccagcttcacaactatttaaccttccacacaatcaaaatttaaccttgagttaaaaaccattaagtgaagtatgtgcattagaagactggtttcactatgtaagtattcaatgtccacagccacacagacacatcttttacaaatacattaaggtcagtgagatgagaggaggtggttcttagtaaaacaggcctctttctgcagggtatgcattcagaaggcaggtataaaggcaaaggcttttcccttaagggttattccagtcttgctcacgatgtatttgcccaacactcactctttgtattttgaatactggttactcagcctcttgacacttttggtactgcagattgtatcactaacaatctatagtccttataatatcaggaacttggaaccaacactactctgtgttaacacaaagaaataataggttaaaaaattagcttcaatcggggttcttcattccttgattatttctcataaggaatcataaatactaaaataacctccctgaaactcaattcactgctttaaaaaaaaaataaaagggagagtgggaggaagagcgtattccgtttaaaaaaaaaaaaaaaagagagagagagagagagagagactggagatcagagagaaacaggccaaatctgaaaacgccagctattatgctctgaagaatacaacctggaaacagaattgatgagggagaggatttgacatagaagctgctcttgggaactaagtgttatcctccactccaaataggaaagattttctgatttccaggttttcctctctccttcaatgcagggcactatcgataccagagaaacatttattttggcacagataaagaacaggttttgatcatctcctcaatgcccaattttcctccagttgagggaatgaaagaaaaaaaaaaatctacccttctctggaccttggatgaacagggctatggatttataaaatacctagctacattcagtcaataaaactcattttgaaaatgatgcccacgtatacaattaactgtcagatgataatcagagcaggcatggcattcaagcacccatttctagagtctttgttttcattcttcttttcaaaactcatctctgagttttctttctttttttaaaatatgcacaaacacaaaaccctcaaaaaatgaggatttttgccaaacattttaaagagcaaggctatgatgggtgaaagcagaagccacacagcagtaattcaagagcttcatattcaccccagtccagaggaaggctttcctcccttgtgcaaagcaatctgaattccatactgagggtcacagcttttctttgaattcccagcttatgtcgctatgtgttgccaccttgatgctatttagacagttttctcttaacgctcagacagtgaactgttcccatttaaacaggcttttatttgacaagagtacattccctcagatctgaagctctactaaccgtgctacaattgtatcacactctgctataatcaaccatgttgtaaatttgggcaccaccacctgtacagacattcgcaagaaaaaaatgcactgaaagattttagggtcatacagctcggaacattaaaaagcaaaactgttctctgcataacatctaaggaaagagagctttgagctcttccagcttgggagcataattattttctgttttaaacatttaactgtgtgctgctgctgtacccttgctgagtctcagaatgaaagctagaaaactaagagacctactgtatgttcttcattcccggcaacgttcctatgagaaaaccttattaatgagcttgcaaacgagcacccaacagggaaatgtcacaaacaagagcggctaatgccccagaaaatcaaataactgaacacttggctgattgtggtgcctttcatatttataataaaaaagggggggggactttaattcactgattctgaaggggtcaacaccttgctgaacaaaacaactcatttatttatgttcagaaatctccagatgataaattacattgatgttaatcacttcaatgcatactacacaattaatatctgtactcaccaaaaacttaaggattattaaaagtatgacagcatacacatctggctgatttttcacataattgggcacaacaatttctcctggtatcacaaataagggtcctaacaaacaaacactgcaaaatcctggttcaattaattaggacttaaatccacaagacaaaagcaattccaagttgcagctcaagccttgtcttctatgccatatggtagcactccattttaaggacagaggtgcaacacttcctttctttttatccttcctctcttttttccctgtcttacttaaagtaagatatttaatgacatataacgcaggttttcattatttcatttcctttttaatagtattttttaaaaattacttgatgtagaattcaaatccatgatctgtcatttaaccctattcatgtcctggttaacatccattcatcttagatggggataaagagaggtttccataaaccttcatggtgtaaaatcagccaggcttaaacaagtgagcatatttaataccaatagtatcagattagatttgcccccaaggtagccttatttactcggagtagactctgaggtccatgaatgggatcagtatttcctagtgataacctattgtttctcaccgagaacataagaaatctttttaggtgacaaaggaaaggacattgaaaaatattagttgtacatttattttaaagcttattagacactatatataacaaatgaaatgtgtaatttaatagatatttttacataggccctggttaggataaagcaataaagtgacttaaagaaaaattctaaatcaggtaaaaatacagatgatgcatgaacatggcaaatttgtgaaagtggtcctcaaataactgaatttaggaaaaccctgaggggtaaatggactccttagattgtaagtagaatatggtgaatatgtgattgtattcatcttttccaggtctatagctatcaaagggtttttaaaggggccaatgatccccaaaaggttaagaactgctgacttcaacggcatgagtcaacattaaaatacaggtgcaatgttactcctcacaggcatccaaaataattcaacctccatgcagagtggctactgaataaattattctaggaatctcatgtattcgagtgtctcttctttcctcatggtcatcaaaatatggtgctacttgtctgcagagagaggacggctgtggggggcactggagttgagccatcaacagcactgggcaatgactgatcagacttcagggcccagtgactgagtgcttcaggcatttgaggaatgaaactttttgttactgcatagctgctagtgttcaaggagagtaaagctggtaggaaatgatgtagagaattccaactgtgtttgaagaagctacaaaaggaattcctggctgactctgcaaagttctcaatagtgctctaggagtggagggtagtgaactttcttgagcacagagagccttacttaagatatcaaaccagatgcgaagttccattcaggttaatataatgcattgtaattatcttagctttcctttatacaaaaatatttttccttatgtatattctgaaaagtggaataaaggctaaaatatttgtatgattttcttggataaaaaacagagtctcccacaaaaaggtgccatattagagtttaaagtatcaattggtgcatccttgtttttggagggcattagagtcactttcctgcaattaaaggctcgcagtactttgttagattgaagtcaaatggattcagatgtggagccttattccttgtcttagaatctacagattatggaaaccaaggcttataaggatcattatcaagttttccaaggagtaggaggtgtagcgcttgaaatattttgcatttgggagtgagggtaatttggtaggtgggtgggactatattctatttaaaagatattctgggaaaatactgaaagagtttaggggtggaaactgggtgaatatctactcaggacgtacaaaggagctaatgtattattaaagctaatgggcccctacaaggaaagttaatggatattaagtttgcttaaatgaattacatattaacaaagtcacaagaaatctactatctgctaatttagataatatctgatcatttccgttttcccattatagggacattataccacaatagttttagtgatatgaaaattataagcatgatgcccatattgaagcagattaaatgaattaacgaggaaaccctgcattatgtaatgttaaattgagccaagctcacggagttaagaaaaggttggaatgggatggtttcttagaagcaactttttataacttttcctgccttcccattttgctcagatcatttagacaaataatagggcttgtatggagttgaatggtggctcccaaagataagtccatgttctaacccttggaatctgtgactgtagctgaatttggaaaaaaagtctttacagatgaaatcagcttaaggatctcaagatgaggccattctggattatctgggtgagccctacatccaatgacaagtgtcctcagaaaaacacacagacgagagacccacagaggagaggggaaggtcatgtgacgatgaaggcagagagtggagtggtgaagccacaagttaaggcgctcctgggactcctagagctggaaaaatcaatgaacgatccatccctacagtctttgtggtgggagggggtgtggtcctgccaaaaccttgattttggacttctggcctaaagcgttgtaaggaaagaagtttctgctattttaagctaccaagtttgtgacaatttgttatggcagccctaggaaattaatccaatgattcacaaagggtaaagcttttcctttatcagacatccaatcactaccatcccaaccaaactctggtaacatttcagtatgcatactcaaagatcaccttgatttttcagaagccaaatacaaagtgagaagctggctacttagccacaaccttggcataagaatggctttgtgcagaaaaagactttttccttttaagcagaagggtccagaggagaagatgaggaaaacatattcagtctacagggcatggtaaggagaaaacctcactcactacaatctagcttttattgatgaagccatcaagattgtggcaatgatcccaaagagtcgacttttcaactcattgctctaatttaagctaaaatagaggaggaatgtcatttaaaacaaaatgccgacgtaaatgggaaaaaaatcccttctataaaaacttcagtacttatgatgggataaaaaaagggggaaaattaccctagattttgcagttggcatagaaatgatgacagtctatatgcaaagaaattaattaagtcacgtgttagagcagattgatattatttcagttttacctttgggttcaatgtagcattttcaaatcctcattggcactctgtaatatggcagtacaatatttcaataaaataatcctttatttttctagcaaaaataagaattctatgtatactatataaaatgaatgcattgaataaatggcttctgaagagtttctatgtaactgcaactctacgccctcagaataagataccagggtactcacactgtacttctagataccgctgggtctgcaggtttccagtgaccgcagggtgctccacctggcagatcactgggaccccatcgtcctccttgtgcaccttcagcatcagctgactggtcacagtgtacatgtctgaccactcttccacctccgatttgcctggggaacagaaaatgtaccaagacaccagagttgggtgaatttccatcagtttgtttttatgtcctcccctctgtcctctaaccccaacattgctattttaacaaatatgatggcagttacttgggatgagagtaacctgtggatagttacctgataaagtttttatttccttaatttatgacttttcaaccaggcagcatagtatttaagatatatttcaagtccaaataccatacactatttttactgaaatatattatgtatggtttttctatcttaaaacctcccagaaaaagacagctgaaagttgaaacattctgacatctggctgctcaaggtattcaggaggagaaaaagaaaaatgtttttcacccctacaaccatctgaacttgaaatattgactaggctgtcatgccatttagaaattctaggatattatccaaatcccctaagtaattcaacaagcagtagagttacaaacaaccccctttgcctactcccatcatcaacaattaagagagaaagtaactaaatggatttacataattgaaattgtaattgaaatgtttaaactctgagacttttggaagacctcaaaaatgcagtggcagtgggctagagcaaagtaagatacagggcttggggccagatgggagacacatccaagaacacccagaaaaggagggaggaggcttccggatggaatgaataggccaaggcagtcccttcctgaactcagcactcccaggaacatggcacaccattaactttcttttaatgttttgtacttatcggtacacatttaatggctgaattcacttagacagaaaagcagagaggaaatgagaaactccttccttccaaaaccatacctaggaagtaggagattaaaacagaacaagcttcttgaaacttaagctgttatatatagatttatctgcttccagatatagatttctatatcctctttctaaaagggctgattctttcatttctcacgctctttatttatttaacaagcacatatacagcacttactttggcccaagtattagctaaatactttacaactattccctcttttcatcttcataaaaattccataaagtatgtaatacgattaaccctattttagaggaaactgaagcatgccactagcatttctgtcaaacaattagaggagttcagcccctaagacctttgtgcagggtactacctgcagggtaactttgaaaaggaaggaatctcaatgcagaaatacatgcggaatttaagataactggcaaaaaatggtcaaatagggtataggctgtctcctttatctgatgcaacacctgaggtgccaggtatttgaggatccaggacccgaacccgggatggcccagtacagaggtaaagatgatcagaatggggctgaaggagctgccttgtactgtcatcacaaaatcacagcctgcataagaacagactggtgaattgggcaactgaatcacaaatttcacaagaaaggtggtccctgtaaattcacaatttagatgaaactgttagtccacttagtgcaaccactcttgcaggaaagcatatagtcaacacaggtgatagtgcaatagacgtcagaatgacttggaatttaccatatgaaagactgttaaacatttttttaaatgtataccctgaaaatgtgggcttctggtcccctctaggtctctgcaaaagacagggtaaaagcaattagaattgaaggtacagacagagacagcctgagctcaggagacagccctcatgaaaatttttcctagcctaaagagttctagtttacagttttagttctttctgggcatctgagtagagcgacagctatcaccatgaaccctcaaacagcagaatgaggacatggattagaagaataaaatgcttttatgctttggcctcagacatatttagtaactgattataaaccatatctaaatgaatacttttgtttcatgggcatgttttgtatttctccatgattttcacaaaggcatatctgctagaatcagctaactacttcagtgtgtggcaatctgcagcttaccttttagctctgtgttccctttgaaccacctgatagtcgtggctggcttgctggccatagcagtgcagttgacttcaatctcctcaccttccaccgcagtgtctttctggatatcgatcatcagattacgtggtgggactacaaattaaacatatgtgctttataaacacagaatgcatttttgcattgttgctatcaaaaaggagaaaaacagtagacattcctgatgggaatttaaatcatcacaagaggcgaaaaagaaatacaaagtaatcatcaaataaagtgagttatgcaaaatcagttaatttagaatttctatcctaaatttatgttataaaataaccagtgtggctgggcatgatggctcacatttgtaatcccagaactttgggaggccgaggcgggcagattacctgaggtcaggagtttgatatcagcctgaccaacatggagaaaccccatctctattaaaaatacaaaattatccgggcacggcggcacatgcctgtaatcccagctacttgggaggctgaggcaggagaatcgcttgaacctgggaggcggaggttacagtgagccgagatcgtgccattgcatgccagcctgggcaacaagagcgaaactccgtctcaataataataataataataataataataacaacaacaacaacaacaaccaatgtctcactcttatcactgagcacattatatcaatatagatattagtcaccagtcattcaaaaattaaccagaaagtagatataaaaggggagtacatgctattgaaatgatcatccttaccaggaaaccccagaaagcagtatttctccttgaactcaactcttgaatttcaatcttcaaatgaaagattccaaagtcaacggagcaaagataaaaatctttgagtcccttaaaagaatcactcaccataaaatgcacagaaaaattgtctcaaaccagttccatgtaatcaaataattcacagagatccagaatgtaatcataacctctgatggataatgtagtaataaagtcctttggatatgaagatgcagtaatataagaaatgccaattagtttgcagcaattttccatattctgaattccagtgctccaattttggaaaccaaagacgaaagagactcttaagtgcttataagtagatttacatatcagaattacaaccacccttctgtaagcatattaaacatatatgtgataaaatggtcaaaataacggattgggaagttaaagtactgactatcaaatcaagagtatgtagtgtgatagtgatagtgatggtgacaatgatgatgatgataaaatatgttatcttttatgaaactgagttgacagtaaaatttcatatgcaaccttacctcaggactgagcctgttgaaataaaaatcagtaagaatactgaatttagtacagtgaatctaagaatatatgtcctgaccaccatgaataagcaaagacagttccgagacttatgattaataagtttctcaactcagaagagaaacaagaaattaaatatgtataaacatgccatcctgatgatcaagttgaataataaatctctgatactgcttcaataaattatggtattaaaccaagtatttgggatttccaactgttctagtccacaatgtgaaaattctgcccaaaggaagacttttacactgaattggagcagttgaaaattcctatagagaatgatagaaaagtaaaagtaaaatgatttgttgcacatacttccttagcaagatagtgtttggtggtggtggtggcggggggtgtaatgagcagagccaaaggatccctcttctttgtttcccgtgtacaaggaaaacaacattgctcaaatggatgtgttgctaatatgatatggcccaaatgagtagttaaacatggcaaagaactaccctagtctacattttaagaaaaaataaacaaaaagataatttaacatctaatttagagtttcacatctgctagcattttatgagacacagaaaggctttaacaaaagaaatggaatgacttcaactagctgtatctttcacatagttcatccatgctagatgacagtcacgtaggttatagattttcatcatacatacctagatggttgataggggatacacagagagactagatgtttaggactaataaatactactgcattctgagtgcagtattataggaatattttttacatgctattgttagatcaaatgtcagaggaaaagcctaaagaaaataagaccttaaagagtggtataagaaaaaatgaaaacaactaaggtgtaacaaatataggagtgtcttctcaactaaggaaggaatgaaagtaaaaaaaaaaaatacctttcaaggtccaggaaaaaataggagtgatgaaaataatttttcatgttgaaatatgcagtggttcctaatgagaactgtaatggagcaatgtaactgatgggataggaacttaggaaggtggctctcttagtatgtgacaaagagggcaaatggctaaagccactggcaacccgggaaatccctagggaatggaccagatcagatcccactttatctgtataactttgggagaaacactttgatgctccctctgtggaaacacgggaatcttcttgatgcgacagtccagcagttgttaaaagactcctctatgtatctctgttgagtcttagtggaatttaccctcaaacatactcagatggttgtttcctgtgttcctggatacctttcctttattctctgagttttcaggctgagcctggaaaccccttgtctctgtttaccccaagcttctcctaaccttcactacctcgttcatcttcaatgatatttctcagtggaaagtctttattgcctccatttggttcataaagatgagggtgtgttccttccacattatcaataacgtctgctggtccaaagtaaggaaatgaaaagggacaggtacagataaggatcgaggaaaattcaccaatgtctcctccagatttcgtttgggggctgagatcctgacaggcagctaggtccccatctggattatttgttgtttggcattatccaaacaactgcaacagataaattctactctgtaactcttcagagtgagtcctgaaccagtgctagttcctaggattatatgcccaaagagctgacatcatcttcaaatttaaggctaaggtaaaaatgtggaaaacttcagaagcattagaaaatgtgcccaggtttgaagtggctcacgcctgtaatgccagcactttgggaggctgaggtgggtggatcacctggggtcaggagtttgagaccagcctggccaacatggtgaaaccctgtctctaccaaaaatacaaaaattagccaggtgaggtggcgggcacttgtagttccagctactcagcaggctgagggaggaaaatcacttgaactcaggaggcggaggttgaagtgagtcaagatcacgccattgcactccagcctgggcgacacagggagactccgtctccaaaaaaaaaaaaaaaaaaaaaaaaaaaatttgcccagtgtagaaaaatgaagggcttattcattgttgagatcaccatcctgtgaaatcactgaatgatttttttttccaagcccataaatagttttctcaagattgtgaccagtatttctgatcttagctaaggttagaagaagaaacaggcatgtatactgggagttgtttggtttataaaataaaatctgatattgtgaatcataatagtttattgatatgttacaaagctgactttgctcagttttttttttttaagagcaagaaagctttcaaaaatataaatgaggtgatttaaatctgcttttctgaaaaaaaaagggttggacaagaaaatcttaaaacttatttggtctattaattctatcctgtttttcctttagcttcacaatgtctactctaatacaaaaggttagtaaagtataaaaatccatttataagaaaaatgaattaaaactgctgctaaccagagaatatacttatgcatggtccactaaacaggcacatttagtaaaaactgcctgcagccattaatgaaaataaccaaagatatttctaaggaggtgcatatagatgaaaacctgaatgaaaatcacatagagggaaatactagaaaacagtaatgaaatgtcaaggttcttctcagctaacctcaaatctataagagtgctaattataaacattacgcctacaacatttaacaaaaatcagcaatatcaagatgagtcacattaattacaacaaaagaggagtcttaaagctgatccagtatgtgaaatctcactctaagaccctttaaaataattaggttctcctgttcctggaatcttaagaacgaacactaatcttagaaggacaggactgtgataatattagctactattaccagtaactatattaatcttaaagaagtgtattctctgtctcattcatctcctcttatgaatagtagtataaagagagtcctacggtatgttctggagaaagaaacaaaatcgtcacaagtggaaggaatgaatgaatatccttaaaggcaacaaatgcatacaaaatatcataggagagtcttcagattttacatggataagatcatgagcataatagtaactatagaatagcatagacaacattaacaagtacccgcctccatatcttataattatgctgaagtttttactgaatgtatcaaataactaatagacacatgcactaaaatgagcatcttcaacctatcaagaagtttgacagctgtgtaagtacgcatggagtccttttcagagaactgaagatagcaacgaagatgctactgtcattcttcattcattgtaatatctgaaaactctaaaccttacgagaaacgttggaatatacgagtatcagtggaaattgtcagattttggaaaatgaaggactcaaacactgatgacaacaattttactctgtcaaggaatcctagagtaaattaaatggaaagaatattaagtgaatgaataatatctacagaaagaatatctactactttttatacttgaaagtgctactttcaagtatatttaagttaatacttctataaaatacaagtaggaacctattacttctagaataatcagacctccaaaaggattacaggcataatgcctctcaaaattctagtgctggcacactggctcccaagcacatggtgtattcggagccaaactgatccaaagcagttgttttgagaataaatgtatcaggcaccagaaaatgacaggcagtagtaactgcttgccaatggctagacatactcctgaaaacaaaagatgtgtgcctttaggaaaaaaaaaaatttaaaacaaaagcattcggtatttaactgaaaacaacctagactggaagacacaaaggttgtaattttaagacagaattgtaagatttattctgaattctaagatttttggttcttactgagtgctttgtaacctgggcaagatgtctaacatctgttattatcattttacttctgtgaaaacaacatataaatacgtaaaggtatatgtagtaaaatactctgaaaattcaaaatgccataaatagattttattttatgactgtcacttttgtggaaatgccataaacgatgatgagtcaaagggtggatgagtggatagtcaatttgaagtctatgctgctaatgacttactccaataagcaaagagcattttcaaatactctgatacaagcagacagacagaaaacttcaaatttatgcttgcgaatttggtacatctgcaaaataccaaaatagtcatcccactaaaacctcccatgcttactatttctacaggtctaatctggagtaaaaccacaatagtgacaaatatgaatacgtgaaagccatctatcattaaacacagaccagattagaaattgtatggactggttttaaacacatctttctaaaattgatactcctcttgtcaaaaacatatatgtgagcattagggttatgttttagcttaatgaataaaaaaaatttcccttctacagctgtgttgaagtaaagtaatgaggcagcagctcaatatgtacatccataaatacatatatgtgcacacataccaagcaaaaatgtccttcatatttatctttcctctttaatcttcctatcattacactgaaaagctgcagtctgccgcctcaaatagactttgattcatcatcttcccgaaggtgtaaatcagagatcttgcctcatgctatagtgtatgtccttgaaaattcagtttcaagaatccaaatcagctggtgttatgcagtagagtaagcttgtctaaaggtgactaattcagaccaccttcaacatagaaatatctgctgactatattaaaattgaacatggaaacctggctactaggattttgctgaaactcacaatctggtgatcataaatgaagacactcagctcactggaggtgtacctagcagcccgtcaacagttctttgcttattaccagttaaagtgctcttaactcttttatgtccaatgactgcaatttgtggcaaagtatatgttcatggagtatgatttttttacagcataatctagagtataagcaataaacaaggccgtaagtcaagccaatgaaaaggagatcaacaatattaaaacgaggatgtaactcagaaggaaaaatcattacgtggatttcataactgagctctgccatggggtatagatttggtagcccatctccccttctcctgcacacaaggaagaaaaaaatcccggtagttagaagtaataacatttcatgtggtgagtgattcatttgagggctctaaattctcttgatctttgcttctgaagcttgagggttgaaacccaagagcaggtggaatctataaagactgctgattgccattccttacagcatttggtaaaataggctatttttaaaattcagcaagatgggcggtgattcttcctgaaacaagtttgaacaggagaattcaccattaaccttttccttgctgctgtaaaagggccatctctattccatttccccgggtaagccccacatgcgtttcttacccaggactgtgatggtggtgtaactttcctgtgggggatcggtatagagctggcaaaagtatcttccttcatcagaaattgagacgtttgtcaatgatactttgagttcactgctagaaaaattcagcaactgaaacctgctgtccttcaaagctgtgaaacaaaacagagagttagtgattgtgagaaggtggacggacagtctattttccttaattatttattacatcttgctgtatctgatacttcttgacttactattttgggtgtttgcagtaacttcatgtagacaaataaccttgtccaaaggaaacttacacatatcagtgtatgtgtgagtgtgtgtgtatgtgtgcgtgtgcatatatatatatatgcacacatatatatatatgcacacacacccagctacgcacccttctaacttggcacaattccaaatgctgtcagttttcagcacttactcatacatgttttcaggttttatactagagatagacaaaaagaaaacaaagggaaaaagcaggtcatgagtcccctgaagcagggagtgccagggccccctagcctttgggcactggaagttcagggactagggcctacagccttttaaaatgcctcaaaaattgtaagtaaggccttcaaaaaacaagggtttcaaattatgaaacagaactaaaaaagccttcatattaattacaaaagcaacatgaaaaattattttaaaaacttataatctaatagcaaaataaacctaatcaacttggatgcaccttaacatatttgacgtgatttgaggtggagctgccaaaagtggatgacctcgagcctacggaggccttaaactggtcctgtggtttcctaagtacatttggcttcacagtatgaaactgattaagcattaagcaggaaatcaaaatcactgcaaaactgatacatgtgggcctcttatttagttcaaatgttctctttcaaaatcctttcttaattttggcaaagactaacttagtatatgacaaaaattaactttaagaaaagaagctggcttatttccttttatctttcctcaaccttttaaatgttccttaggtttatcaacgttttccacaggtcatgaatgaccctgaggtattggggaggaaggggacaagcagctgggaagagacatgcttcgctttggttaggcaccgatgctctccaataacagtttttggtttttttttttttcaaaagatttgattcttgctcttactaagccctgacactgatatgaaccatttctattctatacaagtccattgcaattttgttttttgtgatattacatttggaaagatttcagcatgtggacacttctatatgccaaaggctatgatgagagaagacttggttttatgcttataggcatttattgccttggaaacttcaatcttcaaaccaaagggattacctttcagaatgctgtattttccttgccttaccctgttgagttgtttgtgtcagctaagtatttgggactcgattgcaattcaccttgaattactacaatcaatttctattgcaaagtaagactgccttacttttaaaaggggccattcaaggtttctattaagtagaaagattatgattgcctgtctcttcttccctctaaagaactgactaaactttaagcatctaacattaaatttaaaaaaggtggccttagcaatctctttatcaagacaacatgtaggtaaaaaagttgccatctacaactatagagatggaaacttacgcctgaagtccctgaaataaatggtctgcctgttgggattcagtagctgaatcacagagtcgtcactcttattgacttggcaactgatggtcgcaacctctccctcgatcactgtcacgtctttcgtaaacagattctgcccatcaccttaaaaaaagggaagaaaaggtcagaggaaaatttccatcaattaaaatgtgatcagtgggatctattaaagtgggaactaggcatattagaaaatgaacacaagtagcaacatttagcatggctctaatacctttctttgtagtctacaaaacgagtctgttaatcgaagacagatcaagggacaaaatacaactaagcctggaatcatcatactctcaaaagctgtggtacaaaaggtttcagcctctagtactttgtactagttgagtagtatattgaggaggtattggaaaggtcagagtaccagcttttgtgaatgctgaatctctcacaaatggagtagggaagatagacacagccaactttagcttacctgcccttgagctaagctatttggtcagcctcacagaaactcaaggagccacttaatagaagtaggtaggagggttcaataaataatctcgtcttgttagttgatgttgacagtcccaatgtataggcagttcatcgtgtgtgagtgagtgactctttgggatctcgatgaaatcctgggaaggcttagggttcggagtttgttactctgctctccgaaactcacaccttcatgattcacccaaagccccaggcatctctgaactgacacccctatctgcaaatcaccccccaccccctgccagccatttagaaaatctccctcagaacatgtcaaaaagtcgaggctttcagattcactgatatataaggattatcttcagatctgccctagtttgttgcttctaagattagtgacggcagcctgggccacctcataaatgtcctaaatgatccaccgtacaggtaggaggagaagtgagttcaactcagaaccaaaggatgaagtaattctccagtgttcaatgtcacacctggcatagtaggggatacagaagtatatgttgtcctagcctttaagaagctgccacgtgggtgaaaaccgataccttatccctacttacagaacaaaaagtgtggtataggcagtagatgtaatggtcaattgggaaggggagagagagagactgctttttagctgtgtgatctctggaaaattaattaaagtccctgagccagtttcccatctgaagaatggggatagtaattaaaagctatctcacagggctgatggggggatgaaaaaggataataaatataaagcatttagcactgtgtctagtttctcataaaagtgaataaatggcagctgctgctatcatcatcatcgtcatcatttctctagacatcaaatacaaagatttattaagccattatgcattgggagtagtgtggatccaagaataaggctcctgctctcaaggacctccctatgcagctgttttacaccaactcggggcagattatttgctccttaaaaaaatgttcccacataaagaaacaaaggtcaaagataaatactcatctaaagaaaatttgagacagtataaatagagatgcaattagaataaatggaaggtttctacctgctatcatatttctgttgaaggatcctttttttttttttttcctttgctaggacacactgggaaagtgtgagaggggtggctaagatggctctaagccaaatccacctagaaatagaccagcccctggcagaggattagaaaagaggaaactaaaaggataaggaaaaaaaattattagagccacagatagacaaaaatttctgatgcttgaggagcagaccaaaatgaaacccaacctcgagctctaggatccagggaattaacccaggtgtgagaatgcaggcccaccgggcttgcagtgagagggtaaattcccgaaagcttgatccagcagtggaggcttagtatgccgaacagtgttacagaataacaacaaagagaaaaggtgatcagaaaaaaaaaaaaaaaaaaatgaacagatgcttattttttccttagtgcattactgtgacaaacacagaattcagaacccagctggagaaagtttattcccagattggagaaaagaaaaaggagaagaaaatttctaccaatcaagtgaggttttcaaggtggttttgctggccctggcaaaagtgtgtacagaaaagctaccactctcacagcctcaggtaatgcgcgatctactaagaaaattaagaaaaaatttaattgtgtgattcaagggctataactgtcttaaggcataggacttgctttgagtagacaagaataccaaacacggtcttactgggttatgggagggatttcttctatcaaaggaagtatattagcaacataaataatcttcagtttacaaaaggtacatgtggaaaggcctggtgacgggcattaatcctttcaacataaaccaaggccttacaaatcctgactactatcttgcagccactgggacttaaagccagttgcaattcaattatgctttaacagaatagttcctgtggaaataactgtatgctttaattttagctctttattgaaatcctaaggctagcatattctgagagtagaatactccactcatattaaggctacagaacatgtatataggggatgggaaaagaggcatgttgtccatgattttgtcttttaagcaatgacaacaataaaacagagtgaggttttgtttgttttctagaaacattcttaatcacttataattgagtactataaggccagactattttaatgtgtcactactgagtgaatcattcaggtaaaatttttccatctgcaaatgtttgcccttgctgtgctctggcacataatgcgctctgcaaacccatggtggtatcatcatcatgactgtattattttctaaaattgctaaggctaacctaaaatccagtgtctcagaaaatgccaattcctagctatgttaacatggttataatactaatgctaaaaaattataagtgatcatgaaatattttgctgaaagatatcaaagggccttgtctgatggtggtggcccaaggatgtcattctgtaaatatcaccaataaattatatgggtcagctggacggcagttatgttacacagagctccacactttaaggcaccataagatggctgcaaaggaataataatgacctatttatttgaggcaaaggaagtgaatgacagtgatgaaaatacggtatgtatgtcagtactcttaactgcctgaagcctttatgtaaaaataatttctgctcacatcctcaaatatttcttccaaacagaagagtgcactgtgacttgataaatttccccttgaaatagatatcatgacaattaggtagctacaaaacacaatttgatgtgtagcagaagggtacaaacaggcaactttggtgcctttcttcaagaatccatttttaaaacctttctgattttctaaaactcaattagcagatataatgtcaaggcagaaacaggacatgttctgggcaaaagaaatcaaataggtacaacatactgtagccattaaataaggctgttaacaggaaggtgatttattttaagggtggaacaatatctggcatttatagactaatcggtgtatatgggtgaggtttagaagacagaatccaactggatttttatttgtatcagcaactatattccctataactccccgatttgccagacgattcctaaaaataaaactatggcactggagagtcccattcgcttacaatcaagcttcctgtagtaaactagaagttgttagggcactcatcacaatgaagagaaagcttattgtctaaagaaagataaaatatatttttatgattagtaatgaccatgatagcagagttgttggggtgggggtgcagcgggcacataaatcccctactaattcaatcttcaattaacatagtttacaaatgctttcctaaaacctcattttgttataaactccatttcagtgacattacataaaacacttgcctggattggaatctattcagtcaacaatatggccaccgtagggaggtgacaaggcaaatcttaaatgagacatgaggaagggaacaaatgtttatccagggctgggcactgtgcaggatgctttacatacttttctctctcaaactcctggagttttcagtatccccgctttagagatgaaaaacctgagacagagcgatttaaataaactgcctgatgtcattcagctaagtggccaagctgatgcttgaacccggttctatcagattctccggcccacacagcttgcactctttaccagccagcatcaggctttgatgccaaggttcatactggctctgccttggaaaatgtacttgtttttaaagagggttgtttgcctatgagcaacttctgattttttttatttccatattttatccagaacacaattacacactttaagatgagagagaaactgtcctgaatgtaaaagaccttgtttactactgcttccttctttcagtgctcggcactctgcccctagagaaagcctttattaccagtgcatggcggccttttgccagcaccacaagctctcgcccccgctgcctggctgttcatcaataaagcacttcatttacaccgggggagtctctctagtcaagactataataaaagggcaagtcatagttaaaacagaattgagtttatactatggcaactacgtaaactgttactgacatagagaaggagcaccagcgactcttcacagggaagacagtttgcccagagaaagggcaaatacagtcccttgtagcaaaatcatattaggaaaactaatcatattaggaaaaccttctgctctatggaagactgaacctaacattaaatcagcacatattgtctaaataggagtcaaaccaaaactattgattgttaaaaaaaaaacattctgctaatcaatatagtaagttactactttaaaaactctactatagttcttgaaattttacacaaatgaaaggctcagggttattcattcctaccctcctaggttggaaattttcaaagaagcatgttttggaaaacttattttctttagatgtgtgagccttcgctgacttgaagcttcaaatgacttgtcaattatgctcatttctgttggatactatttttacaaccctgttcagggtgggcccaacttggaagaagaacctctaatccctacccgaaataaaaccatcactagtagaggcactgcaattcctgctaacgtttctgagagctagtacagagttgagtacgttcaggaaaagaatgaaaaaaattaagattctgctgaaacccagagggaaaaatctttctaactacgtatgttcccccaagtcaacgtaaacacagtgttcactacaaatcattaacaaagccattaagatttgatttctatctaagcaattattgtcagcatattttgtacatttcctttaaaagactcaatcctatctttcaattcattaaactgttccctgcatttacagagttttatatcaaatcagaaacctatttgaattaataagaattacagtaaaagtaatttgaaaataaattattcgaagttcaagccacgaaagcgtttgatgaaagaatttagttctatttaaatattacagtaacatttttaggcatccaatgtgcagacaagagacagtgagaaccagggtccaaagagaggggcccatcaactgtagatttaaggttaagggtgtgacctcttcaagacaaatgcaattctttatttctgagacaggcaaatatcaacctgcatgaatactttagtatttatctaaaatcaaaagcaatcaatctgtctgctgtttacaaagcccctcttaacctttttgatcctctccatgtcttgttacaccaaacagttaagtcaaatatgttgattgtctgctccaaagactgtctacttaatggtgaaaataattatgaatgccaaccatacagttcacaggcttagagataaaataaactaaaccaactcaacaaataatggagtgaacaagaatatgtgacattgacccaaacacttcatctgtatcaccttgttttttatagaaccctatggaatccagaatcaatagaactgagtagaaagaaatttggagatcaactctctcactttaggcccagggagcagataggcctgaaatcatatgacaagcatgaggcccagccacgagtagatgccagaccccctgaccaagtcatcaagatatttctattcttggctctttctagataacacctttgattcattgctaattacaaaagcaatatgtgctcaaaggcttttgttgttgttgttttgacagttttattttatgtagcatttataacactgtatcctatggcatggagatggtcaggatctcaaaagaatcttctgctatataattactgttgtgtcacttgagcttataaaaggaaaaatattttatttaatttaacattttataatcagtaacaggtgaggcaaatttttgaatggcaagtttaagagtaatcctcctctgtgctggatttttcttcaattaaaattgttgatttcccctgaatacacaacaaaaaatatcatctgacacaacattaagctattcatgaatattctgtatacacgttcttgtttagctgactaatggcaaattaacgttctctattttcgcttaaacacatactataggtatgtttgattagcattgaattccaaaagctgattactatgcatggtttgattatgtaattacataatagagtataatggctcctttggagtcattatgatctatatggcaaatatgtttcagttttgctatagtttaaatacacgttgaaatgacagctcataacaaggttccacttttcagtcttattgggcattttcccattcatcctaacatctccttgacaccaattaaggtctattgtgtcaagctgcatacacttttgagaaattccttttgttttcttggcattcaaaggaggacattaattttaaaagcagtattaagcaaaaggcctggtttaaaaaaaaggctgaaattccatccttcatccaccctttgaaaggtctgcagggaatcacatctagttcattaatcattgttcagacaaccacaagggggttaaagatggaatttcacctttaagtccaaaatgcacatgaagggagaatagccaagaatactgatgcttagggtggtggctcaccacaatgcattccactcagggtctaactcaacagcaaccacagcaaataacatgaagacccattttctcaaacctcatgtcttctagtgtcccttatattctgaaattcctttggggagaggcagctctgaaatagcacagcaaggtttctccttcagagtccccagactgggttttccacagctataaggccaacaaaacttacctagtgaatagatttttgacaattccgccctcaacttacacactggaaagtagtcaggttttaaaacacttactggaaagaattatgtaaattaggaaaaaagttattggaaagaattatgtaaagtttcttttgtccccatgaaattctttaacatcagctgcaagaagagttatttctgcttttctctcccaagagaatgatctcctacaccatgccaaaccaaaggtgaccagagtcttgacttcaaagactaatatgcatcaaaccatttctacctttgtgtgtattggtttttgacattaaggctgaagaacggaggtcaagcacagtccaacttctatttacatacaggatgggtatctcttgtgaaagaaaacactgattagatgggtgaaaactcttttcaaggaagactgtgacaaaagaaaatagttatagcatccctgcctgtactattacaatttcaaccatcacattagctgccttccctttaaaagactgagctcaatatgactttttaatcagggcccacatcactaaaagtgccaaacaattacgacgctgaaggtctgagctatctgatcccataaaaggaagaggtgcaattctctctatagaatgtttatgcggagtgacacccatccactaaacttgaagatctgaattagcttttccattaaaattcacttatcaaagaagctaatggcaaaaaaagaaacaggaatataaaaataaaccataaaagataataataatcattgaatccttttgctttgcacactggtaggtgaaaacctgagacttttttctctcacttcttttcatagctggataggttgcatgggcttttcgttcataagcaagatagcatcttttttagagagaagataggataaccctgaagaaaaactctctctagtggacaggttttatgagaactaaaagagagagaaaaaaatcgagcccccaaagtagaaaagccactatttcatttgtttgtgagatggcattgaaatcaccttgtggaagagtcattttaagcctgctaaatctgcttagaggcccttgggagaaggggggctcttaaaaaatattaattaaacaataactgcagccatccaacaaacgtggactttggagaagaacaatctgaaggcagaggcttcttatgaaactaattgtgttggcaaagcaagcagtttcttctcaatggatttgattctgtgatgctcgtttatggcaaaaaaagaataaaagaatagttttagattgagctgctttagtagcaattcaaagctgggtggtattccagcatttcaaaacatatgaagtttcttttagacaaaatggagttgtgctgaaggccaattgttgatcttctgtatcaaccactttgctaatgaacttataatatgatattatactctaggaaacattaagtgactgctttctagagtgaaaaccggttacacaaaattccactgttgacaagcatggactattgagaaggaaactcacattcttttaaaagggatgaactgtgtaaatagcagctgatagctgataaagcacaaaccctcacttcatccggtgttgttggtcacaggccccaaagttagttgaagtctgggataataggaagcgactgatttaattcaatatagaactatctacatttcccaaaacacaagctattcacaactaaaacaaaaggtttactggattaaaactcaaaacacatatttgaaaaccacaaaggaagatacaaatattaggttctactgttcctacaaaatctaagggaacttagatttctcttttaccccagaagagatcttagtagccaaactacttattatatatactgcagcagcctctggtgagctcttactctgtaaaaaatataacattggctttccctaaccaaattaaggaaaaatttaggatttcaaagctatggggatgggtgaccctactgtggtctcttctactttaatggatacttctcaatccccctgagtcgtaagtatatcagagatgtaggctgttcacaatacttgccattactagttattctttgagacagagtctccctctgttgcccaggctgcagtgcagtagtgcgatctcggctcactgcaagctccgcctcccgggttcacaccattctcctgcctcagcctcccaagtagctgggactacaggcgcccgccaccaccctggctaattttttgtatttttagtagagatgaggtttcactgtgttagccaggatggtctcgatctcctgacctcgtgatctgcctgcctcagcctcgcaaagtgctgggattacaagcatgagccactgtgcccacccttaccagttattctttataaaattatttaaattgaatttctttacaacctcatcctcaagtctcaatggagataacatatgtatttcccttattttatatatcctaattttaagtacccaatttaatatgattttctctttgttaagaggtactgtgattaaacttgggtcacttttcacttcagctcactaaaagctgggtttttccccctttacatttgtctccagggtgttaaaagattaacaactagtgtaagatatttaaaatcataagactgtaacgggtaacaataattactacataaagagaagaaaaggaaagtggctgctattctccacatgtatagaggcaagaaaaacaaattatttattttccaaagcacttattattaatttttctaatattaagaaaactctcactgctatctggaggaggatattcttttaatcatctgcatgataacaatagctaatgtatttttaaaatgttttctatgcaaggcgctatgcttcttttttttccctttcttcacattatctaatttaaacctcacaacaatcttatgtggttcaatatcccattatcatctccattacacagacaaggaagctaagatttacatatactgaataagtggttggaaccaatatctgaatccaggtctgtttaactctagattgggtgctattaacaattatactatattaataaggtagctgaaaggacaataagctttacgatgctaaaagaatgaaggagaactaatgaatgaatttatagtatctcatttttataactcaggaacaaaactaaagtaacattctcagcatatcaaggaatctgaagccaaacagccaatctatcagcaaccagcatgttccaatatgtgatactgataaaattagctctacaacagggtctttagtatttagagaggagatgtctgttctgccaaaggacccaaactcgaaaggcagctcaactccaacttaacggcatttacagtacctgcctcaagggcattcattagtattgacagtctacgtggctgaaatgtggctgtaatagcagtctctctctacacctcctcattcatttttcctgccaacaagagtcattgaaaaccttccaaatttaaagcttagagccgacaggacaagcaagtaaggatatcagttggaacacatcagatatggactcagagtgaatgtcagtttcaactgacattactacagaaacagaaaattgggaagtgggaggggagaggtgttttatattcttattctagagtgtattctgtgagtgtgtgtaatatggtttgttcaagaaacagctgtaaatccatgataatcatcatgctgaataatgctgcaacattcagcttatccacatctcctaccaggaagccaagcagctttgaactattatatgaaatgacaatttcttagctggaaaactggggtccatgactaaggcccttattgctgagttattcactctatcatctgtcaatcataaagcaagtgctagtggttttttgtttgtttattagtttttaaaactggtttcctcagttgctggtcccagctcaacctgggaagacgtataatagaggtagaaagctcttttaagccacagtttgatgaaggaattgcatgtggagagaagtcagtggaccaaagagattccagattctactcttatgcctgctgactccccagtgcaaagcctatgtcagacaattatgcacagtaactacacaaactggtgccattataacaataacttgattagtatcatctaagtgtgggctgctgattaatcatcactgaaattagagataagtgagaagaacattacctatgacttatttttcactaatagggggcagctaagaagaaatgagaccatcgcacttggaaaacaggaatttttgttgtagttctgagcttactggtggtgaaaacaggaaaacctctgaaattctgaatgtttctatattttaaaatggataaatgttatctctccaaaaggattattatgagaattgagtgaagtaatgcctatgaaagtatttaagctccaaaaatgctaaatagagaactatgaccttctcttccatattcttcatcagcatcaccaccatctatgcactctctgtctattttattaggaccttcttatgatcttccataatctgctgaatttttttttatttcagaggtttagctataattgttttaattctaaggctaactaaaaagcagagagcaaattaaaatatctttatcaaacatttatattgaattgcaaattaaaaaccacaagtatgaaacatataaggtaaatagcagatgagggcagaggaccagacatttggaattgcaatctacagcattaaaaacatgacttatcgtctgggtttcctccctttctgtataagcccataagtagttcagagagcaatcaccatattcaaagggtgtgaagggtgcctagtgttaggctgataatgcaatgcacccttctccctgtaaaacctaaaaaaaaaaatcaatatttcagatgccaaacatcttgagggaatacggtgtttcacaaaagtcagctttccatataactaaacctctctttaaacactgagactaagacaaaatgaaataaatgacaaattgcacaaaagcttgctgtcttccaattttctctgttctatgcttctatacagggaggacatccatgagttactgaaatatgcacgaatacttggccttcctctaagccgggggtgtccaatcttttggcttccctgggcctcactggaaaaagaattgtcttgggtcacacataaaatacactaacactgatgacccctgataaggttaaacaaacaaacaaacaacacacacacacatctcataacgttttaagaaagtttacaaatttgtgttaggctacattcaaagctgtcctgggctgtatatggtctgtgggctgcaggttggacaagctggccctaaacagtcttagcctgttcggcttgcacgtgtcctctgctgtttccctcgaatgctggctgtcacatctcacagataattcctgcctttaggactaagtgcatgagctttgagaaagctatcaggtattgagacctttcctgctttctaatgagttcctgggtatgtctaagatgtttggggtgtctggaaacctaaccttcactaagtggtgtgctcctatggcatcacgggacataattttcccctttcatttgacatcaaacaaagaaaagttgcacagacaaaatttaattgaataataatattttgtttagtttgataactatacaatgacactaatagatattcttaggtaaaaatatacccttgaatgtaggaagcaaatcaatatgtaattgatgactgacagtagttactgacataatttcttaatttattgcttaatcaaacccacctattactaatctactcatcacagcggaaaactgaccatggaggaattcctacttgtcctgtaggattgagctcaaagccatcagctttctccatgaagagagctctgatgactgcccaggtttcttgatgtctaactcacacaaatcgttatgtgtctcagtctcagtactcattacatggatagctctgtgattatttgtttatagggttatttccttcatttgattttgatctgggttcaatcctagctctgccagttattaggcagaccttgggaaagttaaactctcttaagcctcaggattctcacacataataatgggtatgaaatacctcccttgctaggttatcttgaggtgcaaatgagataatccacatatttgtacagcttgagtcttgacacaaaacctgtgtgccaaaaatatatattgttattttaattatcttgagctccttgagagcagtcacactatcttaatcatctttgtatctcgaaagcataatacagtattggctaagagggcgaatgttaataaatgtttattgaataaaattactaaatgataagctgttttaagacttcatgggtgctaggcgctctcactttttgaagtaactggtccatataacatcaagacttattaagtatcatccatatctcacactaaatataattttgaattaaaattttcaaagggtttttgctttcaaaattatttccaattgtatattttattttgaagccaatacttttcgatatctcggggattttcacaagactcttggaaggaaacaggccttagtattggacctagagtgctaatagagaaaacagccctactttaagaagttcctaatgcgcaagggagacaaacacacacacacacacacacacacacacacacacacacacacacagagacaacaaacgcatacttgtaagtcacaagttactaatatgctatgggtaccatagaaaaggatgaccagctcagttgggataagggtgcagcttctagagagggggaagaaggagaggaaatctgaaaggaggatcgtggcatatttggaacaatatgaaaaatacagtgtgctctgaatagagacaagaaggaacgttttctggaaaggtcattaggtccagatattgaatgacattgcatgccaggctagggaatttgcactgtatcttgtaatcaatagggggccattaagtgattttaatccagggaatgattacacctgtattttgaaagataccttctatgtagagagggatgggaggctgaggaggaaaagggctggagtcaggaggatcagttaagagactgccacagagtgctcaggagctgataagagtcagggaaaagagtatagagaagaggaagcagaactcaggagaaggaaaagagagtgagcaggagtcgagaatacttcagaggtcaggcgcacgggctttggcatcagtgttccccttttaaaggaagaaatgagcgttacttgcctctataaacgtcagttaaggtctagctgccttctaaggaaagaccagcaaagagctaatttcagaagttaaagggcaaaggacacatacattctgcaatatgactcaagagggttttccgtagcacccaattgtaccaaaaatataattaggacacctgtccaccagtcccctcagagctttgctatgcagtgttgttgaccagcagtcttgacaatccctgggagattactaaaaatgcagaatctcaaactcacacgagacctactaagtcagaaagtgcattttaacaagagactcagataattcctacgcatattaatttgaggagcgctggcctggagtatattaattccaatcattcttttatatcacagtcataaacacaagactaacagctaaaccaaaggagatcctagaaagagaaatattcctagataacttgttttgaggaaactggtgaatcttggtgtaatgggataaagaagatcatgaatcctagccaccaaattaggccagtttccaggaataaacatgtttaaaaacaaatttttaaaaattcaaggttgcaggaagataaattgatgtggctcatggataaaatcaataggaaactgaatgtatcattcttccttaagttgcaaacaacgagcaatgcacagatgaaaaataacaacaaccaatgcacaaatgaaaaatcctctcccaaagcagctagctgactgtaaccaatgcaaatagattattctgcacttaattgcaaaaatgactacttctagccagcgctctcacccttagtggggtctgtcagttcacaagcggtagcaccctagctgaatttttgcttacttggttttattgttactgtgtgttttgtgtttgtgagcattaggccagtgaagacaaaaacagcaaatagagaaataaagcaagtgttccaaaatgaaaactgaaaagaggctgcagaggtttgttatagaagtgatgaaattcagctatatgatttgaaggcaggaaaaaaataaaagctatcttacccattacaacaggccttttcactctggctagcagataaaaattgctgtaaaaatataggtaacagcataaaccaaagtttaagagaaataacaagagtcttaagcttgaggcagaaagaatcaggcttggaatgagcctcatagaatgtccaggagaagaaaaagtaaacaccagtttcatttcacacagcctcttaatgaatatccatggatcagcctggactgctggccctgttctcagtcactggagtcagcgtgccttgtgccatccggatataggctaacagcatcgttagcagctgctcacagggggaagtaacacttaccttgaaaccagagaattcacctcagagtgaaaggctcagtgtgggggaggttctttcctatcactctgaaaatttatatacctaggacttcaatttgtttcagttttccagtaaactttttttctggttggaggtgggcagggagagagagccagcaacaaaatggccattgccatgttctagttcctattgtttgtgttccttaacatatggcaattgcaataggttcacacttactccttcctctaaaaagtttgttcttatatgaaagctgttagctgttcttaccactggtatgtccagatgccttcattgcaatgggagcagatctctgaacagttttctgctgggttactaagtgcagtttcagagagaataacattctgaattttggtctcttaaaaaagtcgttaggtttatgggcagtcatgcttgtcacatttagagtgtgaattacgtacttcctggaaacccagttaagccctcacaattgtgcacagccataatttctgcagaacaagcaccaacaattgaggcactttattacgactacttttcatgtataagatgccaaaatcaacacttccaactttatacggtagtttttctttttaaaaaagtttttttttaataaagaaaaaaataatctaatgggctacttgctgttctattcactttttagatttgccaatttttgagtgactgccagcaccagggactctttgtagcaccttatacttgggatataataaaatcatgaaatgattaaaaatactgtgagtgtaactgcagaaggaactatatattctgggccccaaggaaggccatttctttgcagaatcagacagactccatttatgttattaaattgtagcactattcactgtccagactggaagcttcctgacatgtcaaaagcactaaatatgtccaaagcacacattagaaccttaacctttagaatgctggtattctctagcactgtaaccagaggagcataggagttagtgtatccagttctatgacatcttttaaatgtcaaaaatgtttatctgtcagaaaatgtttatttttatcactaattcaccagtgaatgaaaaaagtatgaagaatgtagggcttgtacacagagtaaattattagtataaatgacaggaccaagtaatattaatagtaataaaagcagcagttaaatgctgctgctttgaaccttagctctatgccaggccacccttttaagggtgtttgttggttgttttgcatacatctgcattctcaaacgttgtcacatgcatcagcatcacctggagggcctgtctgctgggcccttcccagggtttcagattcagcaggtgcgaggtggggcccaggcgtttgcatgcctagtaagctcacaggtgatgctgacactgctgatccagggtctatgctctgagaattggcatacgtaatctaattgaatcctttaccaaccatcaaagtatttgcctattttatagatgaggaaactgaggcttacagcagggctcttccacagactaaccggataaacttgggaaggttacttaacttctcaggcctctgagggtgatcatttccatgaggacttttctcatggccagatcgtgtcctttccatgtaaacgaccccctgactttatccgaatgttaatccatgtccctttttttctgctgcccattactagtaccgtatcagctcagatttatgatctgccagctgtgttgtgattagatgtcatccctgtctttctattactccgatattgatagataaaattctgtggtgatgcatcgcctgccctttcaaaggttactgccagcagatgctaggaatcaatacagttcttatctgtcacaaaccacaagaaaagcatggcaaacaaggctcaatgaaaggcctgtgaacaggtcaaagagggaactccgagatgcactctgccaccagctctgtttcccgacctactccagaacccagctttgttggatctcaactgtctaagatttgggccctatagcttagagccaggcccagagtccaaaaccatctttggtgaaccttgtcatggacactggcagccaaaaccaagaagctaaaactctacttttattataacgtgttaccaagatcaataagatatctgagttctttggagcaagtactaaagaaatctaaggtttccttttctccctccgtctctcaaatctaaggagatgtagcagttcacatatacttttcctttcctccaaccatctttcaaataggaagagtcctactttaggggaaaatgaagataagaagcacaatcatttttatttttagatgattgtagctcaaagcataaagaaaaacaaatggtagtcataggtgccctagaaagcttttaatttttttaaagaacatgaaaaagagaaaaatgttaactttccaactttttttttttagatggagtcttgctctgtcaccatggctggagtacagtggtatgatcttggcttactacaacctctgctccccaggttcaagcgattctcctacctcagcctcccaagtagctgggactatagaagcgtgccaccacgcccagctaatttttgtagttttagtggagacagagtttcacaatgttggccaggctggtctcgaactcctggcctcaagtgatctgcccacctcaggctcccaaagtgctggaattacaggcgtgcgccaccgcacccagtcttaactttttttttttttttttttttttttttttttttgagacagagtcttgcttggttgcccaggctggagcacagtggtgccatctcggctcaccgcaacctctgcctcccaggtttaagtgatcctcttgcctcagccccccaagtggctgggattacaggcacacgccaccacccccagctaatttttatagatttagtagagatgggttttcgccatgttggccaggctggtctcaaactcctgagctcaggtgatccacccgcctcggcctcctgaaatgccaggattacaggtgggagccaccatgtccagccaactttttgttttttttaaaggaaagaggtgcttaatctacagatgaaagcagagctacggtctctacctctctgttaggagtctacttccttaacgttcggtatagcccaagaggagctaaagaaggagctttcctccaaacactgtccaagcagaaatcctgccatctaaagatctcatcctgaactcttcagcatcgttttctccctctgtaactcctggctccatgcccttcccacctcatttcactttagctctagccttctcctttgctcagtcctgtctccatctctgagataatggctcttaaccctctctgtttttgttttttgtttttttgacagcgtctcactgggtcaccccagctgaagtgcagaggtgctatcatagctcactggagccttgaactctctgggctcaagcaatcctcctgcctcagcctcctgagtagctgggactataggcacatgccaccatgcctaatttttttacttttaattttgtttagagacggggtctgtctatgttgcccaggctggtctcaaactcctggactcaagaaatcctcctagcttggcttcccaaagtgttgggattacaggcatgagccaccatgcccggccacccttttgttttaatgtgcttagattgacctctctggattagtcccaggacagtctctaatgatccaatgtgcagagagtaagacaggtagagctcaacactctaagaaatggttcccttccgtggtttgtatcaggtaatatgtcacatcatacatattggttgtacgctggatgtaacagaactctcaatggttgtatcatactgtatcaggtaatatgtggccagtgggcctctctatctttgtgcctggtggcctgaatggccgaggcctggccagttttcagaataatgaggaggtataattgctaacaagacattaggtcaaatggctacatgagaatgaccgacactgattgatgaggggctgtgcttgtttactgagtcataatcaattttaagaaaaagattcctaagtgctttttttaaatttttatttatttattttatttatttttttcagacggggtctcgctctgttgcccaggctggagtgcagtggcacgatcttggctcactgcaagctccgcctcccaggttcactccattctcctgcctcagcctcccgagtagctgggactacaggcgcctgccaccacccccggctaattttttgtatttttttagtggagacggggtttcaccgtgttagccaggatggtcttgatcttctgacctcatgatccgcccgcctcagcctcccaaagtgctgggattacaggtatgagccaccatgcccatcctacctccaggtgctcttaatcagacctttggtaggtacctttttgggaatttgcaatgtagagtctacccacttgttacataggccaagtgcttctcaatgcctgagacttacaagctgtaagagagcctaccatgaggtaggctaaatgtcatgagggtacacctattatgggcacaatgtttcttcctatataaaaccatcaaagatgttatttaaaaacatattgagaaatggtatacaaaaataatgctaacatgaaattattatttagctacacagggagacctagactagctttcctgagctctgattctcatttcaattagagcatctgttactgaacccatacattaagagtcccaggacctctgtaccactacttcttagaattaatgcctctctcaaaaattaacacagggcaatttcattctaattataaaaattatatagtcatggtagaaaaagtaaaacaaagtagtataaacaaatcccacaatcccataactctgagataaggattaatattttagtgtattcctttttcattttcatatgttgaaggggtgtatgtgtgcaatgtgcacatctacataaattctgtaattttaattactatcttatgtgtccgtcatataggaatacgagaagtcatttcactgtctcctttttgttttatatttacattgtttctaagtttctttttctgaaaatgttacattgaaaagacttttgtaaaaatatttgttcttgtttcagcctatttagaaaacatctttttaacatcaaaaatttcatgcactccaataagatttttttttttttttgacagagtctcactctgttgcccaggctggagtgcagtggttcaatctcggctcactgcaacctccacctcctgggttcaagcaattctcctgcctcagcctcctgagtagctgggattacaggcacgtgccaccacacctgactaattttttgtatttttagtagagacggggtttcaccatgttagccaggatggtctcgatctcctgacctcgtcatctgcccacctcggcctcccaaagtgctgggattacaggcgtgagccaccgaagatatttttacgattcagtttttttaaatcacagcagcatgtatatattttgtgtcacactttttttgtcttttttttttttttcctgctaaggaaaactcaaagtaacaaatgattccaacccaaagggatttgagacccctttactccttataaaaactctgtgttaccaactaggattttatggatacatataaacaacttatgctattcttacttttaaagcactcactttcaaggcatttagaatctaaaaggatgaaatcaacttcaaaatgtaagtcataagtatgttcgtcccatagaaaacactgaacacactttaaatgaaagattaaacaataggcttacttatattacaaaggctgatcagggagccttttgtggtctcccacgactaggttaagtgcctctcctgtgtgtttccataagcacctcacttgtcctgtttcagcacttattcaaacctctgcatgccaccctaggctgtgatacagttaaaagcaagcgatgaacaaatatctcctctgaaccaggcattgcgtaccaagctctgcaaagccgtagtggatgcttattttctttgttggtactgtgtctggcaacaaatacttcttgagtgaacaaatgaatgaacaaatgaatcaataaatgaatgagttgataaatgaggattcattttagggtttcttcacctaagcttttctatgcccttgatgggtctttttttttttctttaaacattttattttgaaatacctaaagacttacagaaaagttgcaaaaataatgcaaaaagttatcataaagccttcttcatccaccttctcctaatgttaacatcttatttagctgtggtacagttacaaaaactaagagatgaatgttggtacaacactgcatgattgtgacagtttgaagagtaccggtcagctattttgtagactgtccctcaatctgggtttgtttcatgctttctcatgataacaccgaggttatgaatttggggaagaatgccacggaggcgacgcgccccttcattgcatcatatcatgaggtacatgacgtcaaagtcttactattggtgacattaaccttgatccatcggtcaaggtgatgtatgccaggtttctccactgaaaaattatgacttttacctttccagagtctgttcattggaattggagtcactgacatccagctcatcctcacaatgaggggaatttatcctcatctcctaagagggagcagtattaaagaatttgtagatatatgtgtatgttaaaaccaccagaggaattaataaatatttgggggaaaatacttggaggctgtgaaactatcatgtttctccttaaactttcacttgttaattttagcatccactagtggatcttgtctgcagaaattacttcagtgttcaagtggtaacatttttatttctttcactccttaaattgaaattcttctgtaaggaagacatttgtctttcctcccatttatttattcagtaatttaattatatcagtatggactcatggatatttattttgttctttggtttataatccaatactattattactaatatttttgttcaaattctttcacctttgaccattgcgagttctttctgttatatccagcataacagaattaagaattaaggagaacttaaaactaagttatcaagaaccactgtaaacagaaacaggcaaacaatgaaaagggaagaacagaaaatgagttaattgaacattttatgacaagatttttaggaaaagatagaggaatagtagtacgttgtttcaaaataagaacaacgatagcaaaagagctgagaatctgctatagtactatgtctatatatatcttttctgattccagtgtgacagtttacattcacagaaggcagctgggtggtgaggtccctgtaataagaggaggaagatgagatcgagagtcaaattctaacagactcagatgctccctgcagactgctgcctccaccccgtatgtttaaatactactcaattaggatcaacattcattttttattaatgctcttctgagacaatggctcttttatctgcattttatcttccagctacattaagaccaaggacactctcacagaagatctaaaggaggagaccctgatgaattgggagtttaaaatacaaacggaacttcctttgtcagtcttgacttgttttattaacatctgaaggttgatttataacagattaccaagcaggagagaactgtttgtccaatcactttacttaacacacacaattagaaaaaacaaacattcaaaaatgtttcctttctgtgggctaatggatggcacattcagttctaaaatagtcacttccatctctgtcatctattgtagcaaccaaggacaggtgtaccctatctcaagaccacagaaaaacattctctgcaaaaatgaaggtttcagagacctagtttttccatgaacacaacaaaagctcctgtacaaggatatttgtgctgatgatgagagctctggtggtggaaccagatggagctagactcaaatcctgtttcaacttgtataagctttgtgaccttgagtaagttatttaacctaagcctccattttgtcatctataaaaatggaaatattaagaaccattgtaactgatgcgaggatgaaacgagacaatgaacgtgctgtttgacattataaggattcaataaacagcagctatcatatgacaatcatgatgatttctcttactatccttctttccacacctacacaagagaacaagctggaatcgggtgggaatggggaaggagagtctactgcctgaccccatttactaaacaagggtgccatgaaggtaagtgaacaacaccacagtatttctccatctctttggtgggacacacgcacacactcaaaccattatattaggaatgaaaagtctgttagcattaagaaaaatataaggcattcactaggctatgtttgctctcgaaatattgtttactggactgcctcccacctaccacatgcccctccccttcttgaatatacacacttacatcaggaaaacagttttctgcctgcctgtttttaaaaccaaggaatcataacatctccctatttttaggaattcaataccaatactgaaatttccccttttctcatgaggaaaggaaagaagtgactttaacctctaagagagaaggaacctgggtgttgtgttcatggtggtttctccagtgcctagaccagtatctggcccttagtcttcctgggcctctggcttctggtctataagatacaggctatgccaaatctgggaaccttgggcagtgcattcttgctgttgtatttcctttatattctagcttttcattactcagctatttagccctgcctctatccacacagaaaacgcttttggtatgtatttctcatatttttacgtgctccagtgttcatccctcataaaatcatggaaaagtttccctgtctccaccattgaatacacctacctgtgttgtaaacacaaacactacttctacaatacaggttgtctaatctgtatttgggaccagtagttcactgggttaatccaaaagaatgacttatggtgggaaatcataaaaagagatacacacatgccataaacattttgacttaaaatatatggctgtacattcatttaatcttttggtgtaaagtccaggtcttttctcaccacccctcccctctcaggtcttttctttgaggtggtttgttaatcaatgaaatggataattggtaaccatgtagctcaattaggaggacagtagtccccagtggtcattcctggaccacagcctcacatcatgaggaagcttgttagaaatgcaaactcttgggtgtcctttcgggttgaatgcgtcagaaaccgtagaagtggggcccaacaatgtcttaataagccttccagatgattctgaggcctcctgaagtttgagaaccaccgtggtaagagatgagttacgaaggtgtgcaaaggcagccttacccgccagcattcagtgtgctgtgggcatcagccagtaggatttccagaggggctggactgcaccagttattccagggagctgcttattgtgctcaaaacaaaggtaatattactcagccatgtcttaacattaggtggctttgacagatgttactcatagcagtgaaatgtaacattttgaagcataaaccagcatttacaatgctcaattgttctagaatactataactttttcagctaggatctctgtgcagcactcctgtgctactgcctggggcctgctggagtgccatgtctgcattatgacagtgagagccccgtgggagtgctgggttcacaggccatcagccacgcaggactgggccacagaggaggttcagtacctctccatgaagcaagatgtacactgagtgttgtcttccacatttaccaacttaatgcttgttctatgccagccaacaaatagcaatctttcttctactacttaatttatagccacatgagtataagcatttcctgggttcttttatcattcataactttgttctgtcagtaatatctgtcattccgtgcagctcagtaagctctttcaaacccaagatatctatatttctaaatggaatctgagatgaattttgataaacatgcattctgtatcttaataaaaaagggattttcccccttaactacctgcatatataaatgtttaaaaagtttctgaaacctgcctttgcattaggtgaaaattcaatgtcaatattaaaaatacacaaaactaggaaattgttttaaccgtgatgtgataaataataaatcagaatacaagttactctgcgattatgggttttctccattctttaagcttcttgcctgttgcacatgagtagatcgacagccctttaacaattatgcactgcagcaatcttgttagggcttgataaaacactgttactgtctttgtccctgccatgcaaagatgctatagtaaaagctatgatgtaccaagctgccatgcactgaggtgatgtacccaaacaagaaagttcaaagcaaaattccagcgggttaaatgtcagtttgagtgcttgagggcaaatgtaggaggtacaacccaaatattactttctttgtaggcaacgctccacaattatagctcagacaaactttcgatttgtttggctggctagcacaccatgcactcttttggatgctaatgtatttcaggtgctgagccttttccacaagccaagagcttcatttttagcagccgtattctcagacgaggccagccagtgtgctatctccttgagggatatttacttacatattcagttcaaatttacagtgcctggcttgcgaatgaaatgccacttaggaagagaatgccataccattgtgggagataaatcaaacaaccacttcttattttagcacacgctggaaatcacacatttctaaagcagtatgtaggttatctgcacaacagaaacatggtccacccctttcagtacatttccctggctactacacaaactaacctaaaattgctttcttttttttttttttttttttctaaaattgctttcttcggcaaaagtctctttactgaagaaaccaattaacccctttggttcctttaaaaaatatgacgaatataaggcaacatggctgggtggacagtttaacctccgagaaggacacgtgcaaaagaactcagattcaggaacagcccccttggaggtcagaatgatatttatgacacggtcaccgggctgaattcaaacctcaagggaatgaaagtgagtaaatagggttcgtcttgttagcaaaaggattatttacttctgagaatatatcgttaacacatcccaggctcagagaagcagtggtttcacacagctgctcgcttctgctgatgatggcactgaatcatctccagtaagtctttacgaagaattgtttttccagtagtgttgatgggtttgcattgaatcattcacaccactggccttgtagccaacagcccacatatttgtgacgcagctggcttggggtaagagagtgcccagaattattagctatagataactactaacaattcagagatattctgtgtccttagaagaacattcttgattttttacacttgagcttcttcagtttggccactgtactaaagtatttgcagactttgggatatgcatttcagcctgtgaggtggaaaggttgctggacaatgctagaggcttgttttcaggtcatccttttcaggcaaggaaaaaaccaatcctcaccaccacaaccaaatctctatctgcactcttcagatttctcctcattaagtcttaaagctacctatttgtactaggaaaagggccacagaagttctcaggctctgtgctcaataaaaaaagccacaggtccttgaagcagggaaaggaccctaccccagctcagtgctctggaagcactattgagggtaaccagagcagggcccagcactgcctccatttattgcctgcagattttcttctttgctttcttgatgaaactgtcaatcttcataatggtgttagcaatcacagggatgtgctgcgaagcggctttaaaggcatctgataaagagaaaacctgtgctctcccgttcctgagcccctctttagagtcagttaccagtgataaggttgggcattctgacttgtacagagtacaaggaatttgacttggcaagtcaaactgccaccacctcaacagaatgagtggggctgcagagctgccgtcttttcagttcgacacacaggtggaacttgacatcaccatattgcgctcttctggttggctacgtggcccagcaggaggtaaacatgcttgggtgtcacatagggaccagtgggctttttggatcccatagttcgaagtatttctctcctcggccatagcttctagactggactcccaggaacaatggtttctataaatgagtgtggcctggtgcaacttcagcgctccaatctaagtgtacaatccacatgctgtcattcaagcaaatccagactaacccagtggcccacacttgctcttgtgaaaacacacatggcaggatagaggccccaaggggtcatcagagttccccaactctctaaattcccccaaatcaacatcagagacaagctaccgacctgagagagtctgctgtttcttcccagagcaattccacaccagcagcttacccaagccaagtgggcaaattatcaaactgcagcacgcttcgatgccctctttgtaggccctccatttccgttattcaggactcctgaattgcaaaccattcaaggacaaaatgaggtttatgctcccaattagttattcttgaaaactaggagctgtactacacattaaaaaaggaaaactgctcagtacatactctgtgggggcctccaaacagcaggtgattccatacaccatacgtgattcaacatttaaaggcaccaaggggagtagaggacagggttggagcttcaactctgactccaaaccacagaagccaggaaattcagatcagaattgcaaagttatatgagatttcatataccataatacccatcaagtcatgtgacttaaagcatctgtcactagcctgatatgctttccctctgcaaactgaaagaatctttagccatgcctatttgtatacatttgaattggagcaccaagaaggaaagctacgtccctctggatttgatgaggcttttaagaacaacctctctactccggtgtcttaggaagaaagttgactgcaccaaaataggtcatttgtcaagcggttatttactgaatttttcctgctggaaattatgccctctgcaaggaaggtttaggcgacgaagaggatttgtgtaaaagtgtgcaggcgtcaactcccactatttccttctcttcaaatacatcccaaaagggacatgcatttaagtagcacagcaggccagtatgaccaaaatgacagcgctctttccaatttagacttctaaaagagaatacgcagacacacaataacaaaagcctttagtctagatttcatatcagacactttgatgaatagtagcctaaagggcaacatatttataagttttaagtctctcctgcaacacaaactgtcctgatttatccctatgataaaggcagttctgagagctactttaccatatttattattttacagagggggaaaaatgttgattcagccctcaatctgctactgttggagttataaatgttggtaacagaccattgctgatgtctataaatatcaatctattccccataacttctgggcaccccctccccttttcttccagaacatttccttcttattcttgttgcaactacaggatttgctttattggtgaaaaccttaaaaggaaggaaagagtggcctctttgaagcccatcactgactggatagctgatggcccagcaaagctccaattcaatgtttattaaaaagaaagctttacagacaaatgttgatacctcttctgttaaatgataaatgggcattcttatctccctgtacatattcccaactctcacccccactcccaataaaaacgttggtatggaataatatctaaggttattaagctcgtttatttaaaatatccttcttactttggcccttgaattcaagagaacattcccactttctctaaaatccagtccacttggtttacaacatggttaataaatcacttttgggatctacctcaagtcactgcttatttcagctaactgtgaaccactgggagtttattcattagcagtatgaaaaacatctcaacacaaccaccagattgtgtttgtgtacagtgtcaaagtgaactgttcattagcatttgtaagaagcaatcaagtcaccaaagggtattaagccaacctggatgagggacagaggcttagggactgatgtgttaattcactctcctggattaaacatccgagataggtccttagtacagcttcatctttatcaggctaagcatcaggttagaaatggatgccctctcaggaagtaaagggtcaagttcattcttatagccactgccaaatacttaaattgaagctctgtatatagtttatgttgttgttgttgttttgttgttgttgttgttgtttttgagacagagtgtcactctgtcgcccaggctagagggcagtggtgccatctcggctcactgcaagctctgcctcccgggttcatgccactctcctgcctcagcctcccgagtagctgggactacaggcgcctacaaccacgcccagctaattttttgtatttttagtagagacacggtttcaccgtgttagccaggatggtctcgatctcccgaccttgtgatccacccgcctcggcctcccaaagtgctgggattacaggcgtgagccaccgcgcccagcctaggattttgatcagtacagtcaactaatactctatattgctatataatatttgtgcccattatagatgaacacaggttacaatcttttctattccaagaagcatttattggaggtagaaattctcaagagagactttataatacaaagagactaaggattttcagggcagttttcagaagtttcactggtactattcttggctaaatttgaaaaatgcttggtataaacactacatgtgcttgttggataggcagccaaagatccactgagatgtggtattccatgtggatatgcatctttaattagtctcaatagattttgtatgtattcaacattaatctataccacctgtcccagactaaaagcatgaaaatggttcttcctaatcactcttacacagaaaattactctgttccttcttccaataaattctgcaatctctctggaaggtcttaaatgttagtttaatatcactttttctggttcattatagatttttttttttttaggaacttgcaaagaccattgctctataattttgttaaaggcaaaagaaagcagttcacagatgcattattaaaatcccgacctcagacacaagcaagaatctcagttctgtgttttaattgtggtcaatgcatttctcatttctattaagcctcttagccaaaggattatactcagttgcaacatttctccaaattgtgcattcaagttcagaaatcagtgaacactctactcttgatttttgagctaagatgaacagattttttttttgcttattatctaatagtaatgagttccacatttattcaggtgtatataaaaactgttttcatattttaaaagaaaaaaaacattagtttaatcagttagacctaactagtatacagctagattattatgagtttaacctcaaacaaacaaacaaaaacaaacttttaactctccagcattccatgaggcttagatttttaataggatctaacattagcaatttgaagaggacaaacttcatgttattcacaaataattccgtatttttcagaaatattgagactcaaaataagattatttctacgatgaaacacttgagaagagacctatttcgatctagttttatttcctgtaaagaaaggggaacatcacactctggggactgttgtggggtggggggaggggggagggatagcattgggagatacacctaatgctagatgacgagttagtgggtgcagcacaccagcatggcacatgtatacgtatgtaactaacctgcacaatgtgcacatgtaccctaaaacttaaagtataataaaaaaatttaaaaaaaaagcaacgacgtgaagtttttaccatggaaaggcagacagagagaacaactttaacttctgctcattggtaggctgatcagaggccgtcaatgtcagggcaggtagggtcaataccgggtcagaaagataaacctactacaacagcagacttgtttccaagaaagctacttagtcgtcacacatgaacacagtagatatcctaacaagatactaagagctatttctgacatgaagactaagaataaaactgttttgatctattaagtgacctactgtatgatgataaacattccaaaatgtctaaatggctaaaaataaaaccttgcttgaccacaaccaagaggcctaagacatcatcactgtctagataaagaatgtctatactacagtggtggtttattttttttccatcatattaaattcagaaacatctcttaaatgttcctcattaactgaacacattattcgattctgtgctacctttcaaaatagctcttttagctagaaatgagaaacaagaagtcataccagatatcagttcgataattaagtgagttcaccaatatttcagacagagggaaataaatgaaacccactgatctttgttactagaagtatcatgatttttatcacatatttaaccaaagaactaggtaccttaaatgccagttacaaaaataaattgtatttggttcttaattaagtctttatcatcgtgtttaaaaaaaaaaatttagccctggggtttagattgtcattttatacaaaagcaaatggtaaatgcctttctacatgcgaagccattagatataattatgcaatgggtaaagtgtgtatcacactataaatgtcatttggttttacagttataaactcatcaacatttatcaaaacatcgcctggagaaagaatgagatggctatagctcatgataaattcaatgccatctttgaagatacatgacaaaggagtgtcacagtaaacacacactgacattacatactagagtgttggtcttcatacccattaaatagaagttgtgttctctccagaaaagtcccccaaccacagtacattttggtgggtttcaagatctattttcctccctgaaaatcacacttcctacccgatgcttttcaacattgacataaggtgtgcataattccagccaacttctgcaggtaaaggagcatgtgaattcatctagataagctttagggtttgatttcaattgcttattcaaccacaaatcttagtgcttcttagttagtaatctcttaatggagttctgttcaaatggaaacacagagactattcctgctaggttccctttagacaacaggggtttgtttcctatttcttgctctgaatcacggaatggcacaggtgcttaagcacgagcaccaggctctgcccgcacactgtgttaacagttctcctttctgagtgccatttcactatccccatcaatctggtagttatcgcccagggagatttgtcccttgaaaaacaaaatggctgggcttaaaaaagtctacttcttcccttgtccgcatttcagtttcatacaacttgttaatacaaaatcttgacaatggtccagggtaataatgccattggcaatgtttctgtcagagccactcctggcctttgcagcacggtgcttaaaaactgggggagacaagacaacagcaacaacgaaaactgggagaaataatcactagctcttgaacgtgtagtaaagaaggtagaaccacaggacgagattttgattttatatagtcctcataggattaataacttcattatatctttctttacaggctggatgctttagatatctataaataccggtatttcttgggtggggtggcagcccaggaccccgcaatgacatcagaagttcagatcttgtgtcttcccccagatctgtcctgctttcaccataagcgctctccttttggccccatcttgactcctgccctgggtcctctacaaagtcccttcccacgaatttgtctcaaggccgtttgctgccatggtattttcagttgaggtaactgaggtctgcaatcaggattacatttcagccactctaaatggtcatgccattttcttaaccagctcaagagaaaaaatgagcatggaaaaacttgggaaaacccactcctttcaatttcacaaaaatccttccccacattgcgccactgcccagaatcaggcccactaacagcatggcatggcccctccccgtgggagccacatacagtcatttctctatgcctacctcctctcgctcacgtcctctcacccatgtcctcctctcgcccacgtctttctcaccccttggctgcccaatcaattccaactcatttttcagatctcagtgcaggtgcgatttccttcaggaggccttacctcactccaacctccctagacaggctcgcgactcacaacatcctgcccttccccatcttaggacacataaactcgtaacatgctttacaacgtgaccttaggagatagatgctttactgtttcccatctatgaaatagagagaaaaatttctgtcaattccatttgtatggcatataagattgaagataaaaggtgtacacagttctttggtagcatagggacacatgaattcaagatataattgttggctctttaattctactcttgtattttgcaagtaacttattaaagaactagtgaagcataactaaaaataaaggtgtttttaagagattttagaggggttggaggggagggaatagaaatgtatcttagttaaaggttcattttaacttctctaagaggacccagtaagccttaataaggagaaaaataagaatgcgttagaggataatggtgcgcttgctacttaaggttccacgtttcctgttttccactaacggagacatatttttttctttaaattcaagctggtcccattagctgcaattttcaatttactagtcttttcaaatagccacagaacatccaggaaacacaaaaatgtgtctattccatgactaaggttaacagaagcttagttattaccattacttgtatttaatttcaagcttgccaactcatagcttcagaaggagaaaaggagaaaacaggttatttaaaattgatgtgttttatcattacccatcattaaaaaatgatgctgttgtaccatttcagaagtagcaggcagtgaatatttaatgcttatactagtatttattaatttcgcatctctacaattcttcatagaatgactattttaaatgactatgatttacatttttcacagatgctctggcatttaatttccacttgcaatgcatttgtatttgtgcttaaaaagctacccagtaacacctataaatcgaggaactgcttaaaacaataggcaccatcaggattaggagggggaaagtcacatgtgtgggcatttgttaaagagacagcatatgggagaaggaaaagaggtagctgcagcatgccactcacaaatctctttgtagaatacattagatgaatgaaacagagccaagtcaacagacaaagcggcgtggagacagatagaaaaatatacacaagaatacacgcacagatcctcacagtgaaaaataaaatattgtatgtaaagccatacatattcatggtgatttggggagcatcaatgttatttttgtgttctcattacatcataaaactctggagggcaagaactgtcttatacaattaagtttccttatttgtcatgtacctaaaaactaacttacaagtatttttattgacaaatatctttctctgacaattagttgttgattagaatgctgccaaaagccccgtgggtacaaataagctgtttctaccctagatgctgctccaatcatctctacactaagccagcattctggttctcagcacccgaaaacccttattttcctgccctcatactgtcatctgtcccctgtttcttccctgcaccaagcatcccactagctctgcagaagcggaaaaagaaaagtcgatctgtgccgaacactaataaagaccacattttctcaacaagattgcatccagtaaattgcgagcccgagggcaaaatacagaatggggaaggcttgtcagcaacgaaacatctcacagttggtagccaaaagccagcttgagtagacgggaacatattgctgaccagcaacacaatgccccaccacaaagtaagccatagcaacatcttttgctcctacaagtttctgttttgttttgcctattagtattattatgcagcattgataccctgaaagctcacatcaaccaccaagctctaatgttgttacggagactcgatgaaagccatggcttgacaaaatacacagggctcacagctccctgaaatgcatgctaaagagtagggtatgctttcttctttaacaacaacagaatgtgcagaacactatcattaataataataacaacaataatctacagtccagtgaaattatggggactattccactaaatgtcaaaattaaagcagatcttaactagtagaaatgctagttataaatcccttcatcgaattcagagattaaaacaatacaattactagggtcgagtaattgtgaaagatgagaggaaagaagctcttctattcttcataaagttcctgctccaaataggttttatacgccatcctcatgcttggttcacatgaagaaggcttctgttaatggaggagagactgccttttgtaatatttttattttttcctctcatactcgtcatcaaatgacactgactaggcatttagtatagactaaatgctgaaactaccaaaaagaataaactgcattccctttcatcaaggaccttaggatctagctgtacagacagaatagacaaaaagaagaatatgaagccatttgtgctaaatactgagcaagtggtctaggcacaaatctctgcagaactcctttctctactgcttgccaatgtacttaatacaagattcatcctcatcctcagtttcttccatccctggtatcaaacttccgatgaccatgcccctctctacctatcctgtaattcccacccctccccaatcacattttcatcccctgcagagaagcttatctctacaataaattccctcaccactatatcctgtggattgccatgaaaccttgcctgattatgttgcatagaagtgatcatttctgcctctttaaattccatgtgcactgtaataaagggaaagaataataatacccgccctgtgaactaagatgagaaaaaaatatgtaaacacttcgaacagtaactagcacatagaaaatgttcagtaaatgtaagctatcattattactagtcacagtttgttagaattgtatgtggtggatataagcaagtaaaagaaatagaacttaacctctagcaactcaggatttagtaggatagataagaaaggtcttcatataactaggataaggagcagggcataataaagatcatatgaatatttcagaaaggactggtaggagttaagagagaggaagaagggccttattttgtcattactatggagggttctgaatgccagagccagaaatagagactttatcctatagatgttgaaaaatgactgaaggtagttagaagtcgatgagtatagagggaacagggtaaagaggtaccacattccacagtgtattccacgaagaacaattctacagaagtttgtaagaaggactgaatgttgtgtgataagggtgggaaatgcggaccatgaaagtaaaaagactagcgaagaggttactggagcattgccaggcaagtcaatgctggcctgaaccagggagggaggagcagcagtctccacaggaaagatcagatcctagaattacaaggaaggagtttatacaatgtggttgatcacaaaatggtggtgagagaggatggagggaataaaggaaaatgccaagattgagtctggaggactaggacttactgccgaagatgggaagcctggaggacgtgggcagggaaaagtagataatgtgttccactagctggatggtgtgtaggactacattttccaagtgagctcaagggtgaagctgcagatttgggaatcacccaaatcaagatgacagttgagtcagaccttcagagaccactggtaagacgatcctgtccctaagaatgtcatcctctccaatcccacattccactagccctttgtggacagaccctttaacaacccataagtcagaaaactagactcattagcacttatttctaattgtaatatattaagtagacgtttcaaggttgcaaaaatggatttgggggtatagtcaatgcctaccaatgggttgtcaagtgaaatcagatacttaacatttttacccacctcctccccaaccaaatatttcacaaagaccatgtaagagcaaagtttcaggctaagaaaggggaattatcctgtacacagtcccaattttctcctgaatatccaagatctactttatgctataattgcttttcttttctaaatgaaaaacagttaaaaccccagggatttgtacaatagattctgtattagataatgcaaagagattttgttctttcattttacaagttataggtgaaaactgaactcttcccttttctaaagaaaaacatttaagggctggggaaactgttacaactcttcagattttattgtgctatgaaatacctttaatgacataattcctctatggtaaatgatatccaaaacaaaagctttttgtcaaggatggggtggggacaaatttataaaaaatatatgtaatttttcacacatacccaaatatattaagcgcagatcttgccatgggcaccgcattcagtttaattagaacaatattccttcttacatgtgaaatatttagctcctacccagctcatcacgctgcaatgttcccctgtccccaaatgaaattacggcaagccagtaccctaggatgagtgcgtgactcgcatactgcacagctgtagaaagctaagccccttctcatcaaaggacagcagacttggccgcaatgcatgctaacatcaagccactggatttaatccagttaaatacatgcctcaattagtaagacatttgctatccagttaaggatgtgaatcttgagttgataacctctacagactatcttatttctgtgtttcaaaagttataaagcaagagaaacaaaacagacagtgtggtgtgtacaggaagctcatggatagtgggaatagctttaacaaatataccatcttttctttgactctattggacaatagagactcatcagtcacagccggtcatctcattctcccagaacttggtttaggtagtagatgtaaacatggccacaaaatggaatgcctttttcactcaaatggaatctgagcagctttctttctagaggggttataaaaataagctttttatggcttgcatctccaaactgctttatgtggcatagtgatgaaaaatgctggaatttgtatataatgtagccaccagataagaaagcaggaaacagaaagaacaggggattaattgttagtcctaccgaatgaactttaccctgataaggcaatccagtccctgtaggcatagaagaagaaaaaattacagcactctgaatacacagagagttattcacattgtatacaaatcaaagcaggcctcctgcaacagctacgactcagatcttcacagatccgtggtgtatctccatcaacagaattaaacaaggcagtctgttccgagtgggcagcaacattgctgaccaggctggcagacaggaggatgtcaagaagatacattttctatcaagatgtggctttatcaacgagtttacttatttacctaggaatttggtctttcagtgattaatgacgaggaattctaccatgagaagtgacctatccttaatgcgttctgctcaaaaacaggcagctagaaactgcacatctccctagacagtttgtcaatttcagcttctcaatggaatagaaataagagctcactaatgacaactgcgagggctatggcccctctggccttgacctaatgttagctataaatggattgaactcccggtagattgggaaaatccacccaactacaagacagaatctgtttctttcattatggaaaagggctacagaaagaaccacactgtatctttttgcctgagcattcctaaagctatgggtcctggaagatgcctgaccatagttgtgtcaagctattctgaacagacctaacaaacttatccagagcgtaggaggcaggctcttttgtagcacagggaatgcccaggaactcccaataaaaataataaatcatgggagtattaattcagccaaaagagtttaattttagggaactgtccccctcaagacttgagcttaaagagaacactaagataaatgctatttttacatcttgcagaaaaatagatttttaaaacgggggcaaagccactttcaaaacaattctcaatttttttaaccatttttctattataaattttgcatgaatttatttcaaagttgttgagcttttaaaaatcgtgtgatccagcttaagattctgaatggccacctccagtttcatctgccaaataatgaaacttgttcttcaaggaaatcatttagttctatgagagtttaaaatgagtctgctaaaaaaaagatggatcttcagatccagggcaaatatgcagtacaaggtacaccttaagtggaaatacatgagctgtctataactacagcagttttcaatgaaaaaaagcttagttcctaataaataaaaagaatgtacttttcagctaaacaactgatgtgcaaaaggtaagtttaaaatcataatactatatttaatggctaactgaaaaaaaaaagaacaccatgtcactgacatttaatcatgaggttaaataaataactggttcattttttgttaggtgtccttctgtttacaacacaatttaaactagctctacaaagtaaaacatgtatcaaagacacacaagccatccatcttagagttttattgaaaatgtttgtctagatttaataagatccttccagttccttgctttattattttttttggtagactcttaataaaaagaagaattactgaataagtaatgctgattaccatgaaccaagtactatggtgatgtcttatatggattatctttttgctatcgtcacagtaatcctatgggataggttcagtgagtaatcttattttgcagatgaagaaaatgagtggttatgtaacatgcttaaggaagcacagccaaactggtacccaagccaggattcaaacccagctgcatctaccctatggctggaacctttagcttccaggatattatcttgtacttttgaaaatgtgacgtgatgacctagatacatgattatgagtaaatgtaaaggtcagacctcattatttaaatatgaacacaatataagaggcatcttaagttctgacgacactatagttagcaacttgggttcacaatcaccagtgcattcttatcacaacactataaaaacatagcccagaatgcccacagctttgttccctcattcatttctaggaaagtgttggcaatttgctctctggggagctgtgatgggaggaccaatggttctcctagggtgttgttagaggagacagatgaccaaggcagctctccatggaggctgcattttgggtttctggtcaacacatcttcatacaccaatcgccttaaatggtcaaagtagctgagacaagaaggactatgaattagggaacagtcaggatcttggcaattatttacaggggatggaagaggttataaatggggacatgcttatattaaaatggaaacgaaagctaagtggggttaagaaaaaatccagggtttatagtaaaatacagtattctacagagcatagaaattactggcctttaacgtacaccaaggcaaatggccccatgaatccatctttagcctctctgtgggctgaattatgctccacacgatatactaaagacagccatgaacagcttttatagctttgatgaatggctttttagtttaggttgcattatgagaacaaaacaagtggttgtgaatcataacattttatgggtctgctgcttcatatagttttctaaaattaagcctctaaattatattctgccctcattaggaaaacagtccctgaaagaggaaagcattttagaggctacgcaaaaagaggtgatggtagatctgtgcctggagagcctgaagtataattaaatcgatgggagctgaggaagaaaggataggttggtagaaggaagtcatgttgctgcccaagaacccagggccagaagacaatgactataatcagctggagttcactgcccctaagcaaacaaggttcagaggccagccattttcaaattatagaaggtattggaaggaacgcagtgaggggaagtcatccctgtgtaaagccacagaggtggagggaagggaagagggtctaagcaaatcagtgagtgtttactgagtatttaccatccactgagtgctgtttaagaccctatagggtttaaaaaggcagcataaaaataaaatgaagtccattatcctcaaagtagttaccatccagccagggagataacagacagaaagaaaacaatgcaaggcagcaaaaaattaaatgccaacttccctggaagctactaaagccacgccagacattcagggcaaagtgggatcggtgcagaagactaggcaaggtctgggcaaggctcccacagggccctgtgccacctgtcgtagtgtctaccatgctgctgtaaaggcctggccttgcttacaagtccccactacactgtgaggtctcagtacagaggcttgcccaccttgttcagcgtggtatctccagtgctcaaatgtctcttgaataggactgaatgcaatggacaagtgaagaaaagctttaagggatcgggtcctagacttgctcctgaaaaatggtaaaattattgaggctgaaagtggcgttccaggcaggggggcctgtgagaaccagggtgaagatctacaagcccagacactctctctctctctctctctctctctctgtgtgtgtgtgtgtgtgtgtgtgtgtgtgtgtgtgtgtgtatggtgaggaggcagagaaagcagacgtgggcagacaagagaagcacttgtagtttgaagactttctgctcctagaaatgggtcaattattttgtggcctagagatgatccagtattacattattactaacaaaaatagatgtgaattattttaatactactactgtcgatgttgtctgttgccagcagaaataattcccacacacagcacaagagaagggaacaataggctagccagtcctttactagaataatgctcccggcttccatttcttttcaatagattttcatgtcagtttcactgctctactttaccaattatttaaaggttatagtcagtcagacaaggtttgtctaaaaaaaaaaaacagaaaggaaaaacgtaagaggaagatagttttcaaaaaggaataaagcacattcatgaaagtttacatactgtaaccaagcacaattccaaatgtctagttcctccttttctattttttcttcaccactacaaccaccccagtcactctgattaattttttttaaaaaagaaagaatacaaacattttctaatgctttaaagttacaatgtagggtgtgcattaaagtcaaaggtattatgtattatttcatgccctaatatttttgatttttaaaggagtttagttaaataactaatgttctcctattttcaatacgtctaagtggttaatgcaggattttctaagttcgttcttattaaatgaactgaccaaagtctttacttcctagttaaatggactctatccaagaatgccatggaagacaaagaaatacagctggttcagtgagtcaatccaacgaagcattcaccctcagcctctgacagctcaatctcaatgctgcctgacagtatgaaggattgctaatttcttatgctctcactggtggttcttaaatgctcaccaatgaaccaaatgttgatcagtcaatgccaaggaatcagaaaccaaattgccaaccccctgatttatacagtcgaaggactcaggagagtatgactttacctttcaggcttaaaatcagatcgaacacttagaacttactaaaacgttttaatagacacattcacactgaaaacaattgtgaacacaatttataatctaaaggagaaaaactaatatagctcataatatgtaaacttcgttgtgtacctactctgtgctacaaattgttctaagtactttagatacattagttcatttaccctcaataaaatcccaatgaagtagtagtcttatccccattttaagtgaggaagctgaggcacagagagttgaataacttgttcaaggtcacctggctagtaaggagtgaagtctggaatcgttgaaagagttttacaagtgtggtgtctatgatgcaagttggtataaggaaagaagaaaagacatgggctagaaatataaagaaaaatttaacactcactgagtgactgctatgtgttttcatatatttcatttaatctgaaaacaaatacaaagagggtattcagtagcctaagtttgatagatgaggtagaagagaaattaatgtgtctaagagcacacaggcagctggggttacacctggagcttctgagctctcggtgaacccctccctctgagccactgtagctctctcatcatgtgggtcctgtggggcagagcttgaatcttagcatgaatccccggtgccccgccaagagcctgaaaccttggcactcaatatcagcttttacagagtgatgttactttacttttctgagcctcaatatttttcatccataaaattatcatagacatggttgttttgaggggaaaatgaaataatttagcagaaagcaccatgatatactcaaaggccacagacacctgtcaatcgtaaaagcataagtaacaagagacataatcagctcttagttcttcagttcttctaaaagaggtggtagtttagatatgtgtaaataaaattaaattttaaaaatgtttttatataatctttttaaattagcaaacgaaattgctactcgttatatgcacactgaagtttactttgcaaccgcagcaaatctgtagcacccattatcataaatttattcaacaagggctaatataatactacagtataatcttttctcccccacatcaacactcacacactcacacccacactcacactccagaacaaatacacaaagagaaccaaaggaaatttcattttgtttaggccaggaaacacctattagccattctgttaaggctcagggcattcagcttatatacaaaactgattactatatgcattttcaaaggagtttaaatgcagtgacctgacagtggacacaataatgaaacaaaaattctcatgaccctgctcaaagtaatactatttttaaaaatggaaacctcagtaatattttaatttacaataagtgcctgcttcaaacgcagtccatggctgcttaggatttctagttgaaacagaacccaactggggtaaaacatacattctggtagttcaatttgttatgttctgcatagggcctgtctttacagaactacctctccccccagttaaggaacaattttgccaatcagttttcctggcaactcagcctcacaaaagagagagggaaaggaagaagcaggggtgttggggaggttgccgcacctcctgtcacatcactactgattaaagaggctccaaaagaacagaaggaaagtgcatttcaagaacaacagaacctttcagcaaaagtacattcgcctaattgaaaagctactcgaagctgttatttttatatcccaaaatgctgaatcattcttcaaacaatttcacaaaatcaataaaagagaagtagtttctcccgaccccttctcccaactattgcctgtttgaaacactgcctttcctttcttttctgtttagatttagggccaagcatccaaagaaaagcaggaacacattgcattctctcaattaagaatgacatgctatgcaagaaaaggagcttgtatatcttgcactgaagtttttcttctgaagtttatacactgatattctacagcactgaaaaccaggttgatggggatggaactctaacacctgcctccatggggatgatttcattattagttgctgttattctattgaaaggtatgatggacggaagaaagaaacgaagaaagggacagagggtgaggggacggaggcaggaaaaaaggcaagcccagattacctggtttaaaaccagaaaaacaagatggtcctttgagagctccacgctcctggcctcacaggcacactctgctgcttctccagcgcactctagtcatctgccagaagaagcgttcaaacacagtgaattgtatttgaacactaccacactggagacaaccaggcagctgacaaacagcaacagagcatcagttttgcttaacagttctttggtgtggtgaagatgagagtggcctctgagattaggttactgagaattactgagttacgaattgccacaaaacaccaagtctcaattatctttacaaaaggaatagtgaaatggatcatcagaaaggttaacctaaccatttttttgggatccataacataaatcaagatagaaatgattcgctcagtatctatttactgagacgtactacatgccagggactcttctaggtgttgggcatatgacggtatatacatccaagtccttgtcttcagggagcatatatcctaaagatgggagtcaggccataaatagacaataacatcattatgtcaggtgatgatcagtgctttgaaaactttaggagagttggggcagtgtgtggggaggctgatatttcatatagggtggtcagcaaggccttgtgatgaaatgacattctgtgtgaagaaattccatcagaatctggagcatgtgaaggagacagccaagtgaatatctgtgaggaagtgtgtttcattctaggcaaatggagcaataaaacaagggccctacagggagaatggccttggtgtgttccagaaacagcaaggaagccagcatgatcaggagtaagagatgatgttggggagagaatgggtcatctagaattctagcaggacctcacacatagctccaaatgaaatacttttcttccagaagtccaggagaaaaaattacattttacagcaaacatttcaaaggaacgacagggttttgttacttgcagaattttatgagtgcttattttatgaaatcaacaatcaccttcgggatttaaaaaaatacagcatcacatttatgattaagaaaaaaaaaaatcaccaacccctgtttctatataacttggctttcaaatcagtttatgctaaagagggttacatcaaagacaagcaaactaaaactacactgcccacacaacttgtggtccttctctgatgtacctcttcctatttctctcccttgtccccacttcacagggcagtcaggtacaatgtcttccaagttcccacagtctctcaggcattcctatatcatggcacttatcatgctgccctgtcactgtttgacccttgtttccttccactacagataaaaatattgtatttacttcactgcaattgcctctcaatgcctaaaaaaagtttctggaaacaatgaatgaaaaagtggattggtactcagctttcccaccttgaccttcctctttaaccttcccatcttgaccttctccactggaggcagatgactcaggtagctcagagggagcctcaatttcagctgccctcctccctcctgttcctgtaaacctcacactacccccaggttaggataaggaacatgttgattttgcttagctgactgttctcaggaagaactgaagaagccagaaaagcttaaacgtttctggagatgaaaaataagagttattgccaggctcggtggctcacgcctataatcccagcactctgagaggccgaggcgggcagatcacttaaggtcaggagtttgaaaccagcctggccaacatggtgaaaacctgtctctactaaaaatacaaaaattagccgggtgtggtggtgggcgcctgtaatcccagctactagggaggctgaggcaggagaattgtttgaacccgcagggtggaggttgcagtgagcagagattgcaccactgcactccagcctgggcgacagagtgagattccatctcaaaaaataaaaaaataaataaatcaagttatttatttacagattttcctctgtaataattgtctacctttaagaatggtggacgatctacactgacactgtttagtatacctttctggtacaatgaaaatgttctgtatctgcactgtccaatatggtagtcactcaacatatgggagcacttgaagtgtggctacagcgactaaggaactgaattttctttttttttcttttttttttttttttttttgagacagagtctcgctctgtcgcccaggctggagtgcagtggcgcgatctccgctcactgcaagctctgtctccagggttcacgccattctcctgcctcagcttcccgagtagctgggactataggcacccaccatcacgcccagctaattttttgtatttttagtagagaggggttttcactgcattagccaggatggtcttgatctcctgacctcgtgatccgcccgcctcggcctcccaaagtgctgggattacaggcgtgaaccaccgcgcccggccctgaatttttaattgtattgaattttgcttaagttaaattcaatagccataagggctaagtgctttctgtgacacacagtgtgggtctagagcctcctacaaaggtatcctctctttcagataggtcaaaattgatttgaatgtagattccacgagcgccacagcgtcgtgctcagatcctagaacagtgcctgggaggacttcagtgaatgtggaattatgcatgcacatgtaaacagatggagggaagggcagaaaggtgagagcagtgtctgcagaggcctggtggttctgcctgcagataagctggcattttctatacacagtggctctgcagtgttgagacacttctgaggggaatgttcatctacgtggtctatacaacacgctactgggttagttttttttaaaagcagggtatttttaaattagagaggaaaacagagctgatgactcttgccatagacagtggcaggaagtctgctggatggaagtcactcagctcactcctctgctttccctaaacatttaaaaagtcaggcatactgtgcgggagaaatgcatttttttaaacctcatttgtgattttgagtaggaaattaaaacctgtacacaggaaaagaatgaagccctgatgtatttgatcaggggtgctttatgaagaatttattatcaggtaggaatatcaaatgagaaacagaaacagcacagaagccccaataaaacaccagcatttgacaaaataaaacacacactgatgggcttgagctgttgatggctggggagataaggaaaataaaaggaggaaattagaacaaataagatggatgatgtaattacgaacagaaaacaagtggagaggaagagaaatttgagcttgttggctatggaaagtaagctatttcaacttgtttaaatccaaaggcttgtttagagttcacaagtgtcataaaaaactctatatttaaatatctaaacatcaaattgggcccacagtgggctaagggcttgcattgactggcatcccgtcttcagcataccaaaacatctccaaatagaatagcgcagatcaccttcagctgcctgacattaactctatactgctccccactccttgttcccatctgattgccttcaagatagcgtagtgcccaacatgaaaggattactatagcaacataggaagctcttttatgggcatggaggaggctctgtggagtggcgcaggaaatccagaggcgagagcaacgaggagtgcccactgtcaagccttcctagagattcttaactggaggatgtgtgttccaggaaatgattaatgctttgagggaaaaaaaaatgttctaattgaacatacagtaattctgaattttctctttgtgtgacagataagatataatcactgaatttctttctccagaggctttgtagaaaaaaaccctttgtggaagcaatatcttcagtgtctgaaagatagtctttttatatgaaacaaattctgcattgggttactaaaagcatccacctgcttatcaatctaaaagctgcatctttaaaggtcacaagtgaaggaaaatcagatagactcattctaattcctagcaaacgggagctcatttctcaccaatccaccccgcagcgctcagtagcatgacctttcacttacaaagagaacagcagattctgtctctcatgtgctagccttccttcctcttcaagaattaaatgcagttttgatattatcattacacacttccataatattccactgcccaggcctataaattagcattgctgtaccaaaatgcccagccaaatctctctctcaccctcacttgggcctgcaagagaatattaattaatactatcaaaacagggtttagtatacagtactacacagtcagagaaatcttataaaacctgtgacctgcagcagtgagtgacaaaaaaattaaaaatgaatatttaattgcctgttgctcttttaaatttggactgacaaattcagctgggaaaataattctgagagattgcagagcagcctttctttggcatttctgagaatataggtgtctgcatgacattaggaagtaattggtatattgggaacctatggaaaacacaattgggagaatttttcacacctaagaataatgaagactaggggcttgtcttctgtttcttaccacccactgaaacaacagctggaggggtcatccacctggtgtgatggcaaaaacacttacttccgcacagtcgctgacaaccttgttcaagtctaaagtcaagggattccaaatacatacaagcacaccaagatgggagtattaaatggatcagaggcagtcatgtttacattaaaactaaaagtacctgtaagactgtatcatttcattgtcagaagaaattattttttgtagcttcatgcagtaatttcaggcaatgtgaatttaattgataccaagtatagtaagctcattaatagtatgcaaggagaaatgatttcaatggaaaacaaaaagcagtcaatttcacatctacatgcctcaacttccctaatatgaaagaggggaagcacggcacatccttatctgaggccaatttaaattctatgtggaagccagaacaaatcgggtgctcagaacatttcaaattagtaataattaaaaattcagagatgacaaagtttctcctgaaataataataatctacacttgtatggcatgttatgatataccaagtcattatcacattcaatcctccaagggatatgtgtatcaggcagaacagacatcagcatgcccattttgtagatgagaaaaatgaaaccaggggcggtagttcaaatgacaggcagatcagtcaatgggggacccagaactcaaatcctatcaaagcttggcaaccagtgtcttttccactatcctgaagcaggattaacatttgttagaaatattgttttctttttgaacatgttgaatcaatattgatattctaatttaggagacaaggacgccccttgctatttgcatactgtaatagccttcaggataattactggatagatcttttgaaaaaagatgccacatgtttacactacttcactgcttttagaaaagtagatatatgacatttaccaaatgctgcagcacaattagccatcatttaaactactgtgaagaaacgacattaaaagaggagaagaggcagaaaatcaaagtttccaatgactttttttatagctaaaagatccagggccgggtgacggtgactcacgcctgtaatcccagcattttgggaggccaaggtgggtggatcccggggtcaggagatcaagaccatcctggctaacatggtgaaaccccgtctctactaaaaaacacaaacaattagctgggcgtggtggcgggcgcctgtagtcccagctactcgggaggctgaggcaggagaatggcgtgaacccggcaggcggagcttgcagtgagcggagatggcgccactgcaccccagcctgggcgacagagcgagactccgtctcaaaaagaaaaaaaaaagatccagtataactattctgccctccagagaccccagaaactcttctgaagatctctgaggtttccatcccttattccacagcacatgaacaaaaaacccaacttgtaattaaagtttctatcctacagtctcatctaacccaaaatcataaatttgaagcaaacatacaaaatgttatactgtaaatgccctggagccagtattattgaatgagacaaccacagtagtttttgtctcattattgcttaataatatttattattattggctatgattagttgtgttattatgctgcctaagccaaggatttagcagacttcagttagtaatcaacaactgtagtttaagtcccaaattcaagcacagaaacagaataagaagcaaactttttatttctcaggcataaggccagttattctatataaatgatcttcagactctatgatttagaatctgaaggtactctacggtctgaactcacagggttcagattctgtgatttagagaggtaaataaggaaattaaaacaacatatcttaagttatttcacaagcaagaatcagatattgagattcatgatggcttcctgatacccaccactgttcagtttggagtattaggtggggtgaagtatctcagcagtgcaggtaataaccaggacaatgctcagatggctactggccaggaaacatgatcaggatgagcctgcctctccagacgtagcctctggtgacccctaccacacccctctagactcttcacaaggaacctgggctgccttctcaagtcatgcatttgccagaggaggcctctgctagcaccactgagaaacacagcctgttctccagtggtggtgtgtgtacacctacagcctccacttcctcaccaaaccctccttccttcagctcttaccattttaatgcaactgaactactgaaactactctcttgaaacaatttcttcttaaacattacactcaatagcccgttctcatctaccgccatctcttctagtatttaatactgtgctgacccactcccacctcagcactctccctttaactttgggaagggccttcctcttcctctggcttttttcatttttttgtaccacacccacctccaattcctcctttgcttcctgcccattaaatgtggctattcttctgagggttcttataaggtaataaaatagagagggaagcctcaggtgattataaaattttcaaaaagatctcaaaaagcctaaataaaaattttacttgtgataagcctcctcactcatacacagaattatgtcagctcagctgggcgcagtgctcacgcctgtaatcccagcaccttgggaggaggaggtgggtggatcatctgatgttaggagttcaagaccagcctggccaacatggtgaaactccgtctctactaaaaaaaatacaaaaattagccgggcatggtggcatgcacctgtaatcccagctactccaggaggctgaggcaggagaattgcttgaacctgggaggtggaggttgcagtgagccgagatcacgccactgcactccagcctgggcaacaagagtgaaactcagtctcaacaacaacaacaacaaaaagaattatatcagctcaatgacacagcaatgcttattagttaatctagtttgcttagagatgttttatcagatgctatcaattcaaccatgaattgtttctacactctgacgcatttcatccactcccaactccatgttgacaatagagtcctgggcactttcacttgcatcagtgagcattcaacaagttcacggcaaaatccatcacatcagtacgtccacctgctcttccttctggcctctctctaagttactttcactccctcatttgtgatcacttgccctgcctttgtacattccacatccttgaggtcagtcttcatgtctctctcccactgcttctgccctggttaaagtactcagtactccttgttggactattaggatctcccaggctccactctctgccgtctgcaatccatactatatgctttgatcaagatattttatatatatatatatatatatatatatatatatatatatatataatatatatgtatatgcacatatataatatacacacatatataaattctgcaatttcccttcttaaaaggcttcaattacttctacttcctgctttctactgaagaaaatccgaagttcctaacataatattcaaatctctaaaggatctactacaatctgctttttcagcatgatttctcatagaattactctctccaggtttttgatcaaactagcctacaacatactgttctctcaccatgacttggggtttcctgtttctatgctttatctaatgctggtccttctatttagaataccttcaactattaatactatattcttaaatgctacaaatcttcctcatttgtcaatgcttaacttaagggctccgcctttcataaaggcattttctttcttttcttatatattttttaagaaacagggtctcactctgtcacccaagctggagtgcagtggtgcaaccatagttcactataacctggaactcctaggtacaagtgatcctcctgcctcagcctcccgagtagctgggactacaggtgagtgcacccatgcccagctaatattttttggccttagtaagacagggtcttactacgttgcccaggctggtcttaaactcctgggctcaagcaatcctcccatctcagactcccaaaatgctgggattataggcatgaacgactgtgcctggcccataaagacattttctattagccccactggaagtgagttctccctccactggagtagtgctatgccttaagtttgcccgcaccaaaactcatgttgaaatctggtccccagtgtggtgggtttgggagataaggcctagtgggaggtgtctgggctatgagggcagatccctcatgaacatcttggtgctggttcttgctgcttttgcagtagtgagttctcactctggtgagactggattagctcttgtggaaatggattagttccctagagagtgggttgttataaagccaggacactcttcaggtttcctcctctttgcacgtgtctgcatctcctttgatcttctctaccatgttatgacacagcatgaaagccctcaccagaagtcagggacatgcccttaaacttcctagcctgcagaaccatgaactacataaatcccttttctttataaattatctcactttgggtactctgttttagcaagacaaaacagaatgagacaagtaccatgccgctttttgagtattttcttatagaaatcaatgtataatgtttctcttataattaatctacatgaatctcatctttagagtgtggacagtatctcactcttgaatcacacacagtcctatacataatgggtttgtcttaataagtatttgacaagggaatacataaataaatcagtgaattaaattcctgactttctactgccaattttttaaaacaaatcagtgtttagcagattgcagcatctatgtagaacaagcttcttttgtatccagtaaatataatgcttcaagtattcctatagtacattcccctccttgctatacagtatttggctttgaagaataaattagcacaagggtttcactggatatgcaatagaaaattagcttctcataaaatggttcagttcaagtttattagaaagctctcagttttactgttttgctttgtgggaaattttgtgttaactatgatcagaaatggtggaaagcagagctgcactgacagaccgtctaggatcagagagacctggatgatgcaattaaaaggtggacagacaggtagacagatgttcagctgcatgatcaggaacaagattgtataaaaaaggcttctttgatcattagagatactgctgtaatgaagccctggatacctactcggtgtttgtgccggctctcatctccagcaggtgtcttatagagaaaataaggcaaacacaaacagatccactgccagctagtcaaagccgcttggcattttttcctgttgattaagccacagataaaatcatacatgttgtgcttctgacacaggcagagtatgcaattcctgaatcgttacagaatacatctttctgaaatatttcagcatccattactctactgagatcaagaaactaatatatgttcaatagattatcctatgtgatccaatgcatccctaagggccaagaacatgacacaaactgtaagcaccaaaatggatttaaaagccaaacacactaaaggatggtgaatttgagaaatgcaggtaaattgtgcatgagtagacagaacactggggtttaagaataactaactcttggttatgtagaagaatggagagctgcactaatgtggaacagccaaaacggcagagctaaatgtcattcatatttacctctggactgcactgcatggtcccttagaagtaacattggcctctcatttctgcatagtttaaaataagagtggattctctcatcacacagaggcagaatatgcagtttgtgaattgttacagattcaccaccaactgacagggatgtaggtggtaattagggattctcatgggaataattgttgccgtgaataatccacaaagtagagacttagacacaagtctcagcaatgctactgacacccttctgtattgggcatgccaatttatctccttgtcttggcttcctcatctgaaacacagaaacaattttaacacttgttatttgtctggtagggattttaggaacgtaaataagatgctctaagaagctatgtgattcacagtagcatcatttcttactgaatctcttgactgattctggctctaaggatagaatgaggagaagaagaaagggaaggaggcaggaagagaaagacgatgagacccagtcactagatcctattttcatggcttggggcagaggtgaatgcctcagtaaatcacactttcaaagacagatggtcctctttaacaataacttctcctcctagtcaccacttcatcttgtaagagactttagctccgtatgttcatgaatcattgatcctgttacaattgtaatgacacaaatctgaaagatatgatgacattttaccagcgtggtgagtttttgagaaagagttggaaagatgcaacattttaagttacaggttggaaaatcagcgaagacaccattgttttcctatttccttctctacagtttacagttacaaagctcactcccaacacactttaattagccactcactgtcacgtggtatttactaaatatagaaggatgaggagaatggctggctgccctccttctcggttacagtggttctctctgcactagctttccgtgagcagccctttgcaccaccacttgaaatctcaatattatagcccactctctgatgttacctgaacactgccaggtcagactctctcggaatactaatatcaagaagatcaccatgacatctgcctactgtaggtaacaatgaccaaccataaaggtaatcttaaattgggttctctttcaagatatcactaactcaaattgcttttgtcatagttcttttcaaaaaaatattttcaatttagaactggaaggaaacatgaaagactgggcctgactgcccgtgaagttcactgctattgcagtgctaaatgggcatagactgggaagacaaatgaaataagacaaatgcacactctcccttatgctcaagtacagtatttaatacagctgaacatggcatttatttttatctttgacagaaccacaaatggccactgactttatctgcagatgggatattctcaaaaatattttctccctgccccacagggagaacaaatttttttgtttaccagcagtgagaattggtgaacatggtgtatgtactttttctccccttcaaccatcattaaagattaaacatcagtaactcaataaattctagaaataacagctgaaaatgcatgagaatggcaagaccagacaccaatacgcatcatggtggaaagatgtttaaaaggtatgtcctgtaaattaggagatatttatatagtatatagaatctcaaagttgcactgctttattattttgaaatccattcttatattcctgcagagttttgcagtctgacctatttgtcttaaggttggactccattatacattcttaagaagcagaagcaagacggagatggccttgaaaatcaccatcaacattgtaatcagtctctttgatagaggtgatacagagcactgacactttagccgccattttctcttaaaatggtattctcattcatttgaagacagaagcagaggaccctgccttgaatttgcaatgtttaaaaatgggagaaatacactatttgattcaatgttcagacattaacaaagtgcattcaaggaatctaaatcagaaaaaaaggaaagaaaacttagtttgtagtaatctttccataaaagcatccaaaattcctttctgattgaaaactgtgatttcagattagctactctaaatgtattataaaaagcaaatgcaacagactttttttggttgatccagcctaaattaggctacaaaaagggaagtaaaacattaaaacaaacacaaacatagatacatacaactctcagtactgttagctactcggtgatgatgtgaataacattcctagagacctcctgaagatgagaattttcaaggggctcctgcgtctaaattatggtaataattcctaccctcttaatcatgaatggtaactacaaatagaagatagaaactcttttcttggcttttaggctttaaatacatcctcactttaaaaacagatcccatcatctgtctttagacaggagtgtgtttactcacaggagtgaaggtctaagatgctgccttgagaaagataaaattaaggcatcaaagaatccaaaatacaattttatgttaatatctggcttcctttattttataccaatatacagtgaatcttacttcttaagcatatatatcacagaaagcacatactatcgaaattctgtcctgaagaactcttgaaacaaaatttgctggagtaatatttctcaacctatacaaagggaatgctcgtatccctatttacaatgtaccttaacagcctatgtctagcatcattataattaagaagcaaaactatgaaatggaaagacaacaagaaaacgagcacatggagggctgcttcctcatagtttcaccatgatcatcactgattatgatcatccggaagaggtgaatacattatttaaaactgtgagatatgcatgtaggctctggtcataaaactacatttgtcctagtaaagctcaatttaaggttgggctccaaattgcaaaagttccgaggagaagggagtttctctaaccatctatgaagcactagcctttccctgagcaaagcattttgcctccaccgcccccccaccactcaaatagaactttagcacctcctttattgctcacagtttctcttgtacttcaggggatttacactgagtgagggcaggagaatccctagtctaaagcaaaattctgtattgatatttaggatgatttcagcatcagcacattagactgaaggcatggatgaaagattgtggttattattcctaaagctgactcaccctcacagaagagcccacagctactgaaaagggttctattttttttcaaaagagggataggatagtgtgagttggccatggcaaatgaaaaagcccagcttcactttctatgtgtatgacacagcccgggagggaaataggcatgacagtaatgagacttgggtgttgggaagtttagtttgaagagcagagcactaatggtttccagttgagatgttcaattcagtcctcttactagtcttacttgaagtcaaaacaaaacaaaacaaacaaataaaaaataaccctagtctttcagagtcttttgagagtgcatcacataaaaatatcttgtgatcatctacaaggtgcaacatcacatttatatcatataaaactgacatgtagacctttgtactttactgatcatatagcccccaagccatgttctgtgagcagtaatatgatacagtgcataaaagctggaattctaggcttagacagaacttagctccaagttccaatccagacttcgctgttcatttggtgtgtgactttggcttattcaatttctctaagtctcaccttcctcaacagaaattaaaaataaaacagtaaaaaagagataacagtacacaccccataacattataagaattaaatagcaatgcactcaaaatgcttatcacagatcatgaggaagttttttgttgtgacagaattgttctgtgtcttgagaacatatatatttcttaaaacttcagaactatacatacacaaaataaaatgttactgtataattttgaaaatgaaatgaaaatatatatgtacatgtaaaaatgatatcaggtaaagcattcagtaaacgcagacacacacacacatacaaacacattaccacggtgcctagtacctaatttgaaaatgttcattactacacacggacacatagaggggaaccacacacaccggggcctattggagggggaagggtggaaggagggagcgtatcaggaaaaatgactaatgagtattaggcttaatactggggtgatgaaataatttgtacaacaaaccccctttacacaagtcttcctatgtaacaaacctgcacatgtattcctgaatttaaagttcagaaaaacagaaatgtttcttatagtcattatgtgaaatagaatttctcagattcccatgtttgtaaccccaaacctataataaacctacaaatagcaagtgcattttttaaactgatatatcaaagaaacttgatgggagttttccagatttttcctacgaaaatacagtgggaaaggtattatggagtcatatcaggcaattcaaaccattatattttctagattttgtgaagtttatagtatgtgttagctttgtaaagtttgtactttgttgttatttattttctcattctaaataaatgctcattttcttacctaaaaaaagaaaaaaagaaaatgttcattattgatatagtttttgctactggggttattgtcattagcaaacctgatagaatataggtaaccagggtgacaaaaataaaggaggcaactggttggcccaggaaaggttctcaatgaagggagatggagtgatagacaaagggtgatgcactgggtcaccattggtgacccaacggtggcagcattggattatagccaggagtaaggctgtgtatgagtggagcaatgttgccatctctgtgctgcttccaggttaggaagaagacacattaccagttgcaattacaagatgccagaagaaaaaaggaaagaaaaagagcagctatttctgctgctagacatgaaaacaaaccaactgagaaaagtgctttgatgagcagagtgtatgctgctgggtgtgtgggctggattctacctcatcccccaaaaggggggcaacaaataatctcccaggttcagatgggtgtggtacaaaaaagccagccaagtatacattctcttcttaataaccttaaatcctgtcctcctttctagtgtaaacgttcagcatatgaagctggaaaggggaatacttttaaggaggcaaagtataagggaaacaattcaataccagattccagtatgcatgtaatcactgagattttctatgcctgcatttgaaaaaatgatgtttttgcccaagagccagtaagtcattggctgccacagatcatataatgtgttgacgctccccggtgggcaagcagacaacaggaaagcacttatctggttgtgaaaatgcattccttctccatatgcaagtctatttttcttcctgcaataaactacatttatttgattctgtatctgatagttttatagtgtttgttcacatactcactaatttgcaagattgtgtaatttgcatgggtctcataggtcattagtgcaaactaacagcattctgtaaaagataaagcaagaaaaactggcactttgtcatagtgtacaggtaaacgtcacatctcaatttaggaacttgacaccccaaatctactctttcctcggagaagaagcagattttactccccctccccacaaccctgtgccctaccgggagatgggaagcattagtgaaagagattctaacctacctctttaatctccaggttgtgatatattttgagaatatacaactgtattcatatcctggcgcttgtccaccctaaatagtttaccatttatatttgaacctgaaaagaaggcacaaaggcctccttcctatacaatcccctaggccttctttttggcatggaaagcacatacatttttgcaaaattattcagtgtatacagctgcattctacagttttcattaagaattcaagagatgaaaactgttggcttctataggaaagtgaccaaatctacagggatattatgtacaaatagtctggttagaataataaatgctgcatgtgctttataatgttagacatgtgcaacatggattcatttgtgatctgagtctcagattttaaaaaatggatctttgcctgccttgagataaacttaagtaaataatgtttgccatcaactctaaatgaagaatgacagttaaattttataatcatcttcacagcttcaggacttactttatattttctcaggctcatgacccaaaggttgccatagcaactaggaaatcctaccttatcaagcgcttacatttacattccttgcagcagctccccgttatgaattaaatccatcatggtcttctattctcaaaataaaaagttcttaggattatcttgcagaaacaaggatcaaatgctttgatagaaaaacaccatgcaaaagttaattcaatggtggttttctttaggaagagatataactatggcataataaacagcttatgtccaaacttcctggcttcaaagaaaacttaaatagagatattgtgctaaaaatgacacatttactccctatgcatttcatcttagaattatcaaagcaataatctgattggatatcataccacaaacaggtatacaaagaattaaaattgtgtaagataaaaccctgttacatacgcttataaatattaataacataacaaatgttaaattcacaactcaaattaaaaaaaggaaacaaatgacaagcttcacttttattaagtgcctattgtcagacagtttttgtccttgattttggagtagttaaattaccaggtaatatgaggtcactgcctttttgcttatggctgtatggaatcattatgtaaacaatggcaaaaacctatcaactgtccatctctgacagaaatgaatggtaaattatgactactcctcttagtcacaagtacaattcaagactgcacagactgtctcaaccatgcacgaaatagacacctagacaggagacatagaagctcacagatggtgaaatgagaactcactcaactaagtggggaaaccaacttctgagagataacaccgaaatccaaatcacccggagccctcaaatcaaagcttgacaagtgcttaatatgagatgatgttgagatagaaaaaaattagattctagcctcacctgccatgcaacacccagaaggccacaagattatctggactcctgcctacgggcgccttccagctcagacaagtatctgattatatacacagacctcaacccagttcgcattatcagaaagcactttcctctctcactggttttaatatgtatctatccaattctgtctttgaaattcctctccttttctgtgttttcagtcctctgcttcctctagtcagtttttgcttttttgtccttttggtctctactgcttattctctgcaccttgattctcaatcttttctctcctctctagcttggagagccacagcacaatgagataagggataaatagagcattggctggccacaatgaaagaggcattctttaaagttctgttaaaatccagtttcttctaccagcactagctccctcctcccctctgtgttttctgcagctaatagggaactagtatcttgacttgagatttttttaggatgggcaacagccttagaattctaaggcattcaaaaaggtgaagcaccaaaatactttattagtgactcatgttagagctagaaacagaccagccagtcattcgtttcaggatatttagttctgatcaaattctgctacagtgtaaaaagaatatgccagcctgggctacagagcgagactccatctcaaaaaaaaaaaaaaaaaaaaagaatatgccatgtaaactttcaggcactataatatataattttgattatatagaattcctacacattttcctatatatcaaaccactttcagcaataagcattactaaacttcaaaattttaattaagggatatttgcagaggatatataccacacacacacacacacacacacacacacacataccgtcatgtgccatataacaatgttttggtcaatgatggactgcatacaggatagtggtcccataagattataatactgtatttttagtgtaccttttctatgtttagatatgtttagatacacaaacaccattgtgttacaattgattacagtattcagtgcagtaacatgcgtacaggtttgtagcgtaggagcaataggccatactataaagcctaggagtgtagtagactacaccatctatgtttatgtaaatagactcagtgatgttcacacaatgacaaaattgcctaacaacacatttcttagaatgtatccctgttgttaagcaatgcatgactacatcacctactaagattaatggtcatctactcacttctagcagttctatattaaagacatagatataacagaattcttctaaaatttttcatagtcattggtacagaacagaatctgggataacatttatctagtactgaacgtggtataagagaaaggccttgttttctatgtcttagacttccgggtcattaacaagtaggattgtgtaggactactcttaaaattagtaagcaagatgaagtgtcacagaattatctcccctgactaaacttagaagttaaccaaagctttaatacaagggaaatttctggaaagctctttgataagcatgacttcactatccagtaatgaaattcacagacatgtcaatgtccaaacatatagacatgcaacagttttaatttggttaatgcactttctattcattactgggcctcagtaaaaactcgatatccaacttatggatgcattgcttaattacccatgcttcactttcaaattgagaaggatttaagttgtccatcaatattccatgcagggtagcatggagtgagtgagtgatgtagtcagaatgtcaaagagagagctggcatcatgcaatagcattcaaatagttacagtatttcaggccaatcaaatgcacatgatatttataacatatatttaaatgctttcatttctacttatctggatttccatatttgagggcaaacttaagtttccacattgcagagatagttgttatagatatgcccctaacccatttaaaagtaagtgttggctatacttggtaatcagcatttacaattacaagagcccaaataatttttagcaattttcctttgcaaaaagtaacttgaaaagtttaaatgtcccaggtatccagatcttgcaaatcagaaaacatgttcctcaaagggacctatcctctctcagcaagaacaccaaaaatgcagttaccctgtttcctatgagacaagaagacaaaaaatataaatacaaaatttaaaaatcagaagaacatttttaaatgaattttcaactatttaagccaggaaaaaaaaaatatatatatatatatatgctgagacccaattactaaaataggctaatgccaaggttgacagtgatctttatgttgcttcaggtctttaggattaactagatcctaagtattcaggttcttcttgtcctgctgttgcacatcagtctttgagtctatgtaaggtgagactttaaaactttgaagaaaaatcactggaatttatagatttaaaattttaagagaggattacctttcacaatagttgccttgaagggtcatatgtttattccaacattactgtcattggtcctgcatattttcaactactccttatatcctttccttctatgacaatcaatgtgtcacacctataccctagtgtttgatagctacaactgggctttcttttttaaaatccacaacttcagtgtccaccttaacagcatgattccaaataactttgggctgattccaaataaattatcctaaaaaataaagatctgctacttctgagactattcaaataatacccaaataaaattcacaaggagaagtagaaaaaaaatttttgctcaacagcctcaataaaataagtctacatgaactcctaaaatgattcctgtaaaagacacaaactctctctctgtgtgtgtgtgtgtgtgtgtgtgtgtgtgtgtgtatatcactcataggtgtgtatatatatatatatatacacacctatgagaaggtttttgtccttaattggtgaaagtttccaacatcacaacagaatatttcagtactctggagcaaaacactccactgtctattgaagaaacccaacttgctttctagaaataatttttgaaaacctcatgattgaagctcagacataaaaagggttaagtcaaaggcagtggtagatgcttcatatatacagaaattgtaaccactgttaattctttatctgtctttttactcaataaatatactagaaaaactttaaatgaagacaatgcaagataatttccatttcatgcaaagctgatctgtgatatggcacgtctgcaaaacagtagtgttagagtgatttttttcacaaagtaacctatttttcacattttagttttctcgtagaaaggtatagatatctatggtaccaacaacttttctgtagagtgtgagtgctattcctgttacacacagtataatagtaacacagcaatcttttacttttttccttccttccctccctccctttttcctttcctttcctttccctctttccctccttccctccctcccttcatccttcctccctccctccctcccttccttccatccctccctttccttccttattttattcatttattcaatcaacaaatatttattgaagcactatgctagatatgaatgatgatttacctctcttaattttaaattatctatatagacaatgagtattcagttaaactatgtgttacacaaaaggtagagatttgcttctacaaactggcaagaaacatttaagcaagatgtaaatggtattcacaatttagaattaagtcagaaatgctctgctgaaaccaataatttggggtttcaattttcttttatattctttattcttatacaagctataaatcatatcactacccattcattcttccaagatatgagaacatttaaatgaaaagttctgtttattctttctccaaaccagtgactaaatttaaataaaatgttcttaaggttaaagaaacatgccatttcttttaaagttgtcaacgctccaaaaaagtttagaaaaggaaaaccaaaagaaagattgtcaatgcataattttaaacatataagattagctttaacccatgggctttttaatatacaagccaagaatgctgtcaaagtaaaaatgaaaagaataggtgaattggggaaaaaagtatcgtgaaatattactgcttttaaaacggttcattttctttgagctaggtatttatgccaattcaatcattcaaagaagtttaataacggatttcaatcagtcctttgtttttcttttactttttgtcagttaggaaacacgtatctgtttttatgttatgtagaactgaaatgggaaatccagaaatgccgagcttttcttgaagctaagcagtgaggtttgcatctaggacagtcagacacatggactaaagggccagccgtgagatgttagttccggttctatcccccggccgtgtgacttaaggcaagtcactcaatctctgtgaacctccacatcctcacctataaatggggataacaacaatatctatctcaaataactgttgctgtgagaattactgagcactttctatgtgcatagcatggtgctaaattctactgatactcgagaataatccctagcctcatgcttagaaatccagtcatggagggaaagcagatgctgacacagctgggtttactgttgttctttagtatttgagatggggtagttaatgcagaatggcatggtacaaactaaaaataccaactttggcaaatgtactattcaagacttgttaagtttctctattacctaaatgtttatttttattccttcgatgggaaaaaaataaaggtaagaaagaatcatatatgcacgatggggaaaggcaagtaaaggaaacatattcataagtaaaaggtcaaggttatgcctataaaacttcataaatagccagaaataacagagaaaatggaaatgtccaatttatctggaatcatcatgacagtttttaattaaattatattgatgaaaatattccagaagttaatagagtacctgccttcttaaacagagtgaaaaaaataataattttaccattattgctgactcaagtcaacacttgcatcctgctaagtgttatcaaggaattcttcatgctacttgagcctacttgtatctagcagcaccccccaactctgtacctctcaaacctcaaattttctagttcccatgtatgtatgggggggtggagaaaagataacaaagacagataagattttgaacaagttctacaggattgtaaaattaagacagatttgctgtcggtgaaaccccggggcttttctttgagtagtgtgcataggccttaatgcaaagactgtgtgacacctatggcagctggaggcctttctggtttactcctaagccgcagctgtgttccaggtagctgaggttatctgatacatggcctccagataagtgaggtggcactgcacctcatcactagatcttagaaagaatagaaaacaaatacctgcttcaataaaaggttagcagagaaatgcttaaatacatttcagtgtctgacccagaaatacacactttaaaatgaagaaaaaagaagagtaatatttgtgggtaacataaaagtctgtggcatcttatcatttcagtgttttgtgcaagctttcagaaccatctgataccaggagattctatttgttgttacaggcattacatgctggataaacaaacaagtactactttacatagttcaactacttcgtgatatgatatccctacaaagagagagaaagattatcttattatctcctgttttccatgactgtagatagctatcctaactttccctgagttctagtcatggtaatgaaagacactatttgacgatttctgtcgaaatgaactatttaacagtaaaatcaagtaaaacaacaacaaataggtaataaaaatttttaaaagatttaataatcatggaagacgtctcaggaaatgaaaaaatctacaacgatcctcatgattgtcatgactaacatttgttgggagcttactatggtgtgaggcactgggctaagcactccacaaaatataatcatccctcggggatcatcaggggttcagttccaggacctctgcatataccaaaatccatgcatattcaagtcctgccattggtcctgcagaatgtgaggataggaaaatctgcccctagtgtagaccgtgggtttcatatcccgtaaatactatatttgccattcatgtttgattgaaaaaaatccaggtataaatggacccacgcagttcaaacacatgttgttcaagggtcaaatatatctcattcaggcctcccaacagtcccaaaaagctaagtcccattatgcccccagtttgacagatgggaaaacaggctgagagtgggcatggagcttgcagaaagtcagagacacctcagtgaggaaaactctctttttcatgttatcatttttatcattttagaccaatatacatggtatctgtatgttttcttgatttttaagaaaactaagattaatcagatgagcagtgatgggcaacaaaaagattccctatatccagaaatcaccaataccaacttatttgtccaaactttaaaggaatgtcatcagattagttttcacctatcggcacaaggataagattttcctactcaatgtatttaatatgtttcttcatcttttaatttgttcatcaactatttagtgactaggagttccatgaacatgaatacaacacattcccgtcctacaagaagctcacagtctggtacagaagagagaaatgtaaacagagtattacagaacaatgtgacagtgtagtgacagccataggagctgctataataagtgagccgggaaaggtggcaattggttaactaccagaaaaagaatgattagtttcttgctccaatgccgctttatttaaatttcagggactctatttttggataactcaatttaacatgccctagacattaagcacattcacaagacagttaaaacagactaatatcaccactagagaggtgtgttttctctccatcacctctagcaagcaattctacactgaagcatctcatgttttgattaccggagggtaggatgctaaataaatacactgctggaatgtactaatccattagtagtagcctcaatatagctgaaatcacaggacttatagtaaatcatactcaggaaaaacacctacttctacttcatgccgtatcaatattagagcaacaagatatatcaaggaagagtatatttaaaataaaattacattctacataaaacaaagagcttagaacacacttgattgatttcttgtccccaccttaccaaaaataaaactccaggtgatttgtattggcacaaaaccaaaattaagtgtctagttgtgctaacacctaaaacatcagatgactaataatctaaatcctaccttaaaaatagaatatattgcatagcaagaactctgacaaccctttgtttgtgggaacgtagcagaagagactaaagccagtctaaccacaggttaaaatgtccaaagattttgatatatttcaccctaaagcagccaagagatggctgggagtataatttctctaaacaatgtgagcagaaaatcagacaatgtttctaaaatctaatcaaagcagaggaaagtatgctgtaaatgattttttagatccttggagaaaaaaaaaactagaaaagcagcaagcaataatattggcaacaatttctcatgtcacctcaagaattgcttctaaacaaagatcctgaagggaaacctaattttacattaggcagtgaccatcagcatatactatataataatatttgcagacaacagtgattatgccttctgggttttcctatacagtgaatgactagcataccagtagtacatacaatatcttcccaaatgaagaagaaatcacaaatctacaaaaatgtccctattctaccatgtgtcccagacataaaaaagtggaaggaaatgaagcaaccattcaaatgttaatttatcacttcaaagggtaaaaatatgtctgtgcaaactactgagtccttgacattaaccagaagaaggtaagctgaatgctctgccagttagtacaatttataaatagcttggacccaaagaaacctaaaggggggaaattatcatagatagtactagatattatttaaagtctaagatcaactagctttacaatataaagctgctggacagctaactgactgggaaaaacctaaggtccaagagactgctaactgtccactaaatccattttcctcttcttccatgcagcctggcacaaggctggcctgctcctctgcatttcctggtcttccctgaagcggggtcagccaggcgactaagttcttttccatgtgggcagaattgatgtgtgccatttccagcctagtgcctgaggttgctcctcctgtactttctccttcctccttctgggaagctgaaacagtaacaccagagtgcctccagagtgacatgcaaaaggtggcagagctgccattaacttaggtcactgaacaactagatgaagccaacccatccatagatctggaccacccaccctagactagtgagtgaaggtaagaaaatttccaaacattcaagctattgtaaatgtgaagctctctatcctcactaacacaatcccagagaactgctgatagagatgcaagatattgataacaatattatggataatgttctcaactgactagtcatgagtgaccatgcatcttcaaggtcaacaagtgagtccactggggaactagtaccccaggaaaacctgtacaaacgccaccactatgctcgtattagcagagggaaaggcaagagtagaagcccttctcaggattcttcactcaaagctcatggggaaatactgtgaaagggcacatggggggacactgggggagagaagaacagtcaggagccactaaacaattaagttaatgagctcgggtccctattatgcatcaacatggttgccttttcttctcatccccagtaaattatttcttctatgaatataaaaagttcacacgcataaaataattgcccctgcccttcaacttcaaaggacatgcttcactataagtaatacaagtgagccttactaatttctgagaaacataagcagagtagataagtgagccctcagaatcaagagtctatgactaagactatgcagtatgactatgtagaaagtgctcattcctcgtttgtatatgaaagatttattttaggtggctttccaaggtactatgctggatgtcatggatatggtagtaaacagagtgcccataatttctgtgctcagacactcttaaaactggaattctctgagccagcttgtatgacagacatagcaccagtggaaggcaaatggtaacaaaaacacccaccaagcgttcattcacaaaccctgccagcaggaataaaaactgcaaagatgattttgtttcataggcaaaatgaccatacaaaaacaaataacttctcaagctaagtcaattttgactgtgacatattggcatctagaacaaatggtcactttcagcagaagcttgtttcataaattaggggagaaagttcatgaaatgttaaaaattccaaccaagcaactgggatgtaaattgtgatcggatttggagttgacacgttaaacagtttaatctaggtacagctctcagcagtgctaggcatatgcaagagaaacagatgctttgaatcatttcaaagtacatccctgtcagaaatgtcctttgtgacactaaaatcaatttcctacgcctttactaactgttctaccaaaagaaaaaggagggaggaagagaaaaaaaaggactcttttaatggaaacgtcttcccactgaggcaaaattaaacccaaacctattaaacagtacaaatttatgttcaatttttataattagtgtttctttgatagaaaagatggcaaaaggacaggatgggacacgacacattttcattgtggagaactacaaagtttttgacttgtcctgaagaaatgagagaaatccaacaagagttgttaatgtataaaaatgagattccagctcctgtccaaactagcccagaaaactgcatgagaacagattctgttttacttgggaatctcaactacttatacaaactcagaaacttttttttcccctctcattgcagattgttaaattcacatggccacctctccagaaaacctgcagtgtatctttaaatatactttttgacaggtgcctgtatcgttgccttggaaattcaattaaacacacatcacatatgtttagccaaaaaaaaaaaaaatggaataatcaaaacaccaccaaacaaaacaaaaatgggaacacaaactgagtatctaaatactatagcgtgtcacaactctcctgaaaaagaggaaaagtttctcagtcccactacctggagcaacacgaattaaaaacacaattgtttctttctttcccattttagttatcttgacctaccacaaagcccatacttttgctaaaaagggaataagtcataatacagtgcaattttcattcaactgggagggtgttttctgcatgcttctctcctcttgcttcccggtgttggtttaatatggagcattccagctcctcctgtagacaggcatcctgcgaagagtctccagagagtcatatcccaccaaaacccaaataatttggccagccatgaacatgcctgagaataatgcccattttccaaaggattttgtcatttactggactaagatacacacattttttaaaatgctcagtatgtaaggtttttcaagttatttggctttgggggactcacccctactatttagggtcagcaattaccttgcatcctataatgtctgatcacaatcaagtcagctagaaacatctccacagtgagttagctatgtctaatgagaaaagttcatcttgggagagtgagtaactcagttgcaaaggaggcatttaaacatctgaacaaggctctgttcaccttgttcagcttgttgatagttttcattctttccacaatggccaaagaatagaaaaggaagaggcagaggtttgggctacagtgtgtgatagttccgaggcggaattccgatccttccatttggcacctcctcttgctaaagccaagaggagacatgggcacaaaagtagcagcaaatgcaaagaatcttatccagacacaagcagcaataaattcatccttaaaatgtatagtgttaccgtgaatagtcattttgagctaaaacccagaaaactgttatgttcctttagtgacgctatctggtcacctctaatgcaatgatacaaatgccaaaaatctctccttaaggccctgagaagacttggaccagaggaaaagatttagcatatgagacagcaagagaagccatcttaaggaagtgttctactaacatcttttacaaggaataaaactgactatatagcaagataaagtgagagaaaatgcaacgtgctatactgacttcctagtcagcaaaagttaatgaattgcagatcacgagcaactcaatgtaaaaccacagtgtgtgcatgttatgaaattactccacaaaagattgcttaagcaaatttacaatgaaaaacaacatcaaaacaccaaggaagtggaatgaatataaatacgaagcacacttaaacacctaggacatttattttaagaaggcggaaaaaacggctcctcaaccttcaatgacttttaaaaactataaaggaggatcagataagcatctaggtcttcttcataacaatatatattttacacaagcaagtaagcccagatacagaaaattgatcttcaattgcccctgcagccttgcagacagcatgcaaaaatccaaccgtggacagtctttaaagggtcaaactgaatacacaacacctggagatgaacacgaaaaatttaaatagggcctgtgggtctctaaagagcagtttttaactggcctataagctaataagagtggttataaactgtgaacaaccaatgccctacacgaaggaacatttatcacactaacacgcctgtaaagtggagagggttcatccacatgctctctgcagcttctattagaacgttaattgttcatactgaagaaaaggagacataaggaatggcttttaccatcacgtgttaagtttatttttgttcctctgaccagttcccaaggggcaggaggctaatgactgttcttcatcatcaactgcaaaggatatttacatccatcctgtaaccatgacagctgtgtcactaattccctaactacctccaccacatgaaccaatcatctggctgaagctgcaagatggagtgccctgcagtcattattcaccaagcactttcattaacaaactgcccttaattacagtggtaattgcaaaattatttcatagcagcaattatttttctcagccaatccaggctatataagtaggacattgcctatgaaaatggcataaggccaagtaatctatgaccaaagatatgttttaattgtactaccaacttagtttcaaaatattgcatcagagggctttgaaattacattatacatcctattacacactacacacacacacacacacacacacacacacacaataaaagtaaagctaaccttccctacttattttttttaatttgaaagcaaaatgcgtacataacattcacattaagtacctaaactaatgctactgtctagcaaagtaaaaataatgagtctctatatctaaacctatactttcagaactgctgaacaaactaacccatccattagaaatgcatcaattcccttccatccattccttttacttaaaagcccttcgttctttcatattcatacatttagatactcagctatgataagaaatactggaatacctgtccatctgttggcctcataaataaaatcacaaaggagtttccagaaatcacatcctaatgttcaaaattataggctgaaacacatctatgcttagtttcctcaagtttcaacttgaaaattcgtaaaaatttaccctgaagatgaaactagagtcataatgtcctatttggggaatagtgaattttcagtgaagttagagtacaagaagtgtgtgatctggagactagggagatgtggcggaatcaagattaagcttttaatacttcaatcagactacatgaagacatgaatactattctaaggagtttggatgtgatcttgtagatagtgaagacgggtagaaggcaaggaaagatgacggcttgaattcagatacgggaatggaaatggagggacaagtttgagaaatccatgaagaattttgcaggcagaattatacttgatgacttttaggtacagacagcaataaagacatactcaaagattgctctgaggtttccagcctgttggaataggtaggtggtgagctaggtaatgcagtaaggatctgtaatacacataagcattttaagtatctataggacattaacctagagatattaaggaagtagcaagaataataattaacatttattgcttacttatatgccagacactgtgcttaatgcattatatgcattaactcacttgatactcaaaacaataggatcttgaattagatcctgtttttacaaccattttttatagacaagaatgctgaggctcaatgagatgaaaggatccaaggtcactatggcagagaatgctagttgcctcacaaacatccattcttctttctgtccttggtaacagaacccctctttttaagctgtgcctggtaaagataacatttcctacctccctcacatctaggtcatgagctttaagaggaagtgttgcgtgggttggaaaagaaactggttgtgccaaaagcagctcttctttgtctttcctgctgcctaacaggcagcagcactggcaaaaactccatcttggaccatgagatgaccatcagtaaaaaagtcaccaactgaggatggtgaagcagaaaaaagaaggctgaattcaagatttttgtggaagcaccatacgtgccctggattgcccatctctccacttctttctactttaaataatgttttaaaaaacattatttaaatcactattttggtgattttgcaggtagaattatattcccatttactcattatataggtaccctgccaattctttgggagccaaaaagtactcctaaaataaacagtcacacggctaataagtcacgtagtcagaaactgaaggcagttctttgattctaaattctatgatcttaacaaaaagggccagactgctcaagggagcaattgaggctataggtacagattgtcaattattggtttatgtacatcctgacagatgttgttacttcctctaatacaaaaataatgcaaaaatgcatcattcaaaaaaggtattgccattagataaaccatgtagatgatgaagaattaacatcttaccaattttagagaactaaaataaataatcctaacaaccctaaaattatcaaacataattttatcttcctgttggggccttatttggagattctgtagtgtatttttattaaacagagctacaaaaaaatcggcaagttacctatatgctgagtaaacgggaaacaatctagttccatcttttctaaactttatttatttattcattcattcatgtattttttagagacagtatctcgctctgtcacccaggccggagtgcagtagtgcgatcatagctcactgcagcctaaaatcctggcctcaggcgatcctctcacctcaggctcccgagcagctgggagtacatgccaccatggctgactaatttccttaaaattattttttatagagacgaggtctctctatgttgtccaggctggtctggaactcctgggctcaagcaatcctcccgtcttggcatcccaaagtgctgggattacagatgtgagctaccatgatgagcacttttctaaattttaattagatgaaaatctagttctataaagaaatgaaataccaatgattttgcagtaaagcatgtttccatataaataaaatttgcaatttcttgtgtcagaatcttgaataatttataggataaaatcagttattattttgaatttcctatgcagataggtgtttatagtatttccctatactgtattataaaccagtattaactaaaaggttaataatgttttattcctacaagaagaattgcagaattagtgtttagacctacagttttatcttcaatgcttgagtatcctgaagttggtgggaatccagaaaaaaaaaaagtttcatttaattaaatataagtcaggtctccaagcagaaggatgatgtagtcacatgtttttgtgatgaaaatacccctaaaaatagaaggaaagagattccttatgtaatataggggaaaaatcaatataaaatgtgggtttttccaaagagaatttatattctcctgttaaaatattatttttgaatttcattattttactagaattccaaatctagtcttcctttgtagcaaagacatgagataaataattattctatctaaagcaaccattgctatattttgtaaaatccacatagttcatacttttaacaacattacagccagtaagtgaatgtatttcattttgatgatttcatatattgcattaatgagaaaaattgaggcatattatcttaggttctaaaatattgtgcaattgtaagttttatgccagccttcaagtaattcagtttttcaaagatagtaaagggaaaagaatctgacctaggcagtctatcccttaacaatgaaagtaattctacttaccaatttggttttcttcctaaagagttgcaagattggtaagaagtactggattaactctatattatctctgcttaggtatgttttcaacatcctatggagtaaatatgctagtggtaagtgcacagtacttggggaaaaatgcattttgtaggacactctaggccctctgtagtgactaaaagcaaacataataaaacaacctgacatcaattcagtatttctccatttactgaaacttctctgagcactttaatacatgcaaatcatattccaatgcatttttaatgtttgacccagattacacgaaagaatactagggtaataaaaatcttcatatactttatttgcaaatattggaaagtaaagatgggtagtaaatggctacagccgttatgtcatggattcctctccttaatatcctagttccagtagctgctaactactaaaactcctgtggagttcaggtccttttctaaactgtcctccaagattttctgactacattattacaatgtgtttgtcttcctggtaattttgcaacagtggcgtgatactccaggcaaagcattccatagggttagagtgctgcttgaggaaaccagtggaatgcaatcatcacccacaaatgcaccatctgctgtgtcttactgcttaattaaactaaaactggtaggttcttaattctcacagctcataaaaataaaggtcacaacagagcactggcatcatgcatcatccacataacatacagtcgctaaagtacattttgccaacctatcactcaaaagaaaaaagaaatataccatctagctggcgtcaaagcacagaatgattctatcagactgacatcagatcaatgacaggacagctgaactgtcagcctaagtgaacaggaggacagaagcttcaattcgtggccattgttctttacctctctcctgtagcacttgccaaaaacaatccttccacacactgtaacaagaccactcgtgaatttgtttgttcaatcatccactcattcattcttcaaccatttatcaaaggcttacatatgcaaggcattgtgtttagcattttggaagacacaaaaatgaatctgacgcaggctgttaagcatatacagctgccaatgacttcattagatatagtcttatgtcaagtatatataacacttttatggagatataattcatatatcacagaactcacctgtttatagtgtacagttcaatgactttgaatatattcatagagttgtgcaactatcactactatctaatttcagaacattctcttcatcccaaaaagaaactttatatccactgatagtcacttctggttcgcctcttatcccaacccgtggcaaccactaatctactttttgtctctatagcttttgacttttctggagatttcacataaatgaaatcataaaatatgtggcctttgggcttcttccacttagcataatgttttcaaggctcatccatgtcatagaatgtatcagtacttcattctgtttaatggttgcgtaatattctgttatttggctataccacatattgtttgttcatcaataaatggatattggatattgtttccatttttttgattatgaatcatccctgcttaataatataatgcattacattataaataataatataatattcatgtacatgttttgcacagacacgttttaattctcctgggtatataactaggagtgtaactgttgtgtcatattggtaactctatgcttgacactttgaggaactgtcaagctgtttccaaattggctgcaccattttacattaccactagcaacatataagagctccagtttctccatatccttgtcaacacctgttattgtcttcttgttaaattctagctatcctactgggtctgaagtggtacttcactgtggttttgatttgcatttctctagtgactaatggcattgaacatcttttcatgcttattgatgatgtgtttatcttctttagataaatgtattataattttgagcaacttttagtcaactattcggtagaaatatataaaatattgtatctataatcttccagcactgtgtgacatttcccaacaagccactgatgtattttcttaccctaagttacttttgatgtttaaataaaaactctaagataatatctaaaaccagtcttgaaattccacagcataaacatggaagtggggtgcagggaaagtagatgggtgaaatttcacttgattagatagctctttctagccaacagcccatttcccaaatctactaaaagtcaactagtaagaatttctggagctaaatgatgcggaagaggttgagttacagaaaattcaagatgatgaaatgatggtaagaagaataaagcacagattcagtttcagatgaaggaagttcacgaaacgttacaaaggtaaagcaacttatttggacttagtagtagagaggtgttgaactgagaaagataactaagaattatttcctaggacagtggatgattatagtatcgcttgcccaaaggaagagggaggaggaaaaggagaacaaaacaaaacgtaaatattctgaaggaggattcattatgtggcagtggtttctgctgctcttttaagaggagagatacgaaaaaggaaaaaaaaaaaagtgggatcaatctaatttgggccacaatggacttggtctaggatatgttaagttgctgttccaggagaagcagatagccatacaaagaacccagaaggagttcaggagaggatctgggttaaagatgctgtgggaaaaagaaagagccacaggcattcatatatgaaggagaaaaaccctgcattcttcttaactcctttcaagccaactcactcttgtttcaaacaatggggaacaacttaactcagtgatatagttatgagatgctaatgaatgaaaataattgattctaattatctcttcaacacccttaatgtacccgtaaaagtaatcacatgtcttcctttagacttctctgaactgcatcatgcatcttgaactttctttgctatgtaggtttttaactacctaacatttttctctaaataaggcaaaagaaaacaaaatcaacaacatcaacaataaaaatgatgattttggtgccatgctctctccaacaaacaaaagaaggcaaaattgtgagtaagtcagcactagtacttttacatgctatatactacagagccccaatcggtaagtctgttctctcttgttggtgtgttcgtggaaaagaacatgacagcagaaacagacagagaccttaaaaagcaattaagggtgaggaatctcctgccaaacagctagtgcagatagaaccttttcttccatagaccttagcctcattccatagccaagaaaaaagcttgataaatactatatgatgaacaagtgataaaatgtataaaaactgcgatgaggaatgaccaatggaagaaaccaggtgtcactcagagactgagtgggttattgtgcttcctgtttcctgtaggtggcgacaaactccttgaagaggaaacagaaagcaaagttaaaaggctggtgtgtgtctagattgaagcgctgaagaatttgcttgagagttggcaatttctcctccaaggcagctcttcttcactggtattggcaagctctagatttcagaagtgattcacctgcgccacgttatttatgagctgctttttcccctttaagtgcccagcttcacattaacagtatgaacagcttcactgcagagctcaaccgtgcctatcacgtaaatggaaggttcgttagagcatctattaagaggattttcaaaggcaaaatagcattttaaagccattagcatcccttaagttctatagaagaaatgttaaccaactgctatttaaaaccatcaaccagaaatggccataggtcaccaacaatcccttagattatctccccagagggctctcacacctctatatgctcccgatctttcaggccttgtagtgagagagcatcaacgtgaactctaggagcacgtcccagacgtgcatctcctggaggcagccagggcttggacatcagtcatcaataagggtccttgccaaaaagaagtggtggggggcagcaggaaagcagggtgcttggtcaaactgcaataaaagcaggatgaagagaagggtgtgtcttggagggcatacacaagcaaccaagaattagatcttatgtcctaggttttcactattattctcaagatacaatttttataacaaatattttctgccaacctcttaaaatttttaaacaacagcagccaagactgacttctactcggcacaattacataagaccaagcagtgtgttgctctcatttttgaagctttgttttaagctccctcattaatctttcagtcttttctcatctctgcctgactataactgccctgaatttatccaagcctgcagaatgccaggctcactggagtctaaatcaccaagagctgaatacacagtccactcatgggactctacacttccatcagaaagaaccaatcacagcttaggagaggtaaacctctttttaattgtattctatgatactaacaggcattcattacacatggaccttaaaacaagatttgctcttggctgctcataattgtatttctacagcagtttaaaccgttggcacctgcaattgctagcaggcctaggctaagaatttctattatcccagtttcaagggttacatttaaaataaaactcagaggggcaaaacattacatacacacatatttacacaaattaaatactatgcacaagtcaataccttctgcacacaaaactacattaaactcaattagccctaagcaaaactacaggaagcaggtattctatgaaccaacggagctgttctgtataataaagaatataaaagcagctagattatagagttctgcagaactgtcaataaatgcttttaaagaaatcattatcaacactgatttctaaattaattaacttaaaattaacacaaaacaatccaacccaaggtatttatatataaataacctctggtttctgggttctaataaagaagaacttttgaagcatgtatgtatgtgtatgtgtgtcattcagggcttttccagaaggatattcctaagtcacaaaacagccaccagactaaagtacaatgtccttcttgttatggtttactacttgattatgaccaaaattaaattatacaaatatttcactaaatatcttctcaaaccttataaatattaatatgaactcaatttcctatgtgcccagcatttaaaaatccatttaaaaatctcagaaactaatttaagatttccatctagaatacaaattagcaagtcctcttcctagctctgttttgctcagcacccatatctgcacatttagtactaaatgtcagttggtagcacttaaagatgatgaatattaaaagcatgcttctgcctgctaacatattagagcttggcaaccattgaatttgtcataagctgcattttcagtgaacaaacgactgcctttaaaacaccaaagcattcggtaaactcccaaattgtgaaaagggtacacagagggtgaaattttactatcaaatatgttatctgagaggactgtataaaattagaatcttttttaaaacttaccaccgggctatactttctaaagtacttacttgaagattgtatctggataataaataataataatgccagctactattaatcaaatattcattatgtgtcaggcactgagctaaacattttacatataaaaacatacatactatttttatatacatgttatcttatctacttgccatctttacatgcatactatctaatttgcatatgtgcaggctacctttacatatacgctatcatgtcagattctctactccatgacataagcagtgttgttacttccagaggggttaggtgacttacttgaggtaataagcaaatgaaaggcagatcaggaatttcgacccaagcctctctctccaatcccctatacactaccatgcagccaattttccagcagataaaacctcctgcaaggctggcacttgcgggatgctgctcactctatcgggtccaggagcctaatacctgtttattttaaatctgcattaagaatgctttttcatatacaaatcttgtttctgcaaggattcattcatccagaagactgaacaaaaagtacacttttgattggaatacataagagttttttttttaacttaattaaaatggcttgttagaatcacctattcagcatttggaaaaccagctgggttattctgtcaaacctctacacaacacacctactgagacccaacttcatgactagaaggcaggagagtatagtgatgtggactgaactctagaacaagagttcaaaatacggcactatctcctaccagcctcatgtgaccaagcctcagtgtcctcatttgtaaagtgaagattgtattagtacctacttcacagattactgcaagattaaatgaaattatgcatacagagtaccagatacattgtaagtactcaataaatgttagcgcttgtctgtctttggggtgtcagattctatcaaaacaactttactaccttctttggaatgctatatggttctttgtctgtctattaagaactgtcttacactcagtatttttttctgcttcattttatgccatcagctctaccgctctacaaagcattctaaattatccttctgtttctctgggttttgagagattcaaatcctttttccaaattatatactaagatcttctttctgagttaattttcctagctgcttaatcacttctgttgacctccgattttttttttatatcagattggccaagtctctctgatatgaagacacccagaacgaaaatccaaattaaccttttgagggcctaaaacttaggacttatttacgtctcttctgatttctgccttccccagcatttactaccatgttcattactgcatgctaatctcaacatttcttccatggcttacataatgacagatgttttgtccagatttcacagtaaatttaatgggcgagaaacagtgcaattatttataaagttattgtttgtagatgaaattacattttccaagtgtatagctagttaagttatacatgtcttcattccttcaacaagtatttctttagtgcctaccatgcaccatgacaggtgaatcacatactttttgcaaaaagacaaggcaataccttatgtgctaaattcccttgtctgcctacatcacagagttgtttgaaaggaatgttgtaatttttatgagtcaaattaattatatactatctaaatataaatatatatatacacacgcacactatatatatatgtgtatatatatgtgtatatatatgtatatatatatgtgtatatatatgtatatacatatatatatatatagaatccaatctcttttggggggacaaaagaacttttagtgggctaaaaaagtccctaagaaagttgtcagtatatcttatgggatgtggtaagaagatgtacatgagagacaaggaaagaaagaagaacagttctgtttctctgtagccggatgagattatggcattttatttgattctgttttctatattaacttttatgggcatcctgttttttacttctattagttatttttataactttaataaaccttcaataaattttaatgaactattaaatttaaataaattttattaaactttcaaccaccacttaactactctcaacataatcccaaaagatcattttagtctctcttaaatgaaggacaaataatttagcacttttatacttccttactctacctgcaagttttctagttagaaaaaaaaatctgaatatttttcaatgttgattaataattagaaagtgtacctggaatgtagtgtggtatatcagtacccaagatcaggtcttttagaactgaaaaatgtccctccaatagttatcacagtggattgttttgctgtgtcttccacaataatctccatcagttttaggttggatctgtgtctttctaggcttttttgttgcagtctgggcatttttttgaagtctatcctctatcactatgaaacgggagagttccctgacccccctcacaagacatgcaacaggggtgtggctcgtctgttgggctgctgcatgctctaacaccttatgggagggggagcacacagaagggcaggtgcaggagccggggagagcacttttgggagctgatcccatagtagcgtctagggctgggtgcccgtgactcccaaagccccagtgggtgtgctacagtgctcttttagctctgctgtccacagacagcttaagtgttaaccagctcagtgccctcttggtacctgggattttgtccagtgtccaagaagaatcaggtcacacagacaaactgaaggatggtaaatgcggaggattttattgctggatggagatggctctcagcaggatggatagggagccggaaaggagatggagcgggaagatgatcttcctctggagtttgaccattccatggaccatctcctctccagctatccccagctgaactcctctcggtgttcagatgttccttctcttctctccttctctaccacgtcactgctgctcttctgctcctctgctcttctgcttgtggagcctagggtctggggtttatatgggtacaggatagaggggtgcagcaggccaaaagagaacatttgggtgtgaaaacaggaagtcctgttctcatttagagccatgggtttctgggcttgagagtggggcctttgccagggaaccaccctcttttacccagtatttccctgcctcctgtccatatcaactggatgaattttctaagtacagtcagctttttatttacaatggagatttattttatctactataattttcacttcgttttattctttttaaagttctcatttactagatgtaaactcttcaggtatcttactgagtttacaaagcacagcttttataactgtctcataaaggaaaattgtttcagaaagatattgctgcagatctctacaatttctttgctttggagctgcagaattttgttttaattattcatctataatgtgtgatttcatttcttttttacatccttgggcttggtttgaccttggcctttagtgcttaccatgcttcaggactgcttttaagtccttcccaacgattgagttacattaatgagtttgatgcgtgtcttcagtacccaacatgtgctaagtactattctgagtgttggggattcagtgagaaggaatatactcccaccctcatctcttccttccccaccctcatggagctcagtctaatggaggagacaagaaaatcctacactagtgaccgcatgtagacgtctttgcagatgcccttgtgttcaaagtggagccaaaggatgattggaagcaggtgcaaatcctggttcttgactttcaagcacctaaattcacagaccagcccagaacctgggtgggagccaggagtcagttcaatgagaaccacctccacccaagaaggagcatgttagcagctgttacagaatcaactaacactcagcagcactggacatgaacaaaagggtacagggtacatgttgagcaggattccatgactagtggctgaaacagggaagtgaagaggaggaatcaggttgcaggttggggggcctggtgaagaaacggcaactccatctgatttcaactacaggaaagaatgtaaaaattccttccagaaactagaatgggctcagtgcctgccactcattgtagttacttctggggatttggtttttttgagacaatttcatgggcattttaaaggaaataaggaagacattgttcatagcacttccactcactctgctatattcttggaagtcagtggttcaatctcaaattaaacttctcactaacattatgttcagttatttatgctctctaaacaatgagtgtttttaggcaaagatttcctagcctttccaactaaacaaaagagcctcccacacacagagacacacatttccattctgaaagccctgcaggcagatctgtgaagcttgccatcataagactcatttaattttaaattaaattaagggcccaaaaggtaagcacattgttcaggttattccaactaatgtcctaaacttacaatttcaatgattctccatccagttgatgactcctactatatataataaagaattcatgaaccatggaaacaactgacaaaaataaaataaataaatatcactcatggcttagaagaaaaagcattcacacagtccagttcctaactcaaatagagtaaatatgtgcagaaaatttttatcaagattttaccaagtctatacctgtaaggaaaaaaaatgggtacaaaggctgattttctaatagaaataaaggtatgaaggacccaaatttctgaccactatcaggtgacacacatacaaatattcacataggcagagctagttgagatgtaactaaaatgaaatatagacctttttttttgtttttttgagttcaacacagccctaagcttcccctcccctgcgtggggaaggatctgatagatttctttattctacatacatttattgatccaattgtcccagtttttatgaaatttactaacaatgcccaggtgcctgagcgtaacagtcggggaaaaaaacaggaaaagaacctgagttggaaattctcaaagaatactatgtgaggaagtctgcagggtaagcacaatcattattgaaccatctgaatagttgtgggctgagtacggaagcagggattcgaagagagttgccagcctcttccctcccctatcttcccatactggaaaacaaggacagaacaaggaatggaacaaggaatggaagagaagacaggttgaggagaaacatggatggggcaggtagaagttagaaggctatttcaaagaggagactaatagagtttgaaatattcaaagtggagcagatctattaggtgtggcatgtgtgtgcacagccaaagtgaaatgaagatgaaggtcattttagttgagggatttaaagaactacgagatctgggtattagtaaagccatcaaaaggaatgctctacttactgaggattctgcattgaatcactgagggaaaagtcagctgatcttaaagcaaccacggtcccagaagtgttattagggaggtgaggtgcagcaggggtggtgagaagtatgtaaagttggaatggtatggcacttacatatgctcgataacgtgtcaatttccacatctaagaatggagaagatcatattgattataggggagtacccttaacccatcctttgcttgacgcctccactgagcagaaggtagattagagtggtatgactgatttttgtaaacttcataaatttaaagtccttgagaaataaaaatataaataatctgatagtaaatgaagagggttaaaaaatatatttaatccctacttgtcaacccaggaatacagagaatggggggaaaaaagcgatgttcctggatctccctgcgcttccctaagaccatcactccagccaaacactagctgacattttctccccaggaactcttcacttctcactctatacaccctgtgcgaggtcctcctcacctcaccagtcccagactagaacgtccaattgcttactggtcttttctccctgatgtcccatcagttcttcaaaatcaaagctgtttagcaaattcctcccctcttttccaatctgactgcaacaaactcaaggccaaccatcttttcttacctgattttcccaatggtgtcctaattagcctcctactcccctaaaacatcctctacactaccaccagggcaatctctctaaaggacgatctgatcagatcacttcctcacttaaaaccctcaaaggctcccagtgcctacaggatgaagcacaaaaccacttaagctctgagtcatgctcttctgttgagagatcgagagagaaagagagagaatgcccaacatgcctccctgaaaatcattgggaggatcaaataaaaatgtatggagaagcactttcaaaactataaagcttatctagtggttcttagtctttatgagatcacaatccctttggagagtctgataaaagctctggagttttctcaaaaacacacatccacctacatgtaaaatttggcatccaatttcagagcatccatgattcctcaaagacaatcttgaccaacaaccttacttaggtattttattattttcacgttggtatatagaatgggagtcggtatcatcttgatagcatttccagccttacaaacaagcaagcagctctactgtgggcagtaacattattcatgaagatgtctaaaatattcatcagcagagtcactgggcacatagtaaatataggcagaaaattagtacagtagttagcgtataggctcacagtcatttcatcagagtgcagctgtccctacacacaactgttagaaaagaacaggttattttgaaaacaatcagctgaattgagtcaaaaaactgaccagtgggccttcattctaactgaatgaaaacgaagtgaggttccttccttttcatacagctcatggatgcaaaaacacaagctatgccatagcataaatgttcattatgcatgagcctgtttcttgcagctgcatctctcatgacttggctaaggctgtatttgtctatatgtccttctacatgtttgtgcatatttacactgtgtattttagtgctcaagaaagcagaaggcaaggaacaatgtttactctgcatgtttgtacaggacacatcacacagaactacagtgatgtagtatttaagggcagcaaattcaaactcttcaccagagtgtggacctaaactccacatcataaagaattgatcacatttccctttagaaagaagaatattatcagccaagtttctggtatcaaccaatgactaaaccttaagtcaatcacaagtgatgatacagtagtcccccccttatctgtagttttactttctatggtttcagttaccctgggccaatgggggtctaaaaattgatgagtacagtactcatcaattgatgagtaccccatcaggtgatggagagaccacattcacataacttttattacagcatattgatataattgttttattgttgttgttaatctcttattgtgcctaatttataagttaagctttatcataggtatgtatgtatagggaaaatagtctgtatagggttcaatactatcctcagaatcagacatccactggggatcttggaatacatcccctgagaataaagggggacaactatatgccaccagaatatcaccacaaacatttatcagtgttttgaacagtaaatacacattcgagtagtctataacatcacatacaaaggggctcagtgtaataggaaatatacacactgaacataaaaactaaatgtgttcttaacagaagactggccccaaaccaatgtcagccctttagaaatatgcatttaattaactgttttttgcttaccttctgaaaattaatatttttggcacatatattttaagacatagcccttggaaatctgaacttatatctttctcttgataaatttccaacaagtagtcattagaaatcactccaagtccttaaagatgagcttttcaaaaatacttgcatttccctattttgtcacaagatggcaatctcatgcactggtaaaccataaaaattcataggaaaatttaattttaccacgtcaggggtgtggttctcaaagttcataatgtcaggatcactttaaactcttaaaaataaaactgataatattttttaaagaatcttatgaatccacttaataaacccatcgcgtgttaacacaaaggacatgtttttgtgaaaataactacattttccacagcaaaaaaattagaaaagaattttgcaaatctaaagtttggcttaatagagaacaattggcttttcacatttgcttcttcattcaatctgttgtgatccattgtttatgttgaagtatatgggaaataaaatagcctcatgtatatatatagttgtaaaaggaaaagtattttaatagtcttttcagataattatggttttattctcctttgatactataccaaaactcaacaagtggtggcttcttcatggttaaattggattgtggaatctgaaaccacatcaaagaacttctcatactctgtcacattaaaattcattagtcaatcctgcactttgaatggatcttttagccactcatgatgttttaaaatcatgcactggtcatttggaaaatattagttcactgagttatgcagcactcttccaaatggtgacacatttcattattcagtatcaaaaaagtcacattcattagtatcaccaccaatatcataagaaaagtcaatggttcattaggaagctgtcaagttcacagaggaagatgcaagttttaaaaaattcacatttccacttgaaatctttaattttatcactgacaacaatgtccattgtttctcttaaaatgacaggctcactgctttccagaaaatgtctgccaaatacgcgtctgaataactatagtttaactcaatctccccagtcttcttccttgagacaagtatgtagcaaaaatgctttatttgtaattctccttcacacaaactatttttaaaaacatgtaactcaaggtcaagctttcataaaattaataatttttactgcttcatcagggatattcttttttactgtatgtggaggtgaagaatacaatgacttctaggacagtttagtgccactaactcgattcaggctaaggctcccacaactttccccaccattgcttttgcaccatcagagcaaatgtcaacacacccaaaaaaggcaattacgtcttagtattatgagaacagttttcatctcatcgatccctcaaaaggaatttgggagcctccaaggatccatggactgcactttgcgaaacatgcttcagaggttataaaagactttcaatttatgtcagcatttaaaaataaaaccgactgccacatttgcagaaaaagaacaagtgggaactcctaatacagtaaaacctctattactaaaacacttggttaatgagtacccttatttaattttctgattaactcttcaattatacctactcttggtttctaccctttctgaaaaaaatttaattaatcagaaccaaaataagtcaggaaacactagatttaagttctttcctgatgtgtttgttcacaatttaatccttttaaaaggattactagatttcacagccagaattagaagcactgtcatttcacagtagtaaggttaaaaataagtatgagtgtttttccaactttttcttaaagaagtggaacattagttaacattttacatggcatctcaagatgaaaaaaaattaaattgaacttattctgtctggttgaaacatactctgttgctgttattattagtaaccgttaagtaagtactgactatatatttgaatttgtaagaactttacataaattacccatttcattcaatccttacacatttcaaagatgccatcttcaaattaaccttatcaccattttacagatgaggaaattgaggtacagagaattaattaattaatgtttccactaatacaactagtaagtagctaaactgagtttaaaaccaagtctgtctaagcttggctgagtccaaagatgaaattcttaattcccggctctttcagggtttttcagggccagcagctctgatatgcttctgcaactaggtccttgatgttctccagttccttagcttctgactgagatttagctggcattatcagtgcttaatacatgtgctaatttgataggttgtagacattaggtgttgcaggtaacagaatttctttctttccacataattgtctgtcttccaaacttaccaacttgctatcctattagttctcaacagcacctctcttttccagagaaaccaacttgctcatggtttctcttaatgcaccacagacattcttcctccaccattcgacctgcacccctcctttctgtgtattgagatcctgccttctatatttctatttctgccccaagacttagggcaggcattctgtttccttactctaacctcccttggctctttactaatgttttttcttaatgctgtttaacgtttgatatgcatttgttatgtcttcccaactaagttatacatatatttttttcttttttgccctctttgtattccccatgacttctatcacaatactataaataaactagagggccacagatgtggttaaattaatacaccatggagtagtgataataatgctgttgtgataatggtttattaaaaatccatttctcaggaaacttttaatagataaaaatgttatgagagggtcatactgatacgtctagtaataaatcaccttagggatgaccagagaaaaacaattaccattactgaactgaggttgaattttgactccggcttttaagagattggttggaaataacctaagctcaaagctggtagcatactggttggccctaagtgggtatctcgggttgtaaaatactggtcaggaagactggctcttctcagatgaagcgagtagatgaattgagagaaagttcacacttctacaaatgttagcaggaggaaaaggagaaagaggaggaggaggagaacatcattaccaccatcataacagctaacacatgtacggtgttactatatgctagaaacgattctaagtacttcgcatatgttaactcatttaatattcacaaaaaccctaagaggtagaaaccattgttaaatatcttttatagacaagaaaattaagtcgcaaaaaattcaaataatttgcctaaggttacttacacagctagtaagtaatagagccaggatgcaataaactcatttaaactgtttaaatatttgcctaatactaaattacctagtgttcatgtctcaaattttagagaaactaccatttggagaaagacttaaagaactaatatctaaggtacacaccagtgtactctattttaccttgaatttactgtcttttaaaaatagattataaatccttgaacccaacatgttttcaagtatcataatcacttcagcctttggaaggcccccactgaccaacggcagatgctcacacgtaggaagcacactgtgtctccgcctgcataactggttatagcatccctactgtggtgtgtgctatggctcaactctccttcagtattgggcaattacatctcacactgctttgtctccaaatattcaaatttcttaatccttcctggcataaaagtgataagaagaggggaggagactgcaagtgctatatgctttgtaagatcctgtactttctattttaaagaggtctgttccaccttcttttattttttttatttttttttttttaatttttttttttttttattatactctaagttttagggtacatgtgcacattgtgcaggttagttacatatgtatacatgtgccatgccggtgcgctgcacccactaacgtgtcatctagcattaggtatatctcccaatgctatccctcccccctcccccgaccccaccacagtccccagagtgtgatattccccttcctgtgtccaagtgatctcattgttcaattcccacctatgagtgagaatatgcggtgtttggttttttgttcttgcgatagtttactgagaatgatggtttccaatttcatccatgtcccaagtcagtgtggcgattcctcagggatctagaactagaaataccatttgacccagccatcccattactgggtatatacccaaaggactataaatcatgctgctataaagacacatgcacacgtatgtttattgcagcactattcacaatagcaaagacttgaaaccaacccaaatgtccaacaatgatagactggattaagaaaatgtggcacatatacaccatggaatactatgcagccataaaaaatgatgagttcatgtccaccttcttttaaataaccatctaaacatggtgtaattaaaaaaatcaaacaaatgtaatcataacttcatggagcttttctcatacctgcttcatagaggccacccctaccttctgcctcttcactaattttacttatgcagagtttagttttcatttttaacatgtatccaattatttcatcatgtatagtcatacaagcagctatctaatatcaaagtatagaaaatgaaaaaaagaatattagatccaaagtttaattacaaattgggcaactttcagcaagtctcttcaccaccaattaagagagtgtatttccttttaatttatagcacagaataagtaaatccaagctttgaccagagagctcggacacaaaccctcttcaattcactacctctcatgcccaactgagattcatagtattttagtataaaagaggtagaaaaaaaaaagtattcatccctccacgtattctaagttattcttttgtttccaataagatcactaaagtacctcagatcagatttcaaatcagcctactcatcaggtccactctaccatgccagaccaggcatccaagttataaagatgagattccaaattacccagctgccataaagctcgcgttcccgtgtgaatcctgaactctggctgacgacatctggagtccactgcaatcatgtgttccctcaatgactgaaaaacctgagcataatgactacctaagattcatatctgtacatacccaaaatgtttattaaatagaaataaagataaaataatgtgtaggtttatggctgtatttttgcttttatggcatttgggtcacttctatgattatctctgttccatctttgatcacaaatgcaagctctattgttcctttaaggaaatacaaaatctttcatgacaatctcttttaggatgtgtctttctaggaacactctgaaaaataactagaattggcaatgctaagagtttttaatgatgaagcttactcagttgctgaaatgtattaagtgttttggggtggggttgtggaaagaaaaaaaaaaaaaaaagccaggtcataatatacgccatataagggggatttatttaaaatcaaatttcccctggtctcagagtggagtcacacaacataataaatattatatatatatatatatatatatatatatatattttttttttttttttttttgagacagagtctcactctgtcgcccaggctgcagtgtagtggcgcaactttggctcactgcaacctctgcctcccgggttcaagacattctggtgcctcaacctccccagtaactgggattacaagcatgtgccatcacccccagctaatttttgtatttttagtagagacgggggtttctcaatgttggccaggctggtctcaaactcctgacctcaggtgatcccagcctcccaaagtgctgggattacaggcatgagcccactgtgaccagccagaacataaaaaactgtcaatacatgcaaatggaagaaaatgttgttataaagtctctaaaatgtaatatatttcaaaaagaatgagttcccaggcctacttaagaactgatgacatcgtcgcattctaaaaaattaaattcatactagctcaaatagaaaatgttctaagttaccaactctcagactgatggtaaaatctgcatattctgaactactttttaagacttgcatcctcctaggtcattatcagtttattcacttaacaaatatttcttgagtatatttctgttgccggcactaagtattatttcagtgactaggataagcttatattctgatcaatttaggtggcctcctcatgagctacaatgaagcaaaaataaataaaactcagtaaacaattagtaatgacaactacctttaattaataagatttgaaagctttaaataggatatttattctacctgcagaaatgttaaagttaagtagaatataaaataaaccacaagataacctctatataaacactgttctccatcaaggaatgtgagaactagaaaattctttgttttgcaattttcagtttcagtaagataacaaagtttacaaagaagcactgtgtttttgctcaggagataaaacattaatctaactgttgacctagaaataacatacaaaattataaatttgtcacatgaaagctttagggaaacaagcaaactaagcagctcacagcattggttcgtggtggatttgggaagaccatgtatttaccggtgtgtgacagagaataatataaagatccttttttcatctgtttttgaacagaaaataaatagcagaacttccccttaaccttctggagttcaagtctaacacatgctgaaataactgtcaactcttatatatgtaacttaagtcccatagcaatgcaaaattaccaatacaaacttagtgaattgggttggttgcacattattatacaaactggatcagaatacaatttacttcttgcttatcaacataaatgctttaacatctaatccaacgtcttaggctaaaattctataaattcataaaaaatgcatacccaatatataagatctccagttatatccatctacaaacaaaaataaattatgccagccatttgtcctgtcactgaaaaataagtaacaactggaaaggctttaacttaccttaaaaattgcgactacattaaaacacatatacttgtaaagccttgccatcagatcataccaacagattaacttttcttcagataaatcagattaaagtaatcatggagaacctagaaactgaattccaatttgaccaactcaagagttgtatgtgtactctggcctgaatctgtcttaagtaatacacgatgtagtatcatgtttctgagagaaactaggaaatccaaacattgcctgtgtcctgaaggagatggaaggaagataaagagattctacatggaggaacagagtgagtggagagaagataagctccttaccggtctctaagtctccaaagtcaagggctagtatatgcacttaaaccctaaggccccagtgacagaaatggccatatgacaaaccttgctatgccaaggatatgcttcactatcttcatctatcaaaacactatgcatcatagatatctaattttttcatctcttgcatgaagtctttcctgatttccctctgctgaaatttctctcttcaaatgatgtgtttccatagtactttgtcccttttcaaagatatatctcacattgcatattttaccacagttagtttcatttcttaactctcacactagattacaaagtcaatatagacaaagaaatgttcaaccttatataacctcctctgcctatgctggtaaattgcacctactatgtgttcaataagagcttgtctttttcaatatacaaaactttgtaaagattaaagaccttgtagaaagtcaagaggaagatagcaatttcacttctaagaacttaccctaaggaaacattcatgaagagatacaaggggttatgtgcatggatgttcattatcatattattcttcattatgaagattatgatggtaataatgaaaatgattatcttgtattgtgtccttatttgaagtcaagcattgagaatgtactttatctgcattatctcactgagttctcgtagcagccctataaggtacagactgttatctaagcttagaaaaattaagttaattgtccaaggtcaaacaactagtaaaagatggagttagaatttgaatccaaaaggtcaactctcaaggctatgatcttacatatatagagcttgccatgtgccaaagactgttctaagtactttacatatccaccctcatttaaccttcacagtaacccaatggggtaagcaccattatcatcctcattttacaaataagagaactggaacacaaaggtaagaagtttatcaaagatctcataggtaagaaatggaagagctcagatttaaacctagacagtctggttaacttatacagtctcttcccatttataagagcaaatgactagcactgacctaaatattcagagactggtttaaatacatttatgaatatataaatgaatcagcacaataaaaagggaaaaagctggggactatcaatatctgcatttctcaaaattattctatcagattatacacatcatttatcctttatttctataaataatgttcaaatctgtatcatacagattgtaaaaaaaaaaaaaaaaatagcatcgaatacagaaaaagcacttagaatgaaaatcacaagacctgagtctcaggcccaaccatgctacctattatctctgtgatattgggcaaaactttaacgcttctgagttatttttcttctctaataggagttacgattgagtttcttcttagtgtcaatattctatataatctcaaaatagcagacaagagacctcttgctcaagtcagtactaaaatttggtaattaataaacaaggtaatatttaagagtttaaatagagtatcgtggagctttgttaaaatttaaaagttgtagacagagaaccccaaacactcacctacttccaaatgcttactatgctcaattcacttctggtctccttacaatgtgactcaagatgtaaaaatgttcacaatcagttcagcattgatatggacacagaattcaagttgacctctactaatttacccccgccctctctggtttcccaccctcaatccaaattgcaagagtaaaatcacctatccattctatacaaatcacctccaatccaatctctggtactaatcgcagtcccaaacttcaatgtcatatctttgtttgctggatatttctcctttaactatcatttctctaagtccggtccgccaggcttaaatatcagtagtcttttacaccctccataatttactgattcttagtacttctcccattacattgtggattatatctaccagaagcaacatctgcacagaaaaggtgtcccccttctccattgtttcaaccatggcagacaccactaactgttcatagaactcctcccctacctcaccctccactgaggccagacaaaactttacaaaatccttcctatagtagtgtactccagggagccactgccattgactggagtcagggtgtgagatgaggcccatccctcatcctgatctatatatttttgccacgactactcctgacactctaatacaaaccatttctcataccctgactagattactacaacaaccctctctaatacaagtctttgatactcagactctttgatacaagtctccattcagtccatccttcacatggtctctctcctgctcagtcatcctcaatgtttccccattacgtgtctacagataaaataaaaatatattcccctttgtcaggtttcaaggtactctacaatttggcttgaatcttcctttccaagcccatctctcacaattctccagcatcccaggttttcatgcattcttcagtgttaaaactctctcatcaaacaaagtattcggcagaatcccaataaactaaactgacaaaaagcaccatctgggctgcaacaggcctaggctgtctagggacagcaaacaatttggtcccctttgtcccacagcaggggctgaggctcttctgcacgaccacaaaagactgccaccacgctgaccaaagaacatgaggagaagctaaattagactcttaaccagcactggtttataagcacttctgagactacaaaataaaccaagggcagaactaatcaaaagagcccaaacatttaaaaccagagtacagcaatacacacagatgtacccctcctcatacataaatttaacatgattttcctctgctctgaaaatgtcagtgctcagcaagggacaggacaaggttaagagaatctgacagaaagaattggatggggttgaaagctgaagtcctgtaagtttatctacacaagcagcacaagttctcctggcatattcccaactcagcccattgccctccagctgcataatagcaataatttttttaaacaccctcattctgtcctaccacatctcataatgtgtaaaactcagctggatagtgtgtaggattttgtcaagctgtctttaatctttagctttacccactcccaacaactgagctggcaagtacttaagttgctgatgtttacatcctgtttgttttattatttgttttctgagaagcactttgggttgatagaggccagtggctagggggacatttgtcacagcctcactgtgctgctccatacccttccaaggaccctcttgctctacctcccagatgctcaagcatttcttcactcaaaattatgtttgtgtttcaacttgattttttttaactctaaatttaaaaggaaaatgtacatgcatctaagcaattatctgaaaagataataaagtgaagtcttcattaggtttccaggatgtcttttctttgtatcctcattatgcctaccaattcagtacattatctgttgatcatctctactgaaaccagacagcctctgatgggctcttctgctcacgtgaatcatattaccttaagaagttcctttttccagagacttcggtttgcaagctggacagagagcaaagtggggtgcagccacctctcaaatatccacatgtggttcagcattatccctgacagccttttaatcccaaattgacttaccttgccacccactgcatggcttggcttgtattcaaaagatacgtgcttaaggactgcaagtgaatgtcaaagtcagaataagcaaaacagaattggattaacctactggggtaaaatttcataaaacattacaaaatcaactctaaataacttcaggaagccattgtgggtttttggtttttgtttgttgtttctatagagatggggtcttgctatgttccccgggctgatcttgaattcctggccttaagctatcctccccacctcagcctctcaaagtgctgggaatacaggcttgagccaccacacacacctggcctgcttattgttttgttttttcttatttttttccattgttgaaagacatttcatgaaacttcttttttgttggggtgagtaacagacagctaaccagcactttctgaatatcaacttttcccaggtttctttaaaatgaatgaaagctgtcagagagaggcccggatcaagccaaagggtcaccggctaacctctggagtcccccagaatccatcacaccttatatgggcttgccccacaattcagttcctaagtttttgttttgttggtgttcaattgttccagtttagaagagtgaccattactagcaacaactgttagcaaactgcctgaatgactttctttgacccagatcagactatgtatagccgtatttaacaaagaataataataccaaacattgtcagaaggaaaaaacaaaaaaaaaccctattgattcatcctaaaggtgaaagagacagaacgaaatttagagtacctaaactaaataagcatataaacatatactctcaatgcaacaccagtaaactaagatgcgggtacaagtgaataaaacaatcttcattgccaacacaacgctccaggatagactgctataaagaatctaaacttcttttgcatcctcaggtcaaaggtcatggatgaaccacagtgacaagcaggcttcctgcgccaaagacaatccgtttactcatcatgttgtggggtactagcccccccaactgcttcttggcatacgtctgactcccctccttccccattatactcacccattcaataacttaatgagactgacataaagctgagagcaggtgtgtgcaatatgttgttttcatctccccacttggagttattagcacctcccatcactcaatttggcaggtccattttaatattagcatcacatacaagctgcatccttgagaaaggaggccatttcagacttttctggtgaactattacttagataatagaacatttattttatgtcattataaaattaaactttacctctgggtctttaaaggctaatagttcaaattccctttttgacatgcaagaagataagattttcctgacatgaaaatataaaagggcatttttaaccactgtaacaattctgctaggctgcttagtgcaatggaatattttttcaactatataaaaacatgtacattaacatacttttgaaaactacaccatgtcactcatgtaaggaaaagtttaatgccctcactatactgccatgctacaatagttttacatctcagttatgtacatccaaagtaggattcagaatcattcacaatgtcaatcatatatatggcactgctttagccaatagtatcctccattacacaattacaatctgtttgaagagaaagaaaaacatttgacaaagtggtgcacgaaaaataaggcgaacatatgatataatgctctacttccttttacacaatttcatatattttgagggagtgcaggaatgtattcaaaagaacagattattcatttttggaagttaattacctattattaagttctaagtaccatgggaaatcagtgtgagcgtttgagtagtgcttgcctattgaaaagagaaaccacaccaagatttctttgttaaaggtaaggtaggttcttactaaagccacacacatgggttacttctacataaaccttaactaccagaatagagttgacatgattgaaaagattactataagaagttttctaagtttgctaataaagatggtaaattactaggctgaaatctgtcatttgttaatcaaatttaatagtaatttcttcctgcagacacatgcagaagacaaattatcaatttctgtaaatcataattagttcagaggcagattccaattctcctaaagattagctccgtgtagtttaaattaaaggcactcagttaccacacaaattgtagaaaaccttacccttcactgaggtacttgaaatcttgggttatgaccacttgaaggcttgcggtaataattcaaaatgcttttactttgttatattcaccggtgccaattttcactaagtgcacaggcaagagactgtgtagaggagtatcaaacgcagctcttgtctgctatgttttcccccatgtagatggctttgctgccactgagacgcaaggccctttccaatctttaattttctttaagagtggataagtgccgtgagcaaaactgctcaccactgctcttgaggtgcttatttaaaaagaaataaaacatgattaatttcaagtgctttacaattaaaaatatatgacaggagggtcatctgggcaatttaactacatcgggaagggtcatgggcctctgaagtttgagaaaccgtgagctagactcagtgcatgtatttattgtcactggtagcatattagattattaaaagggacatgctaatgtgacattttactattacaaaggaaactcagtactaaaattagagcataaatcaggcagatatacttccagacatgcaatcaactctgtcttccacttatcttcctttacgcatcaaggggttatattcgatttcattttgtatttatttgttaactatatgtgtcgctcctttctaagttcaatgtgagtaacaaaaattcagccgcatcccagtaaaacagatttaactttaatgcacataaagcaaggtggttaggatgtcagaaaaatatactttaaaaatcaagactaaaatataaacctattagttttgaatatttatccagattacatttcatatgcaagattctcttcaataaagctttcttctttattacaggaaagtatttctatgcataaaatagtaagatttgtctttgaaaagagcatgacaacccaaccaattctgttcctaaaacaatggctagtttgggggcgtaaacagtagacaacataaagtaaatcactgtcaggaaataataattagcatcgtaaaaataacctccactgcctcagctgactaatgcacaatgcctgttcaagcccgtatttcaaatctgaaagtcaccaaatgaaattagcactttcattccgaagccagattctgttggtatttttgcctggaaggaaagggaaaccatttcgtacactctcactaatccaaaatagcaaaaacttgtcatctttgttgcttaaagggaaagctgttcaagggcttgacagacaagaagatcccagttcaattcagcatcattctccttcctgtcctccctatttcactgttctaggtccctccattagagggattaatgactcatattttgttcagagtatacatgtctatggaactgtcggggaggtagttcacaataaaaaggccaaagtcatggctttacaccacatgggccaattagtcttcatttgtttcatagccttaccatctttttctttgtttgttttgttttttgtttttttgagatggagtttcgctcttgtggcccaggctggagtgcagtggcatgatcttggctcactgcaacctccgcctcttgggtttaagcgattctcctgcttcagcctcccgagtagctgggattagaggcatgtgccaccatgactggctaactttgtatttttagtagagatggggtttctccacgttggtcaggctggtctcgaactcccaacttcaggtgatgcacccgcctcagcctcccaaagttctgggattacaggcgtgagccaccgcgcctgaccagccttaccatctttaacattaaagatgtatagcctagccatgccatggcaaatgcatgctattggtcaaaagggtgattcaggaagtatgtgaaaatggttcagtggatattaaagggaaggagggaagaaggcagggaaggggagaggtggaaagccagggagagaggaggtgccctgtagaaatcctaaaagtgctttgcctcactatctgagagcctatgaccattctttttttcttttttttttttttaataaaaaccacaacatatttaggtcatatatatttaaacatcaaataggaatacacaataattaagaaaatggctagctggctaatttattctgagtttgtcccatactaactaaaaaaaaaaattaaatctatataaaacgaaacaatgcttatgaattaaacactgtatttcatgccttaaaagaacttagcgcattagcaattagcattttctttgttttgaattcattgaatttatatcatccttcaacactgtttagctaaagcaaacaaaaacaagaaaatcacattattctttctaagccatataaaagtgatctggaaagtcacgtttaaaatcgctatcatggattagcttaaggcaattatttcacttgccgcattcttttacgagaagttaaaaaaaaaaaaaaaaagtcaagcttcttgcctaacaagaaaaatgaaatcccattagttgtgtttccagtgtatattaacattccttttgtttagaaaggttaatatcccccaaataaaggagcatacagtgcctgttaaaataattacatcatgacattttagaaaggttggcagatagacatggttgcaaaagcaaggaaacaaacaaaaaaaagtaaaagcgagtagtttttaaattatctgtgacttcaaaaaatgaaaaagactggaaattccaccatgtttgcaatttcctgccaccttgtctggtctctggtatttggcttttctccttcttcttcaatatctttctgtcatagaaacttaggaagacgtaccttcatgctctaaatcagatgatctactatctgaaaaggaaacgacaaatctgacaacaaaagaatttcacaacagataggcagttgatagcatgaggcactaacattaaacccaagtctttcaatggccacttggagtcccagggtacagaatttggtgtcacgataaaagaataatttttgtattctagcaagctgatctaagagcccaacatcagtaagactgaaatcagcgagcaatgaagtcttcagattctcccctataagacctagagaaaacacttcaaattgtatgcaaacaaaatacagaactctggccctaatgcttgaggcagagagaagcaattctccagatatgtaaaataaattattaatcttttaaacctctggacacacagaaaacattctcttaatcaaaaataggcacagtagtaatataaaacctaaccagcatgctctttctcattctctagggcataggagcccctctgcagctctggaattggacggcctcttcctgcactgctcccaagaaagtagtgaatgaagtaggcaagacaaagatgaggaggaagaaagacaatggttttcctcaccaccacttaaaccataggaagcttcctcagttaatgacagctcaacctctggacagcaggtcagagaagctaattgaacaagtactttaggagtttattaatattcccaaaagtcatagactgctttacatccgcaattcccaataatgccaataacaaattgtgcagatgtagtgatgaaaacaccactgccttaagagtctaaaaaaagaatccaataaaatcaaattaaaagcccccaagttaccataacaaaatctctgaaactgtataaatctactaaagggaattcagtgcaacatctcacctgacagtttcataacaaaattgtgacggaaagtctgtcccagttctatacaaaagtggagtactgatccctttggcagagggcttgtcagcacggaatgatgattctaagtccccatctgatgcagatatagtgccctgcatttaagaagcaatcctcacgcacttgtgcaagaatgaatgaatgaaccaatgcatggcttacatggaatagtcttctaaaacaatctctaacacatctaaactgatatttttatataactgtcacaggctatgcagagtgctggataaaatagaggaaatattttcttttcccagaagccagctaagagctcatctccaggaaaaatattacaggatgagcaaagtaaattcctttctcttccatattcaaagaatatgtgtttcttagtaaaacaacagagaagacttaggaagaagaagaggaggagcaggagaaggtagaaaaaacacagcattgtacagtgatgggcactgtttttagtatttttgtgtattttacactaattggcttaatcctcaccactgccatatgaaatagatattattattattatccccatcttgcagtcgaggtaagacagaggtaagtttcactcagctagtgcctgtcacagccagatttccaggccaggcagtacagctccatagtattccacggtgtatatgtaccacattttcttcatccaatctgccactgatgggcatttaggctgattccatgtctttgctattgtgaatagtgctgcagtgaacatatgcgtgcatgcgaacttgatttctcttgagataacttttgaattatttccttatctttgtgttctggactgaaaatgctaaaggctttttgagtttgataatttctatttatgtaattctagcaaattaagcttctacaagatgtagagaagtgtttttgttcaagaaaaacggaaatgggtacagacaggatttcttttaactggcatgagtggacacattagagatgtttagggaaatcttctctgtaatgtactggtgatgaatgacccatgttactgtgtttataacagcactgtccaacagaacttcctgtgttgggaatactttacatctgcattgtccaatacagacatcactagccacatgcagcgattgagaattgcaatgtagcaagtgcaactgtggaagtgaagttttaattttacttaattaaatctaaatagcggcatgttgctatttaaacttaagtttaattaattccataacattttgttaaagctttcttttggttcagttaatggaatgcaagactgttatatatgccactctttgaaatcaactcttagcaagctccttctctcatgtcaacttcaatctttagtgcagttggccagaaactagtaagattcccagactgagatagaatacgcagagaagttgaagggtgacttgagttcatgcctcaatccataatccaatccagcttttatcagagctctgacctggaggttcagggagtggtattcagattctcattctgctcctccttgcattgggaaaggagggtggtaagtgggtagacgtgattggtaggatgggatttgagccttcctgagtccctggatatcgtctcatcccaattcctaacaatcaggaactaggagtattcaatttgtaaggattgttaggtatgtgaaaggcatggcacaagataaggctaaaaaactaggctacggccagactgtgaaccgaagcagtgatgggctgtttttgtttgtttaaaatcatgcacaggaaagaaaaaatctagtgtccagcacacagtacaaaattaataaacatttaatctggcagcaatatctctgctgatctggaagcagaagagactaaacaatagggaaaacagttaacaagaatctaatgcagtgaaagaatttcaaaaaattactgaagaaggtgaactgattaaaagatatggggaaactatcatttactaaggacctactatgtgacaatcatgctagtcattattttaattagttctcacgactctataaattaagcatgattattcatgttttcaaattgagtaactaaggcacaaagaatatgtaatgttccgaaggtcacacagttgataagagatcaagtgaatatgcaagcctagatccgtctgcaacagaggacgaagcaacttctttccacccacataaccctgatattcttaagacctggaaataaactggacaaggcagggcaaggaaggagggtcaagaaatggtaggaggttactgagccttgatgacggacccttctactaggacagccaacaactgcttaaagccctgatgggagcattggagacacaaacttcaataggacacagtcctttctttgaagggatttacaggtggcccaataattacaatataaagtgacctaagccctaaacagcaatagggaggtcatgggaaagagccaagtttatgtatatcacatatatctctgaaaactataggactataataactagaggttttcaaataacactgaaattcaagataaccaccttcagagtgattcaagataactgtctccagagtgtttctccatatcattaaaaaaggactctcaacaaattagtaataattaacttaattataagattttatgcattcatttcattcatcccaatacattatagaaagaatttccctaaacatctctaatgtgtccactcatgccagttaaaagaaatcctgcctgtaatcatttcccttcttcttgaacaaaaacactcctctacatcttgtagaagcttaatttgctagaatgagattaatagaaattatcactctaaaagccttcagcattttcaatccagaacacaaagataaggaaatcattcaaaagtcatctcaagagaaatcaagttctcatgcacgcatatgttcactgcagcgttattcacaataatagcaaagacatggaatcaacctaaatacccattaatggctgattggataaagaaaatgtggtatatatacactgtagaatactatgcagctataaaaaagaatggatcatatccttggcaggaacatgaatggagctggaggccattatccttagcaaactaacacaggaacagaaaaaccaaatactaattgttctcactcatcagtaggagcaaagtgatgagaacacatggatgcaacgcaaaaaggagaacaacagacactggggcctacttgagggtagaggctgggaggaggctgaggatcggaaaaaataactattgggtacgaggcttagtacctgggtgatgcaataatatttacaacaaatcactgtggcgtaagtttaaccatattacaaacgtgcatatgtacctctgaccctaaaaaaaaggtataaaaaagagagagagatcaagttataggcaaactacctacaaatcaaaaactaaacagatttagctcaagtttaaattactaacacacacacacacacacacacacacacacaggcacaaattcagaaagcaggctgattttactgaacagttctcttatactttatgcatcgtattactcttttcctgaggtaggttttgtttatttttgttttttgttttttgagacggagtctcgccctgtagcccaggctggagtacaagtggcgtgatcttggctcactgcaacctccgcctcctgggttcaagtgattctcctgcctcagcttcctgagtagctgggattataggcatgtgccaccacgcccagctaatttttgtatttttagtagagacagagtttcaccatattggccaggctggtctcaaactcctgaccttgtgatccacccaccttggcctcccaaagtgctgggattacaggcgtaagctaccgcgcccggctgaggtacactataatataactcacataggataagaagttactagcccattttatgaaattaatattctatattttctaagtatttcccatataattatatgattttatattatatatattatataatacatattatataatataatgaggacagtaaggtcaaataagttgacctaaataacctgcgaatttggaagaaattacaagcaaatataaaaatattaacaattttgatacatctaatgtctccaaaagcaaaactacaggaggaaacgacaagtaccctgcagtaaagcagatgtcacttacgaacatttttcactggccctccagcacctgacacagaccatggcacataaagtgtccttgataaatattttttgaatgagtaaataaataaataggggaatgtcagtgaatgacaggtctaatgaaatcagtggtatattccatatccttataagggattttttttaaatgtggctatacaacatttcaagtatttgtttaaagtagccctttcaacagggaaaacagcagtccatgtaaatcccaatgtgacctctacctaatagtatatgagaaataactactgcttttaagctaaactaaaaaacttttgtcagtgtttgtgtttaatgtactactataaaatatacacacgagacaaactgatgctgtaatggcttttttaagaacacaaaaacaccaattgcctgaagaaatatatatattattttcagacatgtaaccattctttgtattctacaattcttataagatagcattataaccaaaagggaagactaaagtgtattccaactgtgttataacattacaatgcaaacatttttgtaatccctttttggaattttaatactggcttacaaaaatcaactgtcttttagaggaatctaacaaataatacaactgtgaagaaaattgaaatatatgctctcttcatccccctcctggaacaaaatctccaatatgacaatggagaagcaatgtccctcgggcctttcaggaaccccagctagatgtgctggcagaagcccaggctcccccaaaggcattcgctcctgctgtaccccagcctgcttcccattcaggtttctgccagtataaacagagccacgtgtaggaaaacaacgctgctctattaataccgggaaagtaaacagaaggaaaaagattttcccagactttcagcactgggttcattcattcagttttaaatgtttactgaagttcccattgtgttgaaagtgtggggctaggaagtgagtcttatatccttgaaaatttccctgtcacagctttaaaaatctatacaggccataaggagatgccaaagggtccaagcgcagaggttaccaccacagactttcaatcagtcagccttgatttcggtgttgtccacttattagctagtggtctagggcatgttacttaactgttctaagctctgttttcttttctgtaaaatggggataacaaaattgcctttcccaaaaatactgtttgtgacgattcataacataatgtattttgagcacagcacccagcatatggcaagtgctcagtcaataatagctgtctgtgctttagctaaataacacgtctatttacttactcaaaagtattaaactatgtttaatatagtattaaactatattcaaactatgttttaatttaatgagtacttaataggaacctctcacaggttagacattgagaacacagataaaacagaaaaaagtctgtcttttgggagcttacagtccagtacaacagacagacactagataattacttgattataatgtggtaattgccataaaattgcattttattcctaatagcttgattgaggtctaataaatgcataataaagtccacatatatgaagtgtacagtttaatgagttctggcacagctgtacgcagctgcaaaacatcaccacaatcaagagaagaaacatactcatcacttctaaaaattcctggtacccatctgtcatccttcctatagcagcaccatccaccacctctcaagcagtcattgatcctccttctctcactcattgtcatttattttgaatctttaaaataattgtatagaaaaagattcataaagtattgtattagcccattttcacgctgctgataaagacatactggagactgggtaattataaagaaaaaggcctcacgtggctgaggaggccttacaatcatggcggaaggtgaaaggcatgttttacatggcaacagacaagagagaagaacagaacttgtgcagggaaactcctctttattaaaaccatcagatcttgtgagacttattcactatcacgagaacagcacaggatagacctgcccccatgattcaattacctcccaccaaaccaggtccctcccacaacatgtgggaattacgggagctacgattcaagatgagatttgggtgtggacacagccgaaccatatcaattattacactctttttatccggcttatttcacacagcataattattttgagattaatgtatgtcacatcagtaatttcaaaacatattgcacaacaagatcacctaatctagtctactgtacgtagacctgtaccttttccttcaaatatcatctctccacctaaattcatccctgtgaactctaaggagtataagtaaatctaaagttagccacttttctaagagtttcctttgcaaatgcaacatgcaaaatactatttcccttatcattcactgcttcgcccaccgagtatttcataccaactactatttctattgtcagaacataaagataaatgttttgtgcttcccatatcaagcaaacaaaaccaagatgaggagtgagttttcaatcaaccctcaaagaagactctcaggatagatttgtatacatacatgcattaccatcttgttaatatactacaaaatgaaggcacatctgtgtggcttttcataagatggtagaaatttttgagaaactgttccatacaggttctaggatctaaaatgttgttatgaagactgacagttttccagctgagtggccaagtatatcactcaaaggcatgagcttctgatggagaatccacgtagagggaaaggacaactattccctttagcagattattaagtaatttggggatataaaaattaaattaaaatttctctttcattttaatatgaaatttcttgtaattctcactagtacaatgtattaagatgagatgatattgctcgagaaccaagtataatagttggtatatagtagataccccaataaagcatagccatgtcagtaacaaccttgatagaagaccagcccaaggcaaagacatgacacagtcatattagaaacttccttagagaaatgggtcccaccgtgattacagtgactcctacatttttaattggtcattcaacaaaattgaatatgtcttatattcagcaccaagctagtgtgccaacaaatatttactgagtgtctactatatgcctggcaccaaagaaagcttttttttaaggatgaatcagataaaacgctcctgactcaatctttgttgaatgttttaaatttatttagtttaaatgtaagagaatggcacatgcaaacactgacatatttgctttgtactgttccaaatacagtttctctcctagtagggttaagtttgagacctacgaaaataataaggcatgtgctaaatcatgacattacacaagcttcacccagtgttcctcagttatcctcacaattgccttgatatttcaatttctaggtatccttcattcaatcacatgttgagagccttgaataaaaaccacaacaatggttatatccattcattgttcacctactatgtgccaggccctgccagcttaaattctggccaagagcattaatcatgtagaggagaggataaagaagcctctctttggaaataaaataatatacctgctactttgacatttgtataagtcacaaatccaaaagctgacactgatactgtatttgttattgaagacacttaagagcagtgaggtacagtaagtataactataatacaactgagccatctaaaaacaacttgcacttttgctgactttgttggctgcatcctaaccaaaaacgtacagtgaaattaaattatattgctgataagagttttatgttcctcggcatagatgaaacggtgcatttgccaaaacctgctaacactgcttacatgattattaatgataacagggcctgtacatgaacagcatcaaatgggttacttgagacagtgatggagaaaactatatacacacatattccagatgaaatcctagaattaaatgctgacaccaaaaaggcatgcaggttaagcgactacggcagatgaaaatatatcaaagccagatacatttcctgttgaaatttccttacattccatgactaaatcctaatggccacaagcagcattgcaatctctgattgtgctgatgcacagaaaggaaactgtacttgtgtggtcgtgctgtcagcagaacccctagacagaacatagttgcagtcttaaggcaaaataaaagtgtctggaaggcaattcacacgttttcacaggagtgccaactgtgaccttgagccccttctaaaggttcctctgccttaaaaatcttactaggttcctaaaacctactcataaaatacagcaagaattttattttatgttttttaagattttaactgaacactaggataaaactgtcttgatacagttgtagtcctcacggcaatcactatttactgactacataggtactaggcattcagagtattcaaactatgttttaaactatcatttacattttgattaagaacccccaaaacattctataatgtctatatgtaattaataatgccctacttcttgatctcaaattctgcaagagcagggtggggaaagaggttgctaaagaaatggaaaataaaaaagtaccctgaagcaaaacaaccactcagacaacatacaacattgaatcaccgtcaatatctagtgcttgtctgtgaaatctcattagcaaatcatcctttataaactagagctactgacaggattcaggacattcagagctgggtacctggcaattctcttaccagaaagaagtcagtaggattataatgaagtagtatcagagttgcagttaatctatagcccataaaggaaatcagaatgtataactcagattctacctatgactatccagctctcacttgaaacattttaagagtcccacagtagatccagcactgtgactgctggataaaattgagtgacttgtattttgttgaaggtgaccctgaatggtgtatacaagccagtatttatgactgcttatgattcttcaccatattttgcatgtgactgagaagaaagcaattctaagagccaaatttatttcgaggaaaatgcctattatgtcttcagattgtgcatatgtctgtctaggcatatgcacacccacaatacacccgtgcatgccaaaaacactgccccaaatcacacacccaaaccttattattattatttttttttttgagacagggtcttactctgtaccctaggctggagtgcagtggcacaatcatgccttattgcagcctcgacctcctgggcacaagtaatcctcctaactcacctgcccaagtagctgggacatgggtgtgcaccaccacacccgagtttttgttttgttttgttttgttttgttttggtagagttgaagtctctctctgttgcccatgctgatctcaaacttctgggctcaagtgatgcccccacctcggcctctcaaagtgctgggattacaggcgagagccacagcacccaggccctaaaccttatttttccatattctgaataatcttaaactctgttgactgagtttgggtaaaggtagtttgtttcatttaaatactggagaaatattattcagaaacaagtcctaacagtggcttgtaataaacttttcactgaggttaatgatgcctacatctacagaatattgatgaggcagaattgcctaagaagcacttagtataaaataaaataaaaccaagtaccaaaacatagtcaatttcctttgccctatcttataccactgagagttaaccagattggccatttggaatgttgattctcaaaaaaatgtaccttgatatcagaaaactgacagtttgtattttactttttaaacccaacaaggcatcctgttttctgtcttatcttcaagagaaaaggcagctaagtacaatttctacaggcctcaagagcactgcgacctagtcaacaaaaatagttttaattaacagataagtttgcagtttagttggtaagaaatttacttaaaactgttttagggaaaagcctggagaataatagtataaacagattattagagaggttttttttagtatctctattatacagtcttccatatcgaggcagatcttggcagagacagatggcctaagcctctatttaacaatggatgattaaaagcaaaggaaaaaaaaggcaagatactatttaatccttcttcacaaacaaacatcaataaagcaatgaggttattgagtatttttatacttataaccccaaaggaagtactcctcactaattaaatgtatactggtaccatcattacttttacaaatccaatgtagatattaattctattataagtctacctagaaaatgtgttcagttgattcttcattcaatagtcaagctcctactaggtgctaggtgacagaaatatagagcaaagctgttgttatctgctaaggagactgaacttcatgtttatctcattcaccaatttcaagtccctaccaacaaaaaaaatcacagattcacccaatccagatcaatcttccattaagaatcaatcttataagccaagcggctgaggctctttagcctcttgtcactatactcaaagttcctttggccccactgagtgaacctggcacctgttccatgatcagcaggacgtggcatagctagtgccaaaataccgcaagcattcaagcaccagtgaccttaaatcgaggtcattattaccatctcctaccgtttttctgacagttggctgctgttctctgaatgtcagaatcctctaaattctactgcatcattcaacttgtggaccaaggttgattaggggtgctccaggtaacgtcttttcaatattaaagaaaatagttccctctcttcttgtaagaaatgggttaaggattcagaaactctggacagtgatcgatttgtttgtttgcccactccattttaggctaattttccattttaagcagcaatctggatgactaagttaagaataatagaaagaataagatgaatgcatacaaaagcacaattgagaaggcttaagataaacagaaatttgtttcctttgattcaaggtccactgatcattgcatcagttcaactaggaagtctgaagaatgccttcattcactaatgggaaaaggtaagattcttggactattttagtgctttattggggcctgaatcaaatgaccttgggattgtgtgttcttataattttaaatacagtcatgcaccacataacaactttcggtcaacaatgtacagcttatacaacagtgatcccgtaagattataataccatatttttgctggacattttctgtttagatatgtttagatcacaaataccactgtgttacaattgcttactatattcattacagtaacatgctgtacaggtctgtagcctaggagcaataagctgtagcatatagcctaggcgtgtcataggctacaccatttaggtttgattaaatccactctatgatccacaaaaaaaaaaaatctacatttttgcattatgatgacattgcctaacaacgcatttctcagaacatacctccatcgtgaagcaacacatgactgtatatctgtgatctttctcagtgaaatttcagatatgttcattcttattctgtctggcaatgagtgtgtctcagtttcaaaacctacagttcttaaattatatgcttctataaacctcttttctaaggccaagttatttcaaatgtgttcctaacatttacatttatgcccatccttaagtctcctttatacttgaaaccctcccaattaacattctctcctatccattttccactcttttaattttcctttttaagtaatcacttgcttaaatcaattccttccatgtattcccaatggaaacacctggacttggtcttgtagaagcacacatctatcatggccataaatgtcaccatttaaaaagtcttcatgcattttctatagtgggggaaaatataaagcactaggaagaaaaaaaaaagcctttttgtttaacttgtttagcagggaccacatccactctggtcatattatacttgtgacatagcatattggtatctatgatacttcttgaatcctgtcactgtcagtcagtagtaacacttaagtcgttgacagtttcacctctgcaattttatttcacatttggcacattatcactctctactgttgaaaaattttaaacagcttcacaaagcaatcaattaatataccacatacataatatatgtacaaagtagtaaaacgaacaattcagaacttattaatgttggcgtgtacctcatttaataacagttttgttagtatttacttagctatatctggcttttcatttgataaagagaaaacaatattaaatattatattctttatccattttcacctgtagctatttgtagatgtttatggaaaaacgtgacaggcttaatgaagcgatgatgatgtccattccctctgtagaacatgccctgatgtgaagggcattctgcagagtcatcctggtggacttctctaatgtacccaggcatggctagccccaccagctgagtcacacattcacaagtgtactgggtttggtcccaagcctctttactccaactgtatgaattaaatagtatgtgaacagattattccatataaatccatgaaatacgaggtaaacagaaagtgattcattgtttctatcaaaattaagcagaatgtttgaatggccttcatcaaaatgagtcattaaaaaatactaaagctgatgtaggttagataactaagaagttttggggaaatttagtaaaaatctaggaggattctgcatttagattggttcccaatatctttaaattaccatgccaatttagagagacagagattgaaaatcataaagattagcattgtgggtattgtttatacaagaaagatgtcagggaatttcaactaggccttgacctaatatcaaatattggcaaataaaaaaacaaaaatatatatatacagatttaatattaacatgaaaagtagaaggtatgtatttataatttgttatgactttttttgattaaccaactactagcatcaatcaaaccagacaggaagacttctacagtaactttttaattacctcatatattagctaagatgttctgagcgcggcaaaaaataaaaaaaaaattctttgtttaaaccccaaatatataaacattttcaaaaaatcaaacaaaaaagctgaaaggcccacattgctaatcttgcttaaactaagaatcaatttttaggataagaccatttagaaattcaggatcattaacatgggaagattttacccaagtgtcccacacggtcacaattaacactggggcagctgtctactgattgattgggcatttgtgggaacacagaataggttttatgtatgagggccattgccataaactgccaagattaatctgcccactgtgtggtaatattttcattcagattaagactcctttttgccaggacacatttatttctgtcactcgggtcacatgttatcatccagccttgcacagatagcactggcattttctatactctgctctgaccatataatgcacgcacatttggaatcatcagaagcaaacatcacatttctccgcagcacaaaaacaggtgaacaaaaagacttgctaagcaaattgcctgtctcagtgcctccttgataggaaaagtcaggaacctacttaaatatttatttttaattcctctggctaagattctgacatgcaaaaatacaaaatgcatagctttttagtgtcaagtgatgtccaaagcaacaggcagtgcattttacacacaggtcatctgtacaggattttgtaaggttgtaaagaggcttagtctactagtacctgggagttcatatcccctcggagatcctgaaatgtctctttgtatatgcagagagttgctaattttttcctttcttccactcatcacacaacatgcaaagaaatacgtcattttgtttccaaatctgtgtgatgtaaaaaatggcactagagaaaggaagagaaatagcatcccaaggatacacttgtgttcaaatttcttagaacatgcatttcctccaaataaggcaatttacaaaaacaaaaccaaaaactttcttaagatgtcaaatgaggagtaacacagaggaaactggaaatatatgacttgagttactcaaagtcagagtaagtcaacaccaaaaaaaaagaaacaaaaaaggcctaaattacctttacccttaaagtcatctttctacattatttcactaggaattaatgtgaaatagtctgaaaagtgctgagcatatttaaacaattttatgtgtggtcaatgcttcctttgagtgtcctaacatcttgtcagttggaatttaaaatatttcagactttgggataggccatgcaatgttacccagatatgctgaacaaaacaaaagtcttaataacttatgtaaagccaggcacaatggccatgtgccagtggttccgctactccagaggctgaggcaggaggatagcatgagccccggagttcgaggctgcagtgagctatgattgcgcctgtgaatagccaccgcacttcagtctgggcctcatagcaaggccccatctctaaaaataatcatcatatatgtaagaatttccaagacttctcttttgtatgatatcctgaacgttgttagagattaaaaaacaaacaaggtgtgctggctagacaacctattttctctgagaaaggtatccaatgcccacatggaattagtttttgtacaaagaagtttctttccatttgcttaacctacaaaggatgaacctatacatcaaatcaagtgttctctttaacatgtgctttttaagtgttcatttacattttctttttattctaattattaaaataatgcatattatagaaaatgaaacagaaaataataaaggagtaacgagaacacgaatcccactgcccagtcaaccactgttagcattttgttgcatttcttccacgtttttcttttctgtatacttttagcatacttatatgcatataaattttatatattttaacatgattttaagaaattattcagtagtcttctgatttcactttctgtagtttaataaattttaatcaattctctggaaatgcttagaatttcttagaaaaaaaaacagtaaggttatctccagaagtagatactttatatatccaaattcaaatttaagtgaatcctgaatataagatgatctctcattttccatatgagatgatttcctcaaaaaataagtttttttaacaacttgtttacattaacttttaagactgagattgaaatggttaaatgtctaggtatagtatttccttcatttagttgtaggcacattcaaaatcacatggcatattatagaacatatttaatttagaaaagctccttgttttctttcctctcacatttcattaaaaactccccaggcacaaaaatgtctttattatcactagagtctttttttttttttttttttttttttttttactttccggaggaaatggtcttcccttccagattgtttgggggatagccgtttttaaaattcaggtgtggcacggttaccacaagtaccaatttgctaaatagcaggacagtttgtcatagatcctgcaggggttgtgatctccatagcaatgacacttgtggtgttgctttatctgttcttaaaaagggttgtttacaataatgcccaacacttgtcgttgtgaggtcatgaccaaattactaaatttgtgttaaatctttcttctttataaatctgattttaccagtaacttcttcaagcatcataagcaaacattcatgaaagccattttgatgttcaaaataaagtactgtaattgaaagattagtcagtaacatgagagcctttgtaagaacctgaatatatgtaatgacttcttttttgaatgataatgttctgtgaagaaaatcctaatattaggggcacatacagtaacaagaacacctgaatagcccataataattttccttgtagcatatttttgttttcctatccatctttgggttaacatgactctgagactaaaaacactactacaacaaccatattttgtgggtaaataaatctgaataataactcctagtacagtactgtccaacagaagtttctgcagtgtcaggaatgtcctatatctatgctgtccaacatgatagccactagccacaaatagctattgagcacttgtaatgtgtcttgtactactaaggaactgaatttttaattaactttaaattgaaatagtcaaggtgactaatggctacccaatttagtagtgcagttctagaggggaagaggtcctcttagtccttatagctccccagtgcctagcagagtgaaaaaaaatctaaaaaaaaaaaaaaaaaaaaaaaaaaaattaggtaagcaataacactttgttagatgaatcctaaaaacggaagcctctttccctttataaaggcatcagggaatcattgtaagtagcagattgtcctaggtacaggaaaactaaaatgcccctaatagcccaatctcactgcaaacatgccactaaaagaaagctaatttccacagcaccttctttgcctatatctccaagggcaccttcatatatttcttatggcaccttctttgaaacctttgggcaaatgtgagaaacattaagaaagctgtaatttttaaactctcctaggattctatgggagtggttaatcggttgttcagagcaagtaatatgaactgggcatgtaagattttataatcctatttgccttaagaagcctggcagagagtattgtttaacttaacaaaacatagtcacagttttatttttcaattaaattttaaagccgggaagaaaaatatctctcagatgtttagagaaagaatagctaacaagttacaaagtaaattaaaatataaaagtataatcccacataaaattctgaacaaatttaagggcatattggcatcctggaatctctgtaacaaaataagtagatttgcaatcacctaatattaacaacagaaataaaattcaaccacctcactcacatgaaatttctcaattctttaatatctttacaggtttcacgggtccacagctttggttaggcagaaaaaacagcactgtgtctgatcaggcttctgactctaatattaacagaagggagaggcaacagcaaaaattgagctacaatacacaattctgaaatgctgccacggaaaaaagacttagcactttttcctaccatttccattttctttgcaacaaatctgtcctttaagactaagatgttaagatatgacttatccttgctgaagccatctccttataaatgcagatctcccaacaggcttcatagccctgatctctccttcaagttgctcctgattcaagctgataattttgctctctttaatccagtgaaactaaataagttcttgacacttcaaaaagaattacgggaacaaaaattctctctccagacaagtacaggtaaggttctaatctattgatgggtaaagtgttccttatattaccacagagatgcctagaggggtaagaaagagatcagagcagatgtatggctctggtccttaaccacaaactacacaagttataaggagaaagcttcaggttcacagaacactataacttgtggctgctgatatacaccaaatgtttgtatccgcccaaaattcatgttgaagtcctaagccctgacgagggggtatttggagtcagtccctttgcaggaaattggggttagacaaggttataagggtgaggccctcatgatggcattagtgcccttaaaaaaagagccatcagagagcttgctgtgtcttcccccatcacatgttcatgtccaaagaagaggtcatgcaaacacacagagagatgctggctgtctataagccaagagaagagtctcagaatcaaaccaatctttccaatgccttgatcttggaagttccagcctccagactttgagaaatacatttccgttgtttaagccacccacactatggtatcttaatatggcagcccaagcagactaatacagctacactatctgtacagaggaatacaacctggattttatagttatccaccctgatccctatatattgacctctgaaggaagtcagaggcacccacagtgaatacctaatgttactgcaactcagctattaaagaattcagcattaactaccgacaacttaacctacatttaaaactaacgaagacttccatttctcaccaaaatgaagttaacagggacaagatttactgtcctgcctgaacaataacaattataaaaaaggagatggggtgcaaaataaaagcagcaacacttcatcagcaacagacccatatttcaagcaaagctaaaggaagttatcaggcagagggaaaataatagaaatataggttgacagggaggaaaaaagtgcaccaaaaaatgcactttatatatagtaaatatgtaagacttttttgttatttaaaagatattttaaattatttttaatttttaaaagataaattgaataaacaataataatgtattgtggggtttatagcatatgcataaaagtaaaatgtttgacaaaagtaacagaaaggctgagagaggaaaatagaaacatacagtcatgaggttcttagactacaaataaagtggtataacatcatttgcaagactttgataagttacagatatatacaataagctctacaacaaccactaaaacaaagaattacagctaataaaccaacagaggagataaactggaataataaacaatactcaacacaaaataagacagaaaaagaagaaaaggagaacaaagagcagatgagacaaataaaaagaaatagtaagataatttaaaaattaatcatgggagtaagaacattaaaagtaaatgatctaaacacgcaattaaaaggcagagcttgtcagactggattttttttttttttttttgagacagagtcttgctctgttgcccaggctggagtgcaatggtgcgatctgggctcactgcaagctctgcctcccgagttcacgtcattctcctgcctcagcctcctgagtagctgggtctacaggcacctgccaccacgcccagctaatggattttttttttaagtagacccaactacatacttataataagaaaatcactttaaacataaagactaataggttaaaagtaaaataatgaaaaaagatacattgcatcaacactaaaacctagtgtaaatgcttcacttaagcatatatcttgtaccttttcatctgatatcatcatacctaaaaccttggcaatgagttcatgtgataatggttaagaagagtaagaaaaatgctcatttgaagtttacttttatatcttttacaaaattagcagtgaaggtataattcattgttacagatatcccctagtaagatcatataatatattcttcacagaattcaatgccaaaaaaagtctgtactccatgcaaattcatgtgctttctttaatcagataagtattctatgagccaaagttttccctttatgtcttggctaacaaacagaaagctcaaagccagactaaattaacagaattctcacttccttcttctaatcatttttgacctttcctaaaattatttttcttatattgtacttttggaagcaactttgaattctttctttttaagagtgtgctttataacagaaaaaaataccaggaatcagactgagcagttgctcccccacttataagatgtgtgatctaaatcacagaggtcaaataattgacctgaagttccattttgcatcataaattgagaatttctttgcctccctctcaagaacattgataaaaatgtgaaagtttgcaaatttaacataaaacaaagctaatattaaatgaatgtaaaagattatcaaaattaatgtggttaaatttttaaccaaagtctgatcttatggtgtagtcatttccaggctaattaacttctttttcacctattatcaatacaaatcaattagaagctaaatgttcagatatagatctatagtctactctaagagagagaagtgataaaatgaccagccagagtcaaattttagaactctgaatgcagaaacaagaacaaggaaaacactggaactctcaggtgagcatggatgaaagaaggcataacctaaaccaggcctggatctgcagaagtattcaagatgggccccaaaggcttgtgaattcaggtatgcacctgttactcctttgattgtcaattaacatttctgcctaagaggaaagaaaaggaacaagggtacaaggacataaattgctctgatattttatcaaatgcagagttgcctttaagcaaatctactccagtaccaggcattctgctcaaagcaatgagggaggattctctctctggccttgggcagagccttagttgtgaggttcacctgtattttagcatttcaagcggtcaaagataactgcagcctggctttcacagaagtgaaataactcaactttactgtcagatgcacagaccaatgagttaaacaagaaaagaattcagattgtacacaggtggctcatcaagaatatggtcaaccttggccaggcgcactggctcatgcctgtaatcccagcactttgggaggctgaggcaggtgaattacttgaggtcaggagctctagaccagcctggccaacatggcaaaacaccatctcttccaaaaataaaaaaagtagcagggtgtggtggtgcacgcctgtagtctcagctgctccggtggctgaggcgtgagaattgcatgaacctgggaggtggaggttgcagtgacccagatcatgccactgcagtccagcctgggtgacagagcaagactctgtctcaaaaaaaaaaaaaaaaaaaaaaaaagaagaagaagaagaagaaagaatgtggacaatcaacaaagaaaagggggattctaagaagaaaatgggaggttccatttaagtatctataacataaaatagttcgtaaaaaatagatcagtggttctcatccttgggtgagtatcagaatcacctgtggaaattgttaaaaatgcagatgccaagctttacctcccagaaactactgtgcgtatgatgtatcccagtttaagaatctccaatgctggtgtcaggatttttcacatgcatgaatgaaaacacaaatacatgattttaagtgaaagctacgtagtcttgaatttgaattggaagagtcaaaatggagtccttatacattttatctttaagacaacaacaatacattgcctagttctgtacactaaaaagatctaaaaacagtgacctatccagtaggaataagcacatcccagggaccagagtatagtttctaattttccactaaaagaaatgagcttctaggagaaatagctgattccaggtttgaggcaagaacaaaacaaaacaaaaaaccttctaagatgagcctggaatatcttatcgcaaccagaaaaggatattagcaaagattctggggtcataataaaagagtcttccactagccaaaagcaggataatttgagcatcagtaagaataataattgaatggattgaagcatgtttaaccctataaattcaaaataatactaaagcaaaacaaaactttcataaatacctttgaagggtgctgagaaccaactaattattttgaaaatcagtaaataaaggtaaagaatcagtcatttgtctggccattctatgtatattgcacttaagttaaatgataaggggaagtttctctttatgaaggaatggcagaataagatcctcaccattttgcagccctcactgaaagaataaatctacgcagtgatcttcaaatggttactgacatcacatgcatacaaaaaggtacagacattatatacctacctatgaagtattcttaccctttataccctcccataccccaaaaaagaaaagtaagactgaatctcatagacttatttgactaataagaaataaaaaaatttttaaaaaacatgttaaacaacatcaggaagacataataagcaaaatcagactgtgggcaattatgggacaagcagtccagtttcttaaacttcgagggagaaaaaagggatgaagaagctataggctaagaaaaacttggcgtgctaatcaagtagttatactcacggacttcatttgactcttgactcaacaaataaaaaggtttttttcaaagtaataataatataaggcaattacagaattttaatactgcctggatattgttggtacaaaagtatttaggtaagaaaatattattgtggttatctttttaaaaaagaatccctgtcttttagagatacatactgaaatcttgatggaaagatagtacaatgtctataattttctttaaaatgatccatggttgggggagtgggtgagattacaggtgaaataatattggtcatgagttaataactgttgaagttgagtgataagaacatgatattcaatacactatgccctctgcttttgtgtgtttgacattttcaacaataagaagtttttaaaatgtcaaaagcaaaagcaaacaaaaaaatgtagaactatggcattatagttcaaatcctggttatcactggggaggaaggaagcgcagtaattttgagaggccatgaggaagccttctggggtgctgctggcaaagttcttgacctcggtaatggttactcgggtgttcattttgcgacaatttactgagctgcacatttacactatgtgtacctccctggtgttatacttcaactaaaaaatagttaagagtagactactattcagcaatatgaacacagagatgtatttgatacgatgacaatatttaatactttgtgatgtataatacttacatagtgtttaagaaaggtatggacattaaccaaatggaataaaacaatgtgttgttaaagttgtagtctctaattatattggaaccaatcctgaaacatagacccatgacagaatcaagatatattgcacgtagggagtatgctaataataataataataataggaaatacttatgaaatatctatcatatgccacttgagttaaaaggtggttataatttctcttaacaagtctctcgaataagctataaatactcaacttacaatattaaattcatatttgctggtatgctgtccagcatatatttattggtatattgcatagcacaaacatgaaataacaattctttctatttaataattaaaggtggttataattattaaataataaataaattagaagtttgctatactttatctttccagatagcaaacttgtaatttattttgaaaaaacaaaagtgagaagccatgttgcttggtggtcactaataatatctttggtgtcagtcaagatttgaatcctggttcatctacaagctataagacagtaagcaagtacttaatctttttgtgcttcagttttcaaatttgtaaatggggaaatagtgctataagctctggctaccatgaggattaaatgagatacaactcttagcataatgcctggcaaacaatacctgcacattaatgttaattactatatatttattactgttataacataaaaggatatccacctgcaatatctcccttggtagcatttcaagatattcttctaaaagaaatatgatgagaaaattttttaagattagaggatgtttctacatagtttctacaaaaaatgaaaatttcaaatacagggagaagacaaaagagaggtatggcatagtgcaaacagagggctaagaatttagaaagccaagatacaaaaaaagctaaaatcaaaacataattgctaaatggtttcaagatgaaaaaataaaactgcttctaaagacttgaaagtttacatatcaaagcaggtttagaagaaattattcaatagtcataaaccactgattgagagaatcgtgtcacgtggtataaaaacccgtgggaaacctacctgaaccagagagccatgaaaagtacatgaagctcttgtctgaagcaggtaccacttacctgagtacaaagaaatagtgccagccaccggggattctgtcaagtaattccacaggacactggtggtcttggtgtctctctgagtctccatagcttctcagagcccacaggacttttaaggtacttaaatatgtggtatattttgacaacagcatgttttataagtcatttgtcatcagcaaactttagacaaggttaatgaaagttctgtcactttaatgtctagccggctttaaattacaaatgtcatgcgccatgactaaagaaagggcactgcaataataccataaaccatcatctccagggacatacaggtaattgcatagctcattaaaaaactgttttaattattaattgaccgtgtcagagttgtcctttgaagtcaattttaatttttttttccttgcaagcatgatgatttcaagctgacctacagaactttgtgcatcacctacaacattggcaagggtggctgagaagaaagctctccaatacttgaaattattttcaagtcacttgcaaataatctgcttactgggaggaaggaaacagcagaacgcttctgagaggtctggtgtgttccaatcacctatagagagaaaccacaggactaaaaataaatgaataaataaaaatgcccaggagttacagcaagtatgcatctttttgttaaattttctttcatgatgacacaaaacaaggactaaaaatgtttgcaagaaaccacaaggtgatctaatcagaacttagctaaaattacaaatctgacaatgaataaaattccctacttaataaataattctagaaataagctgataataatcgccaaagctcagtagtcattcaaaatgggcaacagtaataattcatatacctaggcctatctttaagttccattattcaagaaggaaactagtattctcactttatttttttctgaatgaatctagaaaatactttatagataagaatatgtccactcttgcaaaagataccagtggcaagcttcagtgtgaaagagacaagtatccatgtgtcagatgacagagttgccactgatttattagcaaattgaacttttgctttaagagaaaaaaacttctcaaaatctgtatctgataaattaacccagtccttcatgaacaccatttcaaaaagacactgccaaccttaagtttgaatgattcattgtactgtaaatatttgaggtgaatatgtctggtagcaagtgtctgaaacaagaaccctcttgcaacacaaccgaaaaatcaacggacaatgtatgagacagttagggtgcagtaatgaagctgacctcagactatttccatcaatacaaacactgacagcaagtttgttcaccaagttttcagggccaacaacttacaattcaaacctgggatcaatttatggactctgctattgttaatgaccacgcagggagagtaataccagaaaactgacagcatcctcaggactaacagatcatctcccagaatgtgaaaatgagataagtcaattccgccaccttgtctgcaccttgagaattaaacagcaactaccaactgatatcagaaattactctcattggaggttgaacacctgattctcctttgccacatcaagcagagactgtcagataagagaatgacaggaaaattcattccatccacatttcctgcactatggaaaactgcacggatacagagcaaaccatcaaagaagtataagtcaataagtacataaatatataaataagaaaactaaaatacagtaagaaaggaaactacagaataggggtcagcaaactaaggcctgtgatccaaatccagctcaccatgtgcttttgtagagcctggaagctaggaatagtatttgtcaatggttgaaaaaattcttaagaatatatcacaacacccgaaaaacacataaaattcaaattgcagtgtccataaataaagttttattggaacatagccatgctcattcgtttacatattgtctacagcagctttcacactacaacagcagagctgagtagttgtgaaagagaccgtatggcccacaaagcctaacatatttactaccttgccctctacagaaaaagtttgccaatctttgctatagtagaatgagacctaaattcctaacctttgatggcacattacgtgagctagccccatcttcaccccttcaagcaatcctgatatttagtaatttaaagaggttcccaaaagaggagatttcacaataaatgataaatgtctctagctagatgatgtagcatgagtgcttacaaactgattatcaagttttgtctctggtatacacatataagtgcaatgcaatgtataatattctaattaaattaaagaatggctgcacaagccatgtttctattagccaggtcttatttgatttagcagcagtaatgaatgctgaatcaggttagggttgctaagattatctggctttgccaatctactaaaattaggataataaaactaaagatatgtaatactgaagacatttaaaaagaaaactcgtttatcttcaattaaaatatccacaatactgacaataaacttactactcttccctatagaaaggttgggttgaggaaaacagcacattaaaaagaaattcagtccagcatggggacaatggagttacattttagaagaccaaatgtagtctgattttcttgtgataccaacatttcccacatttgtgtaaaaaagcaacagggaaaataaagaagctcacaatattcactgactgacaaagtactgcactagattttttgactccaataaagctaagccccttacattgaacagggaaggggtggtgattgtgtttcttgatataagcaaaaccctgtgttatgaagacatgttaaattatttacttgtttgagccactgggaggaactacgtggtcatgcttctgctcaacttcactttttgatagtaaaaatgagattatgactcatttcattctgcagattttatgagtttattgacacaaacacagaaaaacaaaaactccctacagaaactatatcagtcatcttggtatgttataaaatacagtatctttaatactatttgttttaggcaccaattaattttatgaggtaatagtaaaactgcaggctcttcctccccctacagtatagactatataataaaaatcaacacatataggtcagatcaatggggtgaaataaactatttgaagtcagttctgaagacgtactagttccggtccttaaaagacattgtattcctagggtttacagccccttcgcgtttaaaaccagagcatccagatgctacactcagaaaggaagaaatacagttcctctatttccttatttccataatttcaaagatgtaaagtgaatttggaatataagtcaaacaggaaaccaagaaaaatacaatcgggggaagaaagaattataaaatggtcagttggcagccgaagagaagttacacaaaactgcacttacactagctctgatttttgaactcaagcaattctcagccctcgcatgccagtcctgattattctcttaaaagtgctactgtgtgccatcttcaaaatattaaaccatccatcagtgtacgtgatcccattaaaccatctctgggtacgctatccagctgaatgaaaatgaaaccctaatgattatctgagatggaaaccaagtgatttaaggggaaatagaaaatgttttctgaatttatcaaaaggcaaacaatatttttacaactttttctattctctaccaccaaaataaataaattaattaagcaaacattaggctcccttgcaacttttaaatactaggatattagcattaaaagactatggctgtcgaggccctctttcattttttagtaatagctaaagaggagacagtgagaacaccataattagaggtaatcaagcaatagctagatgatcatacgtgtatgctgaaaatggaactcaggcactcattttggatgagaatcaaatcatctccaggtttcatctctgaagtataacatgatttaggctacataaaatgaaaaacaactacagagagagaagctacctctaacttaaataagaagcttaatatttgtctaaactcttaattagcaatactttttaaaaatccaaaacaaacatattcctcttagtagtgctaagaggttccctttcatacaaaccttaaaaataaggtggtaacaggccaggcaaggtggctcatgcctgaatcccacttcgggattctgaggcaggtggatcacaaggtcaggagttcgagaccagcctggccaaggtggtgaaaccccatctctactaaaaatacaaaaaaattagctgggcatagtggcagccacctgtaatcccagctagggaggctgaggcaggagaatcacttgaacctcgggggtggaggttgcagtgagccgagatggcgccactgcactgtagcctgggcaacagagtgagactccatctcaaaaaaaaaaaaaaagaaggtggtaacaacaactttcaagactgtgcaaaatgcaattccagaacaagatgacaaactgtaaataccattcagggtcaactctattctaactacagaggaataacaacaggaaagcagacagtaatgcacaaggttaacccactaatcactgagagtccacaacatgtagcaaaaacagtacaagctttgaaatcagataaacctaggttcatagctcagctctaatttttactgaactatttgaccttgggaaagtcactaagccttagtgagcctcactttccttatgtataaaatggagacatctttctcattcggttgttatagggattaaaagagaaaccatatgtaaactattgaaaacaatacctgacacacgaagtacattaatcttattccctcccctccacaattaaacaaatagtgactacatgtgagaatgtgcaaggctatgctagggcaccattcctcaagtgtgatgcatgagatgacttttaagtggtatacaaataaaaatctataagttctaataataggattttttttttgagacagaagtctcgctctgacacccatgtttgagtgcagtggcccgatctcggctcactgcaacctctgcctcccgggttcaagccatctcctgcctcagcctcccaagttgctaggaccacaggtgcccgccaccacaccgggctagtttttgtatttttagtagagacagggtttcaccatggtggccaggctggtctcaaactcctgacctcaagtgatccacccgcctcggcctcccaaagtgctgggattacaggcgtgagccaccgtgtgtggcaataattaggattttaatgtaaatattaatatgtattaaaagaagatacagcccaacaaacctgtaatttcatggctaatactgatttgcatgaggttgggtaaaaaggtaaaccaatttaaagagaaatattatgtaaataataatactgttaatataaagatccggggtaagtcacacaagaaaaaaaaatacattctaggaatataaaatgcacacgagaggtttcctgtcctcaaaaagcttacagcttaagggctgtgcagatcaagaatgagcaaacaaatgaaataccccaagtaagagttcagaaacatgtatgttatattcaagaagaacagtgctaaaagtccctctcttcttggctcttttaacatgtatcacatataaaagctctttaaaaataaatgagtttaacaattgtcatgctgagttgtaacataagctgatttgcaagtccttgtatagtggcatgttagagattttatgttaaatcttctctttgaattatccaggaaatcattattttctcacctttatttcctttataggaaactaagaaaacaaaggtttctgctggtttaacagccaaatcactcaagacacttggagcaaaacaaggaacaatctacttaaaactgtaagatccaggaacgctaaatagttttagacttcagcaagtatcatccttagagatggtacacgtgacaagaataagctgaatttgcatttgaaaatagagtgaaacaaaccaagtctccctttaaagggaaatgggtagcaaaatagggaagaaaaagaaaaggactttacatgtattcccaaggaaaatcacagactccttaaaagctctcacaataggctagcccttcttaaaactctgacatatcttaaaacaaaagtcttattatcatctcctaactcatacaatgtattaacttttgcttctttaatctattttaaagttgtcttcctgcatgattcttctataacattttaacagtaaacctgcatcatgtcaaaatttatctgtacatagtattagtttagataaataaacaggtagatagctacaggcaactgaagctatgttgaaagggatcgaatgctatccatgcccaggaagcgtacagctctatttcagaaatgtacaaaaggagaatattcaatgcgaaaggaaatacataaaacagaataagtgaaaaggtaaccagcagttacattctctgaaatacagtgagatatgcttctatagtttggaccatacaaggtaagagcatgttaatggctaattaggatcctgtattagctaataggcaagaagaataaagcttcaagaccatatcacaaaaatcactgtcatactgacattcattccaagtgtcgctacagcatcgattttcttagaagctttatgattcagctgcctttgaaccacagagcaatgcccacctgcatcagtggctaagtacagctgtagaacagacagacgtggcagactttaaaaattatcttttccccccatgacttgcttagaaaatatgcacagtgcaaaaaagtttataaaaattgggttggaattttagagagtctctaacagagtttcttaggaatttctgaaacacagattttattaaaatcccctgtcttctgttaacccaaatggctgatctttattctggttcttttgcatctgaatttttaagttaatcatccttaattacctttcatagcaagagccaatagcaaaggactgaaagaaacaggttggaagctcagtagatcctaaggtttccctaagagctcctggaaaaaaaaaaaaattgcaactgatcttcatctgtgtagagaaacacaaatcccagggtcactgccactaaatcggcagaccaacgtgatgagcactgccatcaatatggctattctaccttgacttttgaatgtcaaaaataatatggacagaattgactaagcagtctccgaggtactgcctttaaaatttttaacttcatggccattaaatattgaacagataattggatttatccccttcagtgctttatggatgtacaaagtacctaccttctcctgttttattcaaattaatggtgctcttttaaagtgtctgccctgagtgcacactatagccgactcattaaaaggatgcttcatcttctgcttaccaactcttttctccatttgcagtgagagggcaaaaaccacactcaaacccacattgacagttaagggcaaatccattgagagtcacccttaaacctagactcttccctccctaaactcaagtacacagtgtgatttggcagtcgattggctgttatcacagaaaaccacaacacagaatccattcattctgtttttaattaaaacatttacaaatgcttctttgcaactgggtagcttactgctacattttaaaatcaagtttgaagaacacagggatgccagtacctctctagaggattagccaagtgaaaccctggattgtgtattggacaaggaaaaaatatatacccatggaaaggctgtgcaattcacacttgtgataaggcatttctatcaagtatgactaacacctacaaacgtacagtctgaaaataactctggtggaggtgttagtggaaaggggttaatggaaataatgttttcattttaaacaatataaatccacaactggcattccactggcccgtgacctccctttacccaatccttgttcaagtcatttgctagtgtaattgaaaccttctttgagagtctttagatttcatttcatgttttggggacaatacagctaaaagacatttaccatccatctttcttaacattcctaatctaaatagaagacccaaatctaagactgtgcttttgatggatcactcgcctccctatacagtagagcttaaagagatcctattattgttttcagaacccttacagaaaacatacattcatactcattttagtttttaccacctagccacctagctgaacagcctttatttgtaaaatgtgctttccaaaaaaaaaaaaaacagattttcaattaaaaatttcaaaagaacaagttagaaacaactgacccattaaatgcagatgggaaaaaaggcttaacaagataacacactaacaaatacacaaaattgtggaaataggatttgctgctcctgagtacaatgctaaaaatattccaaagctttttctatgtgtgagtacttctaatacaggtctccatctgttcatttctctcaagagttgaaacagacaataaaacaatgcctccagccagccagcaaatgccttcactatgactctactaagggacatgcatctgagaatcatctcaattattctattacatatttgaaaatatgatttttactttatgtttgccttggaatgtatacaaagtctgtctaataagaagtggaccaattcataatttataacaagaaaatgtaaaggattaaagaaaaaaaaaaaaaaaagcccgccacaggtacatattaaactggggctaacttaatcaagattttgcaatctgccagaaaattcctcccaaatataagtagataaagccttaatttcaccactcaaattgactgcccagaccagctaactggctgcacaaaggcagcctcccttcatctaaatttctaagttctttgacttaacaaaagtcacaactgaccagtataaaaaatagaagcaaagcttgctgacagctccctagactctacctttctagtatctttggtgttcaagctactttatttcttccctgcattgggatttcctgtataagaacaggataaaactgaacacattcagatattaagattacttgagttacctctaacaaaattacctgctggaatgaaagaagcaattttgaagtttgttgccacccttaattctacaaatcaagatctgtcctagaacaccatttcaccttaacctgtctggcagttcattaagtcattcaggattaactgttgtgagtccatcattccacaaacccgttgtaattttgaaaaagaaaaggacatgagactattgcatgggcaaagtccataaattccaaatattaaaaaagaaagcttatatatctgaccacaaccctaagtgggaggaacacttatatcctatgcagagctggaatatatgtcagcctttatattaaatgtatttttaagtcttattgttaaaaaaacaaagacacatgtcttagtctattttctgttgcttataacagaataccagaaactgggtaatttataaagaaaaggaattaatttcttacagttatggaggctgaaaagtacagggtcaaggagccacatctggtgagagccttcttgtttgaaggaactctctgcagagtcccaggacggctcagggcatcacatggtgaaggggctgagtccgctagctcagatctctcttccgcttcttataaagccaccagttctacacttctattataacctattagtctataactcattaatccactaatccatgaatagattaatcaattcatgagggcagagcctcatgacccagtcaccccttaaaggctctacctctcaatactgcctgccatactgggaattaagtttcaacatgagttttggaggagacaaacattcaaccaaagcaacatgtgatcaagagcttaacccttgaaaaatgcatatagttgatatacccactattcaaagatgttttcaaagttaaactagaagagtgggaactaatgaaatttatcaccagtaagctagcatcaagaagtaaaatataaaaacaacaacaacaaccaagtagcaacagtgtatggaagcagggaacataacccattgtacacagacaaaggggctaagcaagcctctgtcgtgaagtgcctgtcacttgccttatctgtgaaccaaacatctcttattttctactatacaaaaagctaaggctggtcacaagaatcaagggttgcttttcttctctttgaatatctaataagtatgcttgattaaaaaataaagttgatcattttaaacttgaagagatgaaccccatttgctataaataaatgaccaacttctagcagtaatacatgtctcagtatacctttatacagagttttgaatttggaaagcttattagtgttccacatattcaaaaaataaaattaataaacaaagatgggaaagataaaaacctaaaattgaaaggaaaatgaagcaaagggaaaatgaagcaaagggaaattgtacttcaaattaaaaacataaccactatgaagagaggtgagaaaaagaataatataagttacgaactcaaaattttactatctaccctattctaagaaagtgtggagggaaaacatgtcctgaactttttagtaggtctttttctgtagtagtatgggtgacataatttgaatctatttttagatgtattaaaggactgagtaaatgaacaaatgtgttaggcagcagggttttcactgtggaagaataatacattatagaatggagataagcattctctgtgaaaatggtttgaacttggaagtattagtgtgaactcacaattcctaaaatatgtgcttgtgtatgcacacatgcatgtgtgtgtatattatttttcctgtctcctaaaaaaggcctagaatcaaatctaccctgttagtaagcagcacacctagcaccccaatattggtttctaatacctttctcctctaaaaaaaaaacaaacaaacaaacaaaactacccaaaaaacaaaaacagaagtcatcagagaaatggttgattacagggctagggcagggaaaggacaagataagcctagcacatctcacaccagaaaaagttagtgctgagaaaatgatgggagcatattagaagaacacaagagacaatctaaaggggcccccaccaattaaatctaggacaatttgagcaccaaaataattaagaaaagtagtgaactatacaccactaaaaaggggagtctataagtcaatacgactgacagacaggcagacagacagatagatggatagacagactgacagacaatgagagtgggtgggtggatgggtggatgggtggatgaatggatagaaaaattctttataggagaatgctaactactgactggtaaaggttgatgaagtgttatagttggaaaatcaccatagaaaagactggttcaagcaaggatcatcaatagatgttaaatctaaggggtgagttttgaagaggaacaagatatttgcatgctcttaaagtgccttcccacggattgcttattagttgtaagggttaatatagtaactatacagtagaaaaatcaggcaatgccctgatcagataaccaaaattactatcaccaacaaagggtagaaggacattgggtacctctggatgtaatagtgtaatctccagaataatagtgaaggacatgttacttcagtattattctggttgggaatacacagccttaatctcatcatgacaaaacatcaaactcaaaacttttttacctaaaaaataaaagaggtgggggagttctgtatattttttaatgtcaatgtcacaaaagacaaagaaagcctgaagaactgttccccattaaagtagattgaagagacataacagctagatgcaatatgtaatcctggactggatcttgcactgtagggaggaaaattgctataaaggatatcattagatcaactgaccaaactgaaatatggagaatgctgacagaagattagataaaagtattatgtcaatgttaaatttcctgaagctaataattataccatagttacataagaaaatcttattcttcggaaatatactctgatgtatttggaggcaaaaagacatggtggatgcaacttaccctagaatggttcagaaaaaatgcacagagaaagatggaagggaaaaagataaagaaggaaggagtgaaaaagacagagggagagttcacagacacaaatgataaagcaaatggaacaaaatgtcaataagaggcgaatccgtgtaaaatgaatacgggtatacattgtactatttttgcaacttttcagtaagtttgaaacgatttccaaataaaaaatgtaaacaacaacaacagacaaacaaaacaatgtcttcactcacacagccttgtgaatttaaaataacatacacggtgttcctaatctcataactttatttctggaaatatcacctcaatgtggaaaaagtcatatgtgcaaagatatttgtcaaagcattgtttataaaagcaagcaacttgaaaataccacatgtagttttcaaaaactgaggagaatggttaaattatgctatgtaaattccaaagaacattatgcagtatttaaatgtgtttacaaaagtttataacaattgaaaacacatgacatgatattaagtgcaaacaacaggactaaagatgatacatatagcatgatcacaactaagtaaaacaggcagataaaaggaaaaaccttagacaaaaatgcctataaagaaatccaagaaactatcaatattggtcatctgttcctaggagatggttcatggatgattttttttctcttctactaataattaattagatatataatctaataattatataatacaaaagaagctttattctttaaattatagaagttagtaggaataagttacatttacttatcttcaggaacacctgttatgtaagtaaattatactgtggatgtgcgactatcaaaatcgaatctgagctacttgtagtctcaaagatgggaactaaaacagagaagtcatagtcatactaggagacagtcgtaagtggtacttatttagagttgtgcatccacacattcatgagccattaatgcctcttttctccttattctgagccatcagaggatagtgggattactgtgtaccctcccatcccacctccccccatgtcacaggagaaaaaaggaaaagcagtggtgcttacaaagatggagcatgtgacagtggcttcactgatttcaagctattaatttttgagctaaacagtcacatttcttaccactcctgctcagagtatatgttcaagctgaaattctccaatattctacaagtcgaactggacaagcccaattatattgggaaatggtgatattcactgagagagagggagaaggggaaagggttggggggcagggaggagagggaggaagggaggcgagagagagaaggagagaggaagtgtagaggaatataggaagaagagaagtaggggacagagggagagaaggagaaaagcaggggagagactgaggcagagaaagaagggtaagagaaaacacctgtgctttgaaaaactaagtgacaatgatcagatgtaagtgtttagttaactgaaaggctgaaaggaaaactgaaacagcaccaccattcattttctaataggttcccggagtcaccagcaaaaggttaggctactcttaaaaaaaaaaaaaaaaaggttgggggagggtgggagtattaagagaatagtgtatagcaaaacaaaagaggaagtttctagattaaacaattattacagctcagttcctgtttaagaccttcacatttgtgagcatttaattgtatttatttctaaatgtaccctggtttgagtaatcttgaactatgaatctcataaactcagccaataaaataattaaaattcttttgccaagttgatatgtatgaaaaagtcaaacacttcatttaaaacttatgtgaggcacattcataagaatacactaatttctcattcagatttcaaattgaatccatttaatgactgccgatagcaaagcaatagaaatgcacagaatagtcatgcaatcgacaattacccaaagttcctctcatgttttatgaatcaacaattgtctcctaacttgtgaaagaaatcagtgtgaattagcgtctagaatcttataacctgtctgcattaaactataaaaaaaatgagtacaattagacatacaatttaaagaattcatcaatttaaatgaacaaaaataaagaacttctctgtgatctcatgttccttttcaagacaacacactctcagggctgtctggtttaccactatttcttctttacattcatgttctttatcagcaaaacgattacaatggtctttcagacttgagtgatgaatgacaaaacaacacagttccattctaaaatgtgaatggccgtggagcacagctccaaaaacgaactgcaatggttatgccagagaataaataacatccagcaacagaatcaaattctaaaattaagcaagaaaaagaagtagaaataaaaggagaaggaggaaaaggcaaaagagaagaggaggaggatgcgggagggagagaggaatccagaaatttcaacacctgcatcatgaaaaatgttttttcctttttccccaaaacaaaacaacactagcacttactgcaagacagattatttctcaccaggtggtgaagaaatctcactccaccctcagattcacactgacaaaacttctcttacagctatgcacattctgacatacaaaggccacaaactcagtgctctggtgctacagctggtggagcctgattaaaggcagagttcccgcccatgcatgcagacaggaagatcaacttacagaccccttcaacagtgtacagcagggctctggaccaaggtgattcattttagctatcctaaaaaggagatcacccacagagcacagaattaaatctgtgttattaaaaaaacaaaatatcaggcccacactaacaatatcaccacaaagaacaaatatttctatacaagaaaaacaacaagtcgtttctgttcacatgtcatattctcattacagccagtcctaaccatcccatttaaaattgtaatcctttccctagtactcctagtccttcttaccttgcttatttttttccatagttgctgtcattcttaaaatactatacaatttgttcatttattgtgttaattgtttatttcttactccccactcaaatatatgttctatgcagggggagatatttgtctatttactccagtgcctggcacgtaatagatactcaataagtgtctgttaaataaatgaatcattcattaagttcaatgatttcttaaagcttttcctattcaagcagaaaaggcaaaaattaggcagagaatttctaaagagttataataggacatataaaggcttattacctctactctaaaaagcctatttacattgattaaacaccacacagacacacatatacgtacacattaaacattgattcagaaatgggttaaagaacctaaaaccctactgaaaagaaaaccaaatggttaataaacttttggaggaaaacaacctcgctgacagcaaataaacacaaattaaagcaaaattatatttttcctctgcataattatcagatactttaaaaactaacattcgcattcccaaacacaaatgaccatgtggtgagatggtcatttccagccaggaggaaggaaatcaagacaaccattatctgacccaggaatttcaattgtgaaacctgcaaagaaacactatataatagaggcaaagatcaaatacaaagatattcatgaaagcagtatttacaatagcaaaattctggaaaaatctagaggattaaaagtggtgaaacaagccaggcacagtagttgtgcacctgtagttcgcatgtgctcagaaggctgaggctcctgggcccagggaggatctcttgggccaggagctcagggctgtagtatgccatgcttgcacctgtgaatagccactgcaaaccagcctgggcaacatagcgagaccccatctcttccaaaaaaaaaaaaaaaaaaaaaaaaggagaaatagcccattcaattatgatacatccacaaaattaattattatatagtctttaaaacatatgcttgaagaatatttacaaagacagaagactgcaaataatacaatattaaataaataaaaacaagaagagtctaatctgaactaggcatggtaatatgcatggaaggtgaaaaatattaatatcaagaatatttttctctgagtggtaggattatagctgaattttatcctctaaactatacttttatggattatcttttttatcaacataaagatattctacctttagaattagaaaaaaattttaaatgaaacagatttcacagaagactgaaggaaagaaagacttaatagaaaagttgggataaaatatacttttcggggttgtcattaatcaaacagaagaatgaagtcttagtaaataaagtattagaaaaaagagcaaatgttaacagtatctgaaaaaaaaaaaacatagaggtagcattttttaaaaacagaatgcattcttattcccctattaaaaaaaaatccacagctctgaataaccttatagggtccattcattccaaaattatctcattaaaatttgtatcttaaaattcaatctgaaatttgacaagggatcttttcagttttagttcctaatccacatagctatgaaagaggaacaaacctgaaaaaaatgagaaaatacaaagcattatggcattagcactgtccttaccatgaatataaactaaagttactgataataaatggacttttcaataaatcagccaaatacagagtcaccgaccacggtaataaatcatctgctatgaaaaggctgaatttattgaagaaaaaaaaagaaaacaaaaaacctttctggatggtcagaagaaaaaactacccaagctcttagggaagccctttttcatagtatgtacaggtagagtaatcattttgactatctaaaacaaattcaaacatttagaacaaagacaatggttgtgcttacagatctagatctacagacttaacatctgcacatgctcattggaaatctacaaggcagtgtcaacagaaatattaacatcctttgcagtcatcttacagcactgctttataaaattacatcagatctctatctaaagcaagtattagagctatccatagatgcagtaaaagagaatgtgaaggaaaagtaagaaaattcaagcaaacctattacttttcttttaagctcaaatatatttcttaaggctaaacatcagaagcaagatgcttggataccaacactttcctttatgactttagctttctatctagctccagagggaaaatcatgtttacaagaaccacgagacatgtgaaaagcaataaccaagataaatgaaaaaaaaaatgccgggttaagttttagtcagaactttattgcaaaggtagtttgttttatgagatgaagaaatctacttctcgtcttctctagcgttacatattgaaaaacgaaaacatgattaaactattcttttaatgtcatcttatttataaagagcttaaggaaaacaatctgcatgcagactgagcacactacagagatggtgcatagtgtggaacccaatgtcaaaaactaaagttcaatttccagtgctaatcaagtttctgaaacaggagctctgttgatttccctacgagccacatgactttgttttatagtcttgatgcaaaatttcctaaaattttgaagccaatttttttaaaaagtagaaaataaaaaaacaaaacaaaacgctagagataattaatgttcatccattattcattccaaaagaaagggaaaaattcgtgggtcagagattgattacttttatagcatgttcttatacagaggaaatgagacttggcataaagtaggaaggggcacaacagatttataaaaatcaaatacacgtgtgatatttagacttgcctttgatagttcaattttcagctattcatatatagaaagcagaaagcaaacttgtctgtatattagaatcacttaaagatattttttaaatgccaaagcccaaaccacacccccaaacaattagatcacaatctttgggggtgacagcaggcattcaggatttcttgatgctctccaagtttgggaatcattgacgtaaagtacagaaaacaaacaaattcttctaccttctttcagatttctcattgggattatcccagagaactgaagggggagaaaaagataaagggaaaaggaaagagttgggaaaaaattactaaaccaatgcattaatctacatctgctttttaaagcaaatcatttacacacatactcactgctgtttctgaagctggctcaacaaaatgctgaaaaaaaatcattatagaggtacatggcatattatgctgacatgagtttctacagcagagccccagtcctttaagaaggatttgggtgagagagcagaagacagattattctcataaacacaaaaaaaggtatgcagattccaaggtgactaccacagctttctagtgacaaatcgccagcaatcggagatgtttgaaatgtgaacttgcttaaccttgcctactttaatggtttattttaataaggggaaggatattaaaactctctattaagttcaaacatggaagaagagggcaagaaaaaaatcctaaaccctgtaattccaactttttttaaaaaagactcactgtagctaatttcctaattttacatattatttaaacatagtccaaaagattttagttgctacatagcattttattctccttctgtcccgtatttcttttttaaagaaatgatttaaggtacatgcattccatttgtaccattggttcatgacattcaaagagttcatcatgcacacaggatcacctgtgtacttagcttaactctgtagaaatctctcatccctaggaaagaacctagattatttttatgccatccaaatgggagactgtcccagataccagatgatgaaggggcccctgagggaccataatgctaacgtgctatgagcactacaaaatttgacttcaaagatgcctctcagtttggcagggcctccacatatgtctgtgaataataaagatgtggttgtcattggtggtggaagcaaagggcgcgtgtccttgtgaatgtgaccacattagatttaagatagaagaaagtcctttacaagaaaaccagaaaaaatggtgtatcaatttatgtgctacagacatggttgtgcttcattactgtagcataggattaaaaacataaatcttgaccactcttcagagagccagggttgagctacataacattttttccttagtgctggctttttggcattttggtcatttcaacaatattcgttggccaaccttcaacaagtcaccacttaactaactttatttatttatttatttttaggagcacataaaggtgaagggaatacttcttttccaaaacagatatgctggagattaactttagagttgttctatttcatcctaaattttccactgcttctgtcctgcagtgaagtcacaatacatctgtgacagaataactcccatggcaacaggctgacatcataaacaccagattaagacttggctgcaaagccaaaggagatgatgggctgggaaggaagaggctataattcaaacaaatctctgccataatagctatgggaatactaaacattactggccaagtaaattgctttctgtataagcgttctcttttttttttttgaagtttgccccagtgtgaaagtctctctgtaagtcaaaaccttagcattattttaatgtactgtgctgtatttaataatcttatgcttcagacattagtctgttaccatgggaatgacagcagcataaatacaggattatggctatcaagcaggagaaaagaaattatgaataagcctcgttatgttcaataattagcagctacatggaaaaaaacaaaaccatgaatttaggttgatgcatttatctcagtgtttgaatacaactctgagtgtgttattgctttaaaatgagattctaacaaactgccaaaaacttcttgactagcagttgttactcagtgctataatttaaaaattcatcctgtccatctcttttttctcctatttatattcttccccagcagaagattggtaactaatgggtaatacacaacattccaagatagattctggtatcttgagccaacatatcaggagaatggtacagaaaaactgaacattaccagcccctctaccttagctaactgcaaaatgaacaacttccaaggacttgctgctactctcccacaaaatgaaaagtctatgtatcaagatgtagaatagtacagctaagcacaaggctcctccccagtcaaagaggagcagagagtgaagatcactatcagtaaaagcgctggcctagagttccatcactaaactgatatgtaacccaaggcaggtcttctttctttgagtttcagtctcatcatctttgaagtgagaataacagagcataaaagtcaaacttgaaccaacacatgatctgtatagctcatttttttattctcaatgacaatagagacattgtactctatcagttacgttaatgactaggaagtgtaccatacagttggaactcttaacaggcatgcacccctttgctaattgtagaacagattaacaaaatggtggataaaaattttgagactagcaaagatggttaaaacaatacctccctaaacccagagactacatccaaatattgaagaaagtactgcagcaatgccacagcatcaagtcttccctgaatatttggggaaatgggcacatcgccatacttttggcatcctatggaatcactcaccctctctacaagagtatcattactcattttcccatccaaatcagatgacaagaacgaaatcttaatctactcataaaccagtaaacacttgactaagatcaacagctccttggtactttcaaatttccttaatcccctcttccgtgaggtttctgcattcaatggcagtggcacaacacatcattgggggaaagtaattttagaacgtgccatccaaattaactggtcgtgaataggctctgattaaaatataaaaggcttttaaaataatttaaaatgattcactggaactaatttggagatattttaatctctgaatgtgcaatgaactgtagtctcccttggccccagcatctccttagagaggaacatttcttgtcaggccttatgccactggattagaggtatttgagccatatgaactaaaatggccatgcctgaatctccccctgacttttctgacttgtgtctctccaacttaagcatggttctcttccacgttccaaaccaaattgtatatacttcccctctcagtgaatattgctcatctgtttactaggccagatagctagataattctaaacacaacaatgtgacaattatttaaagaatcacatgagatcaaacaatctcagcttacattctttagtcatttgtttaaattccattttagattaaacaaaacaatattttcccaacctaatattctaacatatttatttacagggattccactaaggccacttgtgaaacaatatctaagccacatttaactaggctcttttaatgtgactatgacattcaagaagatggctgatgctttaaaaagtgcctacttagacccactacagattcctttacaaaatcctttggtgcctggtctccaagatttcctgaatctcagccaaagacccttcagataacaggagggagagttagtctctatttttatatgttctagacattgttgtttctttctgagccatgggatagagctggaaagaagaaatgagcaacaaaatctatatattggagcactgtgataaggatagatattccctgatttaatcttcccaacaatctgatacgtagttattattacacctattgagtaaatgaggaaatagaagaagaaaaagatatccaactgagttatcacacagtaatgaaaaagtgaaattcaaacctaatacaactccaaaacccaagttctttctgttgtatccttacgaaaatccagtcttcttgaaagttggaagctggtccttttattcttctgtgcaatctcagagactacacatacaaagagttcttaacaaaacacgtatatcaagtaaaagaagcaaagtgtttacaagaaattatctagtttcttttgtcaagccaatcccctggcccagaccagaccagaacagagcacacatgagaagtatgacttactgctacagcatcagagaagaggaatgaaaccctcaaaatccatccattttgaagctgatgtatccaagcataagattgtcacttacctaaaagaaatatgagagaaaacaccattattgtaaatgtagacattcacctctcagaaactttacctactaatatattaaaacacactttaattttatagtcaatgtatcctgagcaccatagtataaaaagagctgttttttttcatctttcaatttttcaaagccatcctcattctttttttaacagagtatttaaattccagtcttttttctcacctttacctggaacagtctaactttttgtgatgataaaacatctttaaaattcatgtatcttctctccagaaaaatcacatatagaaaccctctttcacatagcgttagccagttcacagtccacctgcggtctacccactgacctatatgatgaacatgacatgagagcaggctgtaggatatccctgaatcttacacatgctgcataatttgctttagaagcccacaaaaactttaaatttccagaaatgtgtgatgtacatacaaaattctgcacccagcctatataaaatgctcattctttttcagaataaatgacatatcaacaaagaattggtcgatactaggtggcaaagaaagtctctagaaatagcaaagaaatgctagctacttagatgccaactaggtctgttggctataaaaacttaaacaaattaaaaacaaacagaccaaataattaccaagaaaacctaaaaaagaaaaacagtgtacgtgtgtgtctgtgttctacatcaggatagggaagaggcaggcacaaccagatatttcaaaatattatacagcttctacaagtgaaagagtgtggttttgctgcgtgaagaaacagaatagaataaaacaaaaagctcagaaagtgaaaaaagtatacatagaaaattggtatatgatgagacgtcacatctcaaatcaatgtgggaaaagatggcctttttaataaatgatatttggacaactggacagccaatggaaaaaaattaaattgcattcatacttcacattatatatcagaatactgtcaaaatcagacctacatatatatatggtggtgatatatatatatatataatatatatatatatctctcatatatataatatatatcttttatatatatgtatcatatatatgtgtgtgtgtgtgtgtgtgtgtatatatatatatatatatatatatatatatatatatatatatatgcttatttgctggtgatatatataagcatgtaaaaagatgctccacatcagatttcatcagggaaatgcaaattaaacaacaatgatgtatcactgtatgcctattagaatggccaaaatccagaacaccaataacaccaaatgctggggagggtgtggagcagtaggaatgctcagttactgctggcaggaaggcaaaatagtacagccacttttgaagacagtttggcagtttcttaaaaaaataaacatactcttaccatacaattcagcaataatgctccttggtatttacccaagagttgaaaacttatgtccacacaaaaacccgcacgcagatgtttatgacagcttcattcgtaattgccaaaacttgtaggcaaccaaaatgtccttcactaggtgaatcaataaacaaactgtggtatacacagacaatagaatagtattcagcgttaaaaagcaatgagctatcaagccatgaaaagacataaaggaaccttaaattcatattaataaatgaagaagccaaactgaaaaagcaaccatactgcatgattccagctatataacatcctggaaaagacaaaactacagagacagtaaaaagatcaggggttggccaggcgcggtggcccacgcctgtaatcccagcactttgggaggccgaggcgggtggatcacgaggtcaggagtttcagaccagcctggccaacatggtgaaaccccatttctactaaaaacacaacaatttagccaggcatggtggcgcacgcctgtagtcccagctacacaggaggctgaggcagaagaatcgcttgaacccgggaggcggaggttgcagcgagccgagattgtgccactgtactccagcctaggtgacagagcaagattccatctcagcaacaacaacaacaaaaagatcaggggttgccagggatataagggaagaaggaatgaactggcagaaggcagatgatgtttaaggcagggaaaatactgtataatgatgaatatgtgtcattatacctttgttgaaaccgacagaatggacaacaccaagagtgaaccctgatgtaaaccatggactttgggtgataacggtgtgtcagtgtaggttcatcaactgcaacaaatgtaccacgctggtagaggatgttgacaacagggaaggctatgcatgtatggggacaaggaaatctctgtaccttctttttaattttgctgtgaatttaaaactgctacaaaaaattaagtcttttttaagaaaaagcccaacacccccacaaaaaaaaacccacataacttttgaaagaaaacttgaagtctgttataaagttagagaaaaggcagatccagaaataataaaaaataactttgtgtacataaaaatgtattttataaaaacccttgtgcatagcaaaataaaacaaaatgccatcagccaaaagacaaatgatatacttggaaaaacaatgttcgcaacctatcacagacaagggaattataatgcctaacatataaaaagctcctaaggtccaggtacggtggctcacacctgtaataccagcactttgggaggctaaggtggacagatcatgaggtctggaggtcgagaccagcctagccaatatggtgaaaccctgtctctactacaaatacaaaaattagctgggtgtggtggtgcgtgcctgtagtcgcagctactcaggaggctgaggcagaagaatagcttgaacccgggaggcggaggttgcagtgagccaagatcatgccactgccctccagcctgggcgatagagtgagactctgtctcaaaaacaaaacaaaacaaaacaaaacaaaaaagcttctaagaaatctaaaagaaaaataccagcattcccacagaaaaataggcaaaggacataaacagggagtatacagaagaataagcaaaaatggctcaaaacatgtgaactgatgctcaactttattcataataagagacataacattttttttttcactgatcagattggcaaaactccaagtttgactacatactccgtttatgaggctgaggggaaatagcacctttgtatgttactggtgagaaggcaaaagggtataaaactctaaatgaagggagttaggtgctagcagagatgtagaagtagatttataaatcagtacagaggtaaacataactcactagagaaatgatggactcttcaataaatggtactgatagaactgcaactaacaaatgtggaaaggatgatgggaatagaaatcatttagcaaacaccataggaaagaatgcatgctaaaattacaaagagaaaaacagtaacttcactgtggagaaacgtggcagacaccaccttagccaaatgattgaagttaacgttgccaataacaggataaatgggtattatagacttcctcatacgttacactgaggacacaaatcacattcttgcaaacaaatgcataacaaattcaaccatgagaaaatatcaaaaaaatccaaactgagggacattcttcaaaatatctggccagtactcttcaaaactatcaaggaaggtcataaaagacaaaggtggaactgaaaaacagtcacagattaaagagacatcactagtcaatgcaatgtgtaatcctgaatcgaatcctggagcagcaaaaggttgttagtgagaacaactaagaaaatttgaataaagtctggagattagataatagtactgaaccactgcaaactttctgacttgatggttctacagtggttatgtaagatgttaacatttggagaatctagatgaaacgtctatgggaatttttggcattgtttttgcaattttttttttggtaagtctgaaaatagttaatttttttgtttttaattttttttgtttttcttgagacggagtctccctctgtcatacaggctggagttcagtggcgctatctcggcttactgcaacctccacctcctgggttcaagcagttctcctgcctcagcctcccaagtagctaggactacaggtgtgtgccatcatacctggctaatttttgtatttttagtagagacagggtttcaccatgttggccaggctggtctcgaactcctgacctcaagtgatctgccctccacagcctcccatagtgctgggattacagacatgagacattgtgcccggcctgaaattagtttttcaaagttcaaattggttttaaaatttcaaaaacaaaagtcagtttttagaaaaaaaaaaagtatttttttatgtgtgtttttcaaagcagcatggaaacaaccagatatcctcatagaaaaaaaataaaattaggctgggcacagttgctcacgcctgtaatcccaacaccctgggaggctgaggcgggcagatcacttgaggtcagatgttcgagaccagcctggccaacatggtaaaaccctgtctctatgaaaaatacaaaaattagctgggtgtggtgatgcacacttgtactcccagatacttgggaggctgaggcaggagaattgcttgaacccaggaggtggaggttgcagtgagccaagatcatgccactccactccagcctgggcgacagagcaagaatctgtctcggaaaaaaaaaaaaaaaaaaaatatatatatatatatatatatatatatatatatatatatatggcccatttgcatatcatacacaaaaattccagataggttaacaaaagtaaaacgcaaacttttagaagaaaaaaagagaaagggagagaaagtaccttttatgacctcagaagtaggaaaggctttttaaataagcaaaaagcaaaaccataaaggaaaagattgagtttgcctgcattaaaattaatataaaagttttataaaacaaaaaataacataaataaaaataaaaaaaaacaagccatatacttaattgcatataacccgcaaggattagtattcagaacataaagaatttccacatttccacattatcaagaaggccaggcactgtggtgcacgcctgtggtctcagttatttgggaggctgagttgcggggatcacttgagcccccgaggtcaagactgcagtgagacactccagcctgggcaacagaacaagaccctgcctcaggaaaaaaaaaaaaaaaaaaaagacaaaacaaaataatccaatagaaaaacagcaaaggattcggcattaggaaactgagagaagagaaaactcaacaggccaataaatgtgaaatgattctcaaccttacaagtcagtgaaatgcagatttttgttgttgttaaagagtcagtgtctcactatgttgcccaggttggtctcaaactcctaggctcaagcaatcctctcacctcagtctctcaagtagcttggactacaggcatgcaatcctggctaatttatttttatttttttaaagacggggtcttgctgttgcccatgctggtctcaaactcctggcctcaagccaacttcctacctcggcttcctaagtagctgggattacaggtgcaagccagtgtgtccagcagaaatgcagattaaaacaagaaggtatgttttcactaccatcaaatcaatgaaaattttattttctggcaataccagtactggaattgaagaagatacgaagctatgagagttctcccacagcacctatgctaccagccatgagcacaatcacgtgggagagctttatccaagaaagccaaagatgtccaaagcaactccacttccaggtgttaccctagagaaattcctacccacattcaaaagtagaaggcacacagaaagacacatataagaatggtcatcctttcactggatgtaacagtctactgcaaacaagaaagagtccatcaacaggagaataaataaataaacagcgatattcacaaaacataaaatatatatagcagtgaaaataagtgtaccagagccacaggcatcaagatgaatctcaccaatgagtatgaaggtaaaaagcaaatttcagaatacaacagcataacagcatttatatcattatgtttaatattttatctaaaacatgcaaaaatactacaccctacagacaaacatgttcgtaggaagatgactgaaatggacatgggattgataaacagtaaattcaggattatagttcaatcctaggaggaaggataaggagtaaggtgagggagggggcagacacgagagaggacgtccaaacacggcatagtgttaagatgtgacaaagctaggcgtggttctataagcttttctatatatgtgaaatatacaacttcaaaaggcatctgcatcataaaatgtaggcctttactcttaaatgattcttcaattagcttttgcttaactttggtttcttcagttttctcatggggatatttcttttctccttgactttatattggtataaaaatgtaaatggtatctttagaccccatatgctaaaattagggctgcctttttgtttccttaaaaatatccaaatacttcctccctcattattcatatattcactcgcttccttaaggatttctattcagaaaaattttaaccaaatccctctggagtatgctagaccccagaatatataaaagatgttaagatgttttaaagaggtttgatttttaaaacaaaacaattaaaaaaaatccagatcatttaagatgcctttactgaagattaaactaacaaaatcccatttccataataaatttaaagaataaatacatgtgaaatatacacttttaaaaggcatctgcattacaaaatatttataaatattatatattatatttatacattataattatataatgtaatacttatataattacataatattatataccttattataataaataataaaatatttataaagaataaatattaggttatatattactaagcaatttgtatgttaagaagtgatatggccaggcgctgtggctcacgcctctaatcccagcactttcggaggccgaggcaggtggatcacctgaggtcaggagttcaaggccaccctggccaacatggtgaaaccccatctcaactaaacatacaaaaaaattagctgggcatggtggtgggtgcctgtaatcccagctacttcaggaggctgaggcaggagaatcacttgaacctgggaggtggaggttgcagtgagccgagattatgccattgcactccagcctgggcaacaagagtgaaactctgtcttaaaaaaaaaaaaaagaaaaaaagtgatatatagtcataaaatgcccccacagttgaagcatggtaaaatgtaatcatctagtgtcgggtgtatgtacaagagaggcactttcccatatcacactaaagtattaagtgtgattgctgctgaatttcaccaggattaactgtaatgattcactacctgaaagatcaacatactctagccatagacatgctacagaggtttgggcgaaggctaaaaaagaccccattcacctcttcgctgaacttttccaagactgcgggtgctattggttgataatgttaacaatgaatccatttctctgaaatattaatttcacaaggcaaaataatttagttctatggttccctaaccttggcttttggtctttgaagctgaaccgctggatgagttcaatgcaaatctaccatcaccataaggagaaagaaccaaagcacaggtatggtgtgtgggccagcagcatcttggtatagaaaggctggagcatttgttttcattaagtgctgccaaaatgcctagatatgcacccaacaatctgatattccacattaggaaggtttcaaaaatccagccaagaggaccacttttatttcaaatttaacttcgaaaggatgagctatcatgtaaaggcagagttggccaggaacggtggctcatgcctgtaatcccaacactttgggaggcagaggcaggaagattgcctgggcaacatagtgagaccctgtctctacagataatttaaaaattagctaggtatggtggtgtgtgccgtttggtcctagcaacttgggaagccaaggaaggagggtcacctgagcctgggggggttcgaggctgcagtgagccataccatcgcactccagcttgggtgacagaaggaaagtaagaccctgtcatttaaaaaaaaaaaaaaaaaaaaaaaaaaaaaaaaaggcagagttgagttgagtttttgtgtattgaagaaaggtaagcaattttaaatgccaaaaaagctccttaattatcaaattcctaaaaagtcttcttgctctaaaagggctgggtgttggggggtggtagtaatttgcctgtaggctcagaaactaaatgacaagtttcaagtttcagccctaagcaaattttcagtcaaacagagccgttttaaaaaaaaactctaaaggaggtggtaaatgttggtattggcaacagcttaaacaaaagccccactctttcttatttttacatgtgaacactggaaatgagaatggaatgacgtcccccttaaaaaatagtaacactccaatgtattaactttcctctgcctaaaggaaatgtgtcatttttagttcttcaaacaatttttcccccaagcacaacagctcatttctttatactacagctagttggctgtccctgatcagtttaaatccctgcacagttcaagatctgggactgaaaccaaaaggaataaatcaatgaaggcctggatttctatcccactatgcaggccagcactcttcaaagatgtggagcggccaaaagctgtggagaagttcccaactgtgttggttactgacctaaaatcacatgacataggaaggatatgcccccatcccaatcctgagaaatctcatttagtcctgcttttactatgccatattacattacaaaggttctacatagcccctcctcctagtacttattcataatcaactctactccaagaaaattagttaagacatccatttcttatgtgaaagggctcctaaatagtccaaatcttgagctaaaagaagccaatgttatttcatcacacagaagccaggggcagagggggagatgttggccagaaaaatacttattccaacagaaaagttacatttttgatagtgttccaaaaagagaatattggcaggaacctcaagattttgtgctttctgctgctactggaatgaaatagattttcgttttaatccggtaatatgaaataaaccaaaagcatacagattggcaaataccaactctagttgcacagtgtcacatgtcacacatcatcagcccaaggaggtcaaaaagggagcccaggcagctataacgtatatgaagagatgaacaatgaacatttttaaaatcctgatctagtgagaaggcataaaggaatccacctgtgcaggagacttcaaaagccagataagaaagaagaaagaggcttaaatggaaaattcatcaacaagtcaagaatataataaagcacaactccaatttctacaagaacactggcatttcaggcactcaaagaagacatcacaacacctctctacataacacacaaagacaatgtaaaatccatgcagcacagagtcactttagcaactgccaggtagcgctaatcctcaaaggagatttcttaagaattcccgttcttcactttatcccttatttttcgttttttttgttttgttttgtctttcttttctttcattgttaaatattagcataccaaagaaaggaatgttgagaaacaatcttcattcattcactcaaggggctgaatctagtcctcttgaatccaagtggcccaccaagataaaagacataggaattatgggtttttaatgaagcagtaacccaactaagtaactggagaaaagttcaggaaaggtgctgaaatctgacctggtggtcaaaataatccacggagaatgcatgcagttttaaggaatctgggttccttgaccctcaagacgatcttcctcagcaaatgcttccataagcttgaagaaaaaaaaaaaaaaattccactgcctgctcccagatatatagcattagggcagggataaatttcaagctggcaaaagtccaaacccaacagttgcagctgtagtagctgccttgtttacaaagcaattcaggaagcttttagagggcagagtgcaccagacagaagggggtctgtacgcaaaacatggatgcatcccaatgctttcagaacagacaacacatctgttcccaggtcccccttggaaacatgccgcatacaaatccaagtcaacctttactgctcatgttttttcaggaaaacatatctacttaagcactcaaatcaaaattatacactgttagttattgggcccttgggccatccccaacatcctaaccagaacactgaatacaacatgctgcacaatgttttgagcagactcaaatcaactatgacctgaacctctctgcccattaacgatgctaagcctaagtgtgtcttctattacccttttaagactcttacaaattgtgcttcttagcttctctccgataacatctatgtcctggacaattatgtgggtaaaggacacatcggaaaattaacctgtgttatcctcattattccctcacactgagatttcaataacgtaacttacttctattcccctttagtcctctataatgttgtacccttgccattttcattttcttgcattgtttaatttagaattcctctctaagaaaaataaacaaagtctagaggcagaatgggagggtggggggaagagcaacagaataaatgctgaaaaggaagcagagggtgcattatgtctgtttacagagctttaaaaaatgtgaaatgatgagatggacaagaacatgacatacagatgacggcaaaaaaagcagaaaggtgctcttcgatgtttaaaaaaagggaaatttagctaagaaggaaagtaaccaaacacataagagacagaagagaaaaaggttatttaacagatgagtttaacatggagcttaacacatttaataaacaaacaaacaaatgagtaaaatctgtgcattccagggtgtggctggcatacagcagtgttgctcgcatacacagaaccatgacaaacttttcttctatgggttctctgggtggagtatttgatatagccacagtaaaaaacaatcataatccatttgctgccatgaccataaaaaggattcttaaatgaaaaagcatatataccctggtgacaaaccaccgtagatttacagtgtgagaaaatattcagcataaaatcctaactgtgtctttgtgtaagcagcacctatacaataaatcagcatagagcccagctctgccatgactctatgtaattacacatattaattacatgtttaatcacatatattaataacacccagtctataattacaatgtattcatgtaaacctaatcaaggaaaactagaggatttgcataaaacttgtaatgaaaaatataacgactacactaacaagatagggagatgaatgcatgtctgtgacaaactgtttgtgtcaagaagaacagaaagtgattctctttcctgaacattatttcaggcccatttaacacaatctgtaccactcaatgaatgtgcagtaccctacacacatcaaatcagatttggataatgttcctgacttcagataaaatttcattactatatttagttatggaatgataggaaaggcataaatttttaaacttaataaaaactggaaatatgttaagaattaggagagccttactacaatctgccacatgaaatctaaacagcaaaagaaggcctacccagtagggaccctgtagagtctctgactgaatttcacccctaaaataaacaactaagaaaaaagtacaattctttgtggccaaagaaagtggaaattctattttatttttttttattatttatttttttgagatggagtttcgctcttgttgcccaggttggagtgcaatggcacaatctcagttatcaacgatttggggcctctaatttcaaataccctcactggtaagctggaactccctaagtcagtggttttatttctccaaataggaccagagtttgataaaaacaaatacaaagtaaattaaaacacaggaaaggctttgaactcaaataacttaagactgaaattcccttcattctaattgcctggtttttatgaagcacctcttgacaagactaaaaacagaaatttttacaaaaccactaataacagacttcaagatttttttttacacataaagcttgaaaatatgctagttcactcttagcaatatatgctttttattctcaaaactaagttgatgtgagaaagcatagaaacagctttataatgcgaacttaagcaattaaaaaatgaatcctgaatctgcttttataaacagctttatgaagcaaatttaagtattttaaaaaattattttgaatctgcttttgagaacagaatttcactctgttgcccaggttggagtgcagtggcacaatcatggctcactgcaacctctacctccctggtctcaggtgatccttccacctcaacctcccaagtagctgggactagaggcaagcaccaccatgcccagctaattttttaaaatttttttagagataggatcttgctatgttgcccaggctagccttgactagcctggtactcgggctcaagtgaaactctcagcctcctgaagtgttgggattacaggcgtgagccactgtgcacagcccctgaatctgctttttaaaaatgattcaaaattgcttgtctatatgaaggaaaacaatgcaatcttccaaccaattctaaaataaggaacttagtataagacaaattttagcagtaagactgtacttctctctttccctgagagataataatccacaggagggctgtgccacttttgtgccgactacctcactggagttacaaatgcaatgtggttgtcaatccagtgaggtctctaatcatttaccattaatctatcctaagccaatttaaaactacaggtgttttacaagcatcaagggtctttccccactaaagacagctaataaacagccacgcaccataatggaagaatgcaatattttccacaagaaatgatatcatttatcttttccaaaattttattcacacctcaattactgttcatctgtcaccatcactcctaaaacctgaagcaagtaatcaactgaaagataaattctcactgcaatttcactgtatttacacatgagaaaagacatttaaaagtaccatttcattcagccattaaattatttactttcaggtttcttcgtaaaaacctaaagaaatatctggtttatttacccacaggagtggggctgggaataaagagacacaggagggaagagagggtgtgcataagaagcatttaatacacttaaatggttagaagacctaaacatatttgctcaaaaatattattagttttttatatatcattcaacagcaaacttaggtttttccttcaacaaatatttctgagattattacttcgttgacaacaacaacagaagacttaacattctcatgccaacttaaagcagttttcttcacatttccttcttctgcaaaacccctataatattcataataattcttaaacaaaaatcaaatcacaataactcctaacatttattgagtgcttactatgtgtctggcactgttctagacactttgtacattaaaatcttgaaagaactctatgaggaagatatgataactgtctccattatcaacacaagaaaattctagcatggagagattacaagacttgaaacatgatcacacaggtagtaaagggtgaagacaggacaaaatcccagggagtgtggctccagctcagttcttttttttttttttctctgagacagagtcttgctctgtcgcccaggctggaatgcagtggtgcaatcttggctcactgcaacctctgcttccagggtttaagtgattctcctgcctcagcctgtggagtagctgggattacaggcacacgccaccatgcccagctaatttttgtatttttagtagaaatggggtttcaccatgttggccaggctggcctcaaactcctggcttcatgatccacccgcctcggactcccaaagtgctgggattacaggtgtgagccaccacacccggctccagttcagttcttaaccattatgctaaaattaatctcaagctgatttccaccatcagtctcatgatatcacactcataaggaataattccttatgcaaatactgcttaaataagtatatacacacacacacaaagcatacaattgttaatctgttaactaaggcaaatgctgccttaaaatgaagccctcttctagaaccatttgcttattttttgttacatcaattatatttagcccaatggacttttattttcatgaaagtagataattgcggagtagaaaaaaaacacccaacacttcaactatgtaaagaacatcaatatgatatttttactaattcagggagccctagttatcttaatattcatcatttaagcccccatagttagaaggccaaagtcatcataaaagtaacacagaaaccacttaaaaaattaatccccacccaaattaacacaacagtctatctctgtccacagagttatattctttgtaggtctctggacgattctataccacatatacaaagaaaacagactgcaatatagaagtgcaactcttaaaaaaaaataataaataataaatttgtaaatctcatcaaaggaacagaatttggtaaaatcaatgaaagtgatgataagacagcttgaataacaagccaaatcatgagccaaagagtttctagtaaagttagaccaaagaaccactagaacggaaaagtcacaagaataaattcaggctaaacacttacaataaagggaaggacactgtggcatttgtcatccaacttgtcagaaaaattgccctggaaaacaatcaacacttcattcttgctcattctaagaattggcacatagatgcaattatagtttaaatgttgttaaatataaaaggtattcctcattattagtttcacttccacaatgaagttcaagcaaatctctttttctctatttactgtgaaattccggtgcctgatttaagtagattcacttaggtgaccttttctaggcatcaattatcccctaataaggaggatcagcattttaaaaggatctacgactttagacttggatgaggaagaactagcatatatatcttctagcagagtggtctaatgagggaagagttttgagcttgaaaaattggtttcaaatcccagttaaaatatggagtggttgcagtgactttgggaaaatctcttaacctctgacagttttcatacctggaaagtgaactattccctacctcatagtactattatgagataacacatgagagcaaacgaagtaacacatatgagagcaatttctaatctataaatggctaaccaaatgttggctattcttaaattcatcaccctttctctatataactgacagttaatttcaccaagtggtcatcattcatatattatatactgattatttgttgcacctgttagatcctatggccggtagctaaaacctaaaaaaagagatgttttaaagagtctgcttgagttacaagttttcaaaagttaagagaagacatatgcaaggcaaataaggaatatgacagaacagttataaagacaaggaacgattaaaatttttaaaaagactgattctggacaggcccagtggctcacatctgtaatcccagcactttgggaggccaaggcacgtggatcacctgaggtcaggagttcgagaccagcctggccaacatgcaaaacccagtctctattaaaaatacaacatttagccagacatggtgatgtgcacctgtagttccagctactcaaggggctgaggcaggagaatcacttgaacctgggaggcagagctgagattgctccactgcactccagctcaggcaacagagtgagactgtctccaaaaaaaaaaaaaaaaaaaaaaaaaaaaagactttgattctaagtgggataatcaaagtagccttcctggaagaagctgcatgaaagaaaaggccaaggtgatcttagggtagaaagaccttatatctgcctcactgtagttggtgcatcctactccttttgtgttcatacaaaaggaaaaccgaaaacaaacaatggtaagaaaacaccacaaggcttgtgaaaacttcaattcattattatctactgtaccagctgccatgtctggcatgcagtttaaatactgtagtggcatagctcttccgctgataatgccaagtcaaaccattaatatacaactccacagaagacactgacagaaaattttagctccaggtcatgcatttatgaaaagataatcaaagacatatttttgtgaaaagcaggaatcatattcaaagctgagtatctttggccaattgtccgctgctttcttatattaaatctccagagtgaaaaaaatatgaaacaatatatttctattttagcccatcagaatcactaaaccctgatatgaagtgaactgttcagattgtaaacatggaatgaataaatctgctgggtaacagtaaactcaagtagcacaaatcacatctagtattcttgtagactctccttatcagtatttaagcagcacagacagaacaagcacagataaagcacactacactatttaaattcatctggcatcctggtatcctagtattctgtcctacacaaacctagatggcttattttcagactcagcatacagtcacagtactaacttgttgagtttaccatccaagactgtagcctcaaacccccttcatgctggtcagttgtaaggattaaatacacacacacacacacacacacacacacacacacacagatagatattgtactcacagtgtaaaaactcaggcatgcaacaagacatgaccagctagtaaaaaaggaaaattagaaaatgctctaaataatattttgactttttcaaactattgatataattattgtttagactgaatcgaatcagccacagggcactgaatttaattgacagtagagattaaaaagagggaacagtctctaaaccaatacagtaaaagcattttcagtaagttgaggggcttttgagatgaatatttattaaatgtaaacagagattttatgataattcaatatggaagtataggtgtgtttaagaaacacaggagaggaggagacatttaggaagaaatgtgggccaatatatacctttctttaaccatccaagggaaaatagatttcaactcacttgaaaactgtctggctggggactacacaatttcccacagtagctcattaaactgttatatcaccttgacagtcaattcctgcaaagttaaatgcaaatcaaaacatttttaattgaatcatgcattacatgactaagggagctcaccgtttacgggaaacttgtggtgaatctttacaaactaattcatgactatgctaaagtacctaactaagtagtcctccttatcctcagtggataacttccaagacccccagtggatgcctgaaactccggatataccaaactccatatatcctacgtcttttcctatacatcatacctaagataaagcttaacttacaaatgaggcacaataagagactgacaacaataaccaatcataaaacagaataagtaaaatgaaggtgacttgagcataagcactgaaatacctcacagtcaacttcataaccaagacggctagtgagagaccaccaggcaggtggcgtacacggtgtggagatgctggacaaggggatgattcacaacccagtgggacagagtgggatggcttgagatttcattatgctcctcagaacagcgagccatttaaaatttataaattgtttatttctggaattttctatttaatctttttggatcatgtttgccatgggtaactgaaaccaacaaaagtgaaaccatgggcaagcgggggctactgcagatcatgcctgatagatttaattcaaattttaacatacaagtcaccctaaagcaaacgacacctgtagtgaagatgcatttatccttattatattatagtgtggatctgattacctcacattatggtttgggtctgactatataacatctaattcagatgcggataagaagcaatgttaatgaataacaaaataattcaacttgacgtgaagaaaaattttgctctccttcctcttttaccttttgcacattaaaagatgtctttcttcaacaaagtgtgatcttacagtaagagagagaacatttgccttgcccatcctggaatgcaaaagtcacttgtggctcaatggttatgctctatatattttgataatccgaaaaagaaaatgaaacttctttaatagtatagcccgagggtataaggggagtggaacacgcaagtggttaagattattacacttaacaagaacggccagtctactagtctactgcttcatgtaacctatttacagtcaagatggctatatttagaaaaatcctatagtacatgagaactgagagataaatatcaaactactacccttacaggcttccaaaaaaattctattagcctcaggaaagcataagccattgggggtttgcttcagctaagctctacagcagaatctggaccagaaatactatttcacattatatatttaaaaaaaattcgtgctgcaaattgcattcagtgtaacactttaaactgttccatatttgaggtcagagtttatacatattaatgtcaaagagcctatagcccaaaccccaatgtttgtcactacctgaaaaattaaattaaatataccacattaaaggaccaaccaaatcctatctccattacacccaagccaagagtgaggccttgacaatagaattgaagagattagggtttaatttacacagaatgactgcaataaaacaatgcaaatgtgagactttacaagagcaagtacttaaagcacgtcaagacaaatatttacataaactatataacatcatagtctactaaagataaaagattcaagagcccattgaatcataatttagaatacaaatattacagaagaaaggaaaaggaatctgaactgttaattgggtcccataaatgaatgcacactgaaggtttttttgaagacaggtgatgatcaataaggggagaaaatgtaaatgtattcacaaaaactaaaatgggtctctaattttgctatgctctgctacagaagcatatgctacttcccagaaagaccacttagaagtttttatacttagaatttccttcctctttcaacccatctttatgctgttcacaattacacagtttttgcttttctctagttcctaataacttctaaccatttgcttctaatagactgcccctttgtttgggtcacctctccacattcccttctcacaacagtgttcaatccatcatactctgaagtacacaagtaactttagaaaacatttcttccttttcccctcttcttcaatcccagtagaagattctttaaaaatccaaaaagtttgtttgtgacccttttgatgcccctcccctgcctttaagaaacacaccataaagagacataatccttttgagtctttaagttcaaactacatttaacaattattacaaattacaattatcagatatttccagtttgcaaaagtctcccagttggtgaaagctctgttttcaggttcataaagccaataccccatcttgtcttttaaagtaggaaattaactgaattctctaaagtattaagaaatctttgaccgtgaacccgaaaatgagcccctgagactcaataatctgattagttaaactgggtgaacacgatgacagaatggaccttaaatgggaaaatccagagttgggaacagatgctaaaatcaggaagtggctgatgtccaaacccaaagtcagtggcctttctacagaaattaatcaacgggacacatttttgtccttagccactttcatcttgactgtgcccaagctctgaatgtttatctgcataatgagttgatttcttgatcaataaattcagttcgagccttctcatgacctggtccagaacctcatgctctcctccattgttaacttgagacacatgtgagattatttctcaaccaggtgtgtatacctggggtgctttttaaaatatgcacatgcccagggtcccacaactactgaattagactctccaggcaaaagcccctagaagcaggcatatttcttaagctccttttctccttaagctcctctgaaacataccactggttaagaaccaatgacttagaatttagaacaatgtgtatagtgtaacaaggaaagacgtgtccacacaggagatcaccacacaagcaaggggacaagttatagcagaaaacttggaattgacttgctcctgatcattgtgaacttcctcctgctcctcagctggttaaaagctgtcagccaaagctggcatcccggggtgtcacaggtgtattgataattgactcagtctgttttgtttacaattttctgcccaacaaattgcatgtttctgcagatgtctaacaaattcaggacatttaattcctcagctgccaccatcctgctgtttccaccctcctcatccattggttacgatggtgtccaaagacacattcaccagcattagaaaaggtcattaaaaagctcttacaaccatctgtacccagatggacaggtctccagccaaaacaggagaggttcctacttcaaagaggcccagaggacctgactacatgcagtgccgcagttggttttttaattattgtttgtgggtcctgaattatttacatttgagctgtaaatcttaatgacccatgccgtgatcttcttggcttactgatgatgaacaaagccaaggctgtttcgttctcctgattcaatgctgctgtaggatgagggccaaagaaaagtgcatcttcctaaatcgtcttacactggttcttggaacaaatcattcttgcttggatccttggctaggtcatttgccatacacttaccagttaattccctactgctttcatactctatcatccagtggagcattttctatgcaaatgactcacttgtgcagggatgttttttaatgcctttttccttgacctttgcattgcatacagaaaaaatttaacttaatgttaaaacaaactgcaattattttctacagtgggtctataacatgttgcacattattcaatttggtggcaccagctttcagaacaaagggtttgaagaccagaatgcgccctggcaaagtttggcaagatctttgaaactaaaaccaaaagcacagaaacagagagtcaaacggccttgctaaaacaatcttgcccagagaaatcaaagcaagccagtgtttcagctaaccttaaccaaatgaatgagggaagaaatgattcttttgcttacaactacttgacaagtgggagatgtctctcttaactactgaccttcaaagcactaggaaaaatgaattctgaattctcgacctgtcgcatctcaacacagcagctcagccacaccttttcacagtagctgcagtgcttcactacactatttctgcctgcccttcagaactcaaagcagacgcgctcaccagcggtgccaaactgttagactcatcaagtttatgaacactgcatacaaaatgcaaacattttcttccatttgggcaaacattggcacaggaaactttctttccaatgttaacagcagggagcttaaataaaagttcagtttctagaagggtgggggagagaaaaagctaattctaaaaatatgtcatcagcagcatgccattgccagagaaaattgtacatgtttctctcaagcacagttcactcaaatgaacttgacagctttggagatcacttaaaagaaaggaaatttgttgcatgaggcctgccagatataaaagggatcacgtctcaacagataagacttgatagattcccatcttaaatatttcggtacgatgattacataaactcaaaattagggctttgtcacagatccgcacacaggcttatgccctaagggtatgcttccagcccattcatgggacttgtccttgaatctagcaattaactttaaaatcttgctactgtcatcaggtccccagaaaataaattaaaggacatctgagcaaacaagtaaaattacgcagctgaacttaaaatcagcagcttgcttcttgtccacaggtgtgtccaggcaagataaacgagtttaactgggttacaaattacaggtgtcagtgccttctctcaaatccaccaaatgctggaaaatgccgctctcagacagactatttcctaaaaggggactattcaggatagttttccatttaaacataatactcaagttgctgaaaaaatactgtaaaaatcaggtgtgaatatgttcgtttgacccgaagctgcagctctcaaacatctgattaaaaggaaaaacaggcaggcattacaactccccagaaagccacaaaaataaaaggctccatcttcaagaagatgatctccaattacaacactatgctggtttgaagaaatgcctgatgcagcggtgagctgtaacataccaatcagaaagctttcccatctcaacagggacaacatggccactaaactaccaagtcagttgtagaagctgaacacatctatttgttatctcatcctcttagccataacctacatttctggatcctggtctaaattgaatagacccttttacaagtgcaactctttggaacagcacagatagttcgctgtgccctttgaaaacataagagaaaaactataagctgatctttaacattaaatatttaatgtgtttttaacacatcagtcctttcgatttaattctagacttgatgcacctgtcaggaaactgactgctatgattttattgaaactgtacatttttctgacactcagaaacggaagattttcaagattctgtttgtcagaaaaccccaagcgaagttcagtttaactgtttttaaaatatatacttggaaaacactttctcctacaacaaaaaatgaaaagaaagttactgaacacagtaaaatataaacctagaaaacgctacggtctgtttttttttttaatgtttgtgcatttttaatagagcaaagacaaaagtcgaggccttagtgccaactggataaaatttaaatgagttttgatttacatacccatcaaccttcaacattcgagtgaacacctgaagaggacaattgtaatgttagtttgatgctggaaatcctacatttccattaagtgacaaaatcacagaacatgcatacatgatgtgaccgtatttacaaaccacagtaattttgttatttgagtttcccccctccagaaagataatcctcaactaagtgcttttaacattcatctctatggcttgtacttgccccaggagaaacttaaaacacccgttacttaacaagaagaaatggaaaagaaccatttagacctaacaaaacccagaactaactttctccttactatgcatggtgacagagaaagctgcaaagagggcacataatttacattaatacattataagcatttccaggaggggcaacaattttaaaaatacactgttatctatccccccaccttttttaaatttgaaagagaatatgctttctttatccttgcatcatagttcttattttatcaagagtctgatggtaacctcactttgaaccttattaggtaatattgatttaagtagaggggaactcttgaagtttttactcatctgaaatgcagaacacatacatgttttaccaaaaggtttactatgcatattaatcttttatgcattttatttctccaagcgtgaaaagaaacaagttgaagtaatagaggttgccaggtgttggtggcacccattccactgtaatgacagccatgacttaaggttttgtctcgctctactcttcctatgaattgcaaatcttcaggttgccacagcaactctatatactgacaggtaagcttcaggaagcatcctggtcatcgtttccatcttgtttgctctgcctcatagcacttcaaactccctgttgaatgggagtaccaggggatggttccccttattctagtgcactgtccagttgcagcaattaatcattcctgcttcttgagctgacatatcgaggtggggaaacgacatcctaaatgagcagagctgattacctgggaaagcaattcttcaagatagcacagctaactaatagctccatctgctacacataaacacattccaaagccccagaagtaacgtcagaatacagctaacagagtcgggtcctgtatgccagatttctgtgtgtcatcacaggtctctgacaagcacagaaagtacttgaacttttcttcatctctaggataacaggtgctatatcatgttaggatcacaggccacccacagaggatattttggtagaattctcagtttgaccttgttgtttttaatgtagtgaagttagacttccatatgaagctacatatactatacataaagaagtagtaagacaaacctgtaggaaaacacacttttctttttttgttgttttgttttttgggtttttttgagatggagtctcgcactgtctcccaggctggagtgcagtggcgagatctctgttcactgcaacctctgcctcccaagttcaacaattctccagcctcagcctcccaagtatctgagattacagatgtgcaccaccatgcccagctaatttttgcatttttgtagagagggggtttcgacatgttggccaggcttgttttgaactcctgacctcaaatgatctgcccacctcggcctcccaaagtgctgggatttcaggcatgagctaccacgcccagccagaaaacacacttttctatatatacaaacaacaacaacaacaaaacccatgatccagtaaggataagaagattttctattcccatcaaaatatgcatcagtatatagtataaaatatgtgcagattgttttaatgtgactagacaaaaagagaacctttaaagatcatgacaatgcaccccgattctgtaaattaaacaaacttaagaagactgtggttagaattcaataagctcagcagataaagacaatttggctacaagaaacagggccgtactaagctattattatagatgaaacgataaatggctccctgaatgtttttaaaaatctaaataactggctgcttcttaagtcaccactacagattctgtccgctcttttattaataagtctttgataatataaatcaaactctaacatctcaatgttgagtgcttaaggaggctgcgagtttctattttcctaaccaaagtattgccattttacagtagcagcatttaacagtgcttctgtatcaaatgagaacaggctccagttctttccacattagctgtgattttaataacatgccaagccaaacaggctagcgtaataagtttcattgcacccacttcaacaacagataagcgcctcattttcatacagtttccacttgttgctaggtaaccgcatcgtaacgagacatctctaggcattatgcagaatgcatcctcttcacccaaatttaatgtgctttgggcattaaatactgttattttaactacacctatcactcaaacagtttaagctttgggttagattgcaacataggtttgtgggattgttgcttctgaggggattttgatgtgcggagtttctaaaagataagccacaataatatgtacctctcttccaaacccactgcattatccaatgaattaatagcttgacacttcatagaaagacaaagtaaaccctctcaaaagatgtccacactatgccctcttaacagtagacaatgtcaattaaaaacttccttactgctttacgtgaccatgaagggaactttgtaagcaggggtctgtgtggagttggccttcacctgtgggcttcaaacagaaaccctttaactaggcgcatctaggccaaagcgggaaccccatctgtcagccaaacaaaccagctttctgctggaggaagggaacgctctgcgggaacagatgcagcccgacctaagacactgaaggactcaggtgacaaggaggcaggagggctacctgcaggaaaggcagcagacactgacattttaaaaagaaaataaatcttagcagcagcaccaggcatctcccaaacacgaattttcttttgagcttcaggaatgttttatcctacatgattagtggatgctagaaaaatgttatatcgcctcttgccagtgggttaaaatgatctctctcacagatgatataaaattgaagaaactaattacaattagtagtagtaacaagacacaggaccagactctgacccccggcccctttttcacagagacttttgatttcagtcgcttccatgtcacccagagtagggctgccccatctcttcagagggtaggggaagtggggtgcacactgtagcttgaccactggccttaactaagtcttagcctgtaaagaaagcctttccccttttatttttacccctgtgctctgagaagcaagagttcaaaggattttgcctccagatcctcttgtaggtgtacttagcgcagaaacacctgtggctggagaatcaccctttactctctttccgctaagacaaggtcactcactgcatcctctgctgcaccagttgagtttcatccataatactctcttcttcacccaccctcccctgcttccccctttaccccctctgggcccctccacagcttggatggtttagctcattttggttctttttaaaatttggataatttccgttaaaatgacaggactgggtctctgccattcacagggatgaactaagatgaagcaggaagaggcatgtgatgggtaagacaagagccagggacaggttgctgtgtttcctggcatgtatattaacaaatttcacttaatctgttctaaaactccatgaaaggtgcagataggaatgccacaggaatacaggaggatataatgaaacgatctttagttttgttccataggagaacattacttggttcaactctgttcattaaaaaaagcaaaaacctagttcccgaaacaaagtttaaaatgaccagcagccaagcatagcagatataaattaaaatttacaatgtgcaccctctatggcccagcaatgccatttctgggtgtgtatcctaaagaaactctcacacatgtgcacatggagacacgcagaagaatcttcactgaagaacagtttacatgaggaaaaatcttcaaacaacccatatgtctatcaattggggaacagctaaacaaacagaggtatatgtgtgctgaagaaaaaacaaggcagcatttaaatggaacaagcaaaatcagcacgtagcaacatggccaggcttctaggacactgctggctgaagacagcaggtgtagaatgatgaggacagaatgatactacgtatgctgtcccatagggtttctatggattttacgtttatgcctctatctagaagtagagatgatagatagatggatagatgatagatgacagataagatgatagatatgggggcaaacatagaagaatacagaagttagctaacatggataaggggtcatcagtggagactttagcattatctaaaacattttgtaaaggggaatatattcatgtattaatcgacaaacagaaattaaagaaaaagaaaatatattaataatgaagtacaatgtaattaaagggccaggcacggtggctcacgcctgtaatcccagcactttgggaggcctaggtgggtggatcacaaggtcaggaaataaagaccatcctggctaacacgtgaaagcccatctctactaaaaatacaaaaacttagccaggcgtggtggcacacgcctgcagtcccagctgctccagaggctaaggtaagagaatccttaagcccatgaggcggagcttgcagtgaatcaagatcatgccactgcactccagcctgggcgacagagcaagactccatctcaaaaaaaaaaaaaaaaaaaaaaaaaagaatgtaattaaaggggatgtccacaactaaagaaaatatgtctgagtcttccaaatgttggcaaagggctattagatgaacctgttctacctcctccaaaagagataattttgaaaagcattgcaaagacaaaggtacaaatatttatgaaaaaacgtatcattagattgtaatcttatataggtttaaaatatctagacatttctgggttgctatctagatatttatgggttcctttagaaaaaagtcaactttaccaatgtaactaccctactaccatgtggcaatacatccactaaatggaaaaataataataaaatcataattcttataatgccctcaggataattggccatgggaggaaatatataaatgggactcatttatataaaaaagaattcattaagaaaggcaagagtccttgcatctggtgaatttttttttaagagtttggaatgatgcctagaagtcatcagatttgttgctcatgaacccccatctgtcatagcttgcatctaaactatatatagctcttattccccaaatcaatatgttgtgtgttcatgtaacctagcatccagtctagaagccttgcaattgtctataagctcctcaattcttattttcactatttcttgccttgttataattcttaatataccactgacagaatgtagagatatcattttaaaggtttcactcaataaagcttagctatagagaaaaaaaactagcagtgtgtgtgtgcgtgtgtgtgtgtgtgtgtacgtgtgtgcgcatatgagcagactaggaaatccagaaaggataaaattataaaacatcgtactatgttgcaataaaaaggttactgcctcaaaggatttcacaggaaaatattttggacaagatagtttcagtaacatctcacgtttgaggcccagtacgtggcaagcccaactctccagagtgccagagaacctacaagggagtatctaagtcactcaaatgtcttggttccatgtaagtgctactgaagtcatgggaaaggatgacgagctgtcaccatttactctattaacatacttttcacacacttctaataatcttggttaccttgatttccaaactacaataaaatcaaaataaatttttaaaaagggaaaaagcagagagcaaagaaacagaaaaaaatgatttattaaaaattgctgagaactaaaaaaaatagcactctctgaatgcagaatgaacaaaacaacaaacccatataacagtctatatgcaacatatattattattctaaaagatcctggctgggcgcggtggctcatgcctgtaatcccagcactttggcaggctgaggcgggtggggatcccctgagctcgagacgagtctgaacaacacagtgaaaccccatttctactacaaaaatacaaaaaattatctgggcgttgcggtgggcacctgtaatcccaactactcaggaggctgaggcaggagaattgcttgagtctgggaagccgaggttgagttgagatcgtgccattgcgctccagcctgggcacaagagcagaaaaaaaaaaaaaaatagaagccgaagtcatttatttaagtaacattgaaatcaaacattgtttttcaaaggcagagaattgtgtattatattttagaataattttcttcaaacagtatgcactaagctctgctgagctctactgagctaacaatgccatgaggttacaaaaaataataaaaaattagaagtagataatgtgattttaggtggtcctagtaatagtagtgtccaaagcagggatgtccatgagaaaactcagtgtggtttgttccctgcttacatcccccagacccggagcagtgtctggcatgtactcctcttgaaaggatgagtgttacaaataagatgagggcgtgaggggggatgaaatttatgtatcagcaaactggaaaaagaaatgaacccaggatttctccacattctacaatcctatagtgcaaattaaatgtcaaaaaaaaaatcataccaaatagggtaacctttggaaaaataacttgtaaggaaccccgcaaatgaaacattatgaaaagaaggtaatgtcaagtaaatttagaaagaggagaagatacaaaaaagtaatgtctttaaatgcatgacttattcataaggctctatagcttccacatcttgtctcttcactttctcattctcctccagccatttccctccagctaaaggtggaggaactatcctatagagatagctaacgctgggcgtttagagatcctgacaatctttatttatttaagatttacctcaaaacttcatttgttactttgaaaggttttcttcctataatgtgtttcaaaaataaattccatcaacattaaatcacatcttcttgaattataaacctatcaagcttggagaattagccttaagctgccaacatcaaagcaaaagagtcctgccttagtgagaaccacctacctgatttatagctctgtccactgcattcagaatcaggctaagtaaaaaacaaaggggttatcaaatttcagtaattaatatgagtaaacatgagttgagctaacaaaagcaattacttggagttttagtactattatctcaatatttcatgttttgcctttttcaatggaaagcagagattaaaaatgaatgccgcaggaccagagatttggtcatttcattcaatagttaccatccacctgtatagcacggttgacagctaatttaatactctcctccagataaaataaattactctgacttagtttataaggaataaaagactctctagtattttaactcattttcgatatgagaaaaatcacttaaattttctgaattaaaatcgacagagaaggtaggaggcagcaaatgtttgtttccgatattgtctttacattttgctgatattgctggaaatattttagtttgatattatcttctggcttggaactgcttctttttgcacttcttattagagttgcaactgagtactttcaccaccttaattacattaaaaggagaaaaaagggtaagaactacaatgtccttcctaaatggcacaaaaaaagtaccagaaaaactggaaaacagattgacaactactgtaaaatatatgcaaagtttaactttgaagacgcaaaataaggattatttcgtgttatttaatgtcggtatgtcatttatatggcctcataactatattatccttatcttcttcttaacggcccatacccagcccatcaccaagcttgtagatttaacctcctaaataacacttttcaattccacctacctctccatgcctacgctcaaacccaccaccaccctaatacaagccactgttacctcttgtccagacagtagttctttgtacctgtctgcagccactcaagcccctctacaaggtaaccacagtgatttttttccagaaaacatctagggtcatgttacccctcatgaattgcttcagaccctcaaaggcttcttataactcttagaacaaggcccccagtccttcacacaacctgaagggctttaagcagtctgaaccttcctacctcttctctcctctctgcccagatctctgactccagctaatggctttctttcaattcctttaaggcaccctgttccctctggaaagttcttcctgtctttttcaacctggtcacaccagcccttcatatctcagctcaatcttcacttcctccacgaagccctccctggcctacctgatcagatcaaatgcttttggtgcatgatttcattgtaccatgggcttctcctccatgacacttgtatcatttacaattgtatatttgtgtgactgtttggttaataaatattataccatatatatatataaaaccatatatataatatatataataccatattttgagacagattcatgctctgtcaccagacaggagggcagtggcgtgatctcggctcactgcaacctctgcccctcctgagtttaagtgattctcccacctcagcctccctagtagctgggactacaggtgcacgccaccacacctggctaatttttgtatttttagtagagatggggtttcaccatgttggccaggatggtctcgatctcctgacctcatgatctgcctgcctaggcctcccaaagtgctgggattacaggcgtgagccaccacacccggccctaaatatatttaataactgatccctgaccataaggagcatgagggccaagtctgctttcgctcaccattgtccctttctccccatcccacaagtctttccctccccaatgcccagcatctagcacatactaaataaacaaaaatctcttgaattaatgaacttatgcattataattatccatgtgggatcagcattccttagtgttctatgaggtcaaggattctcccttttgcccacttggcatctcagcatctagcctacagcctggctgtagactgctgatcaataagtgtttaatgaacacctaagaataataaacagaattttttaaaatataaaagtagtagctctgcccatcacttggaataattaagaatttcaatatttgtattgctcaggagaatcaattacccaaacttcctgcacggttgttatatgagaagggatttattgaaatggtggttctgatagcctacgggtattacacatccacctacttaaaactgctccctttagacaaatgcaacatacccagctcacgcatgacaaacgaaaatctgtccacacaaatttgtatttaaacaagagtctatcggcttacaaagaaaaagaaattaacttaacttttatgcacttctgagagtttgttttcctctcggattcacagagcacagttactcaaatgatcaaggcctatcttcctagtcacaaccaggtgaacaaaaggaatgctcgtatttaaatagcattccaaatcatggttaccaacatccaacttgtcaagttcaagatccctttaatagatgtgtaagtcacaaagtcttaaaatacagccacacagctgtttggagttttggtggtgggggaagacacagaccacccccccacccaaacatcacacacacactatgagacttcctctgctgattgctgtacagtgacttttcttcttcttcttctacaaagccatgcagataatatttcaacaataaccacacatttctccctgtggtatagacacatacaaaatgcattaggaaaaatgccaataactgaaatgcttttctcagtagctctattcaagtgagtgtctcacaggtgccacagaagtgcacagctttctgaatttggttccaaagggagctcaaagtcaataagcctccttagctatcatccagcatgactaaatcactccaagggcaaacctttttgagttatgtgaccatttctttcagggagttttaccgaaaacggcatgccataaaccaatttaattcaaggtaacccaagctgctggatgaaaaggagcccaagaaaggaacagaaggaagcaaacgcacatgttttgagttacacaggatcctcaatcacatacagaaatgagcacaaacagaccaagaaggttcccaggacctatataaggtatcacttcaaatataatccccacttcccatattagaataaacttgccattatgttgggatttctgccttttaaagtggaagagctgaggaaattctttgcgaaagagcattacactgtgcaaacacgtcggctggttcaatgatgttcagaggacattttaggatgccttttatgttgttctcttgtgagccttggacaggaggacaagggaattctccactcagaaaatactcaattattttaataggattacattttagattgacaatgtttcaaatagccccctgaatttattaacctgccagcacttcaaataagtaattttaatgctaagatcttttaagtttatgtaaatgattggcagtaagtcaaaaaaatttcctctagtcttctgaaacatgacactctggccgtcaagtggaagttcatgagcttcatgagctcagtagtaaggactttcacactggcttccccatgtctatgacttgccacatttttaactgcatgagtttctctgatcttttatttttttatcactcctctttggttcccaaaagcatattctggcttgattaagacacaggttgattacaagatccaactgaaactctaacgaaggtatcatactctttggtccctaatgctttaatactacttcaccccaaccctccccttttgctacagacaaaacagtaatacatatataggacctaccatatgcaaggcaccaagctaagtgcagttaatcagccaactgacttacattgcccgacgctgactacacacctcacagcgtcagacagactgggttgaaatctagtctctgccatttattatgctatcttcaacaagtttcttaacccaccaggactggtttcttttataaaacagagatgagaacagttctcacttcatagaaatcttgtgaggactaagggagataatctgggtacagcccttaccccagcgtcagggtgtagtaggcattcagcaaggacttggtcaccatcagcccttcctgtggctggttttcacctctcccccttgccactcttcaggccactgagaattcgtaccgcagccccaaataaaatggaatgaactatactctctgtaggagttttcctggagagttgaattctgacaattgtatcagttctctaagtattttattttattattattattattatttttttttttttttgagacagagtctcactctgtcacccaggctagagcgcaatggtgcaatcttggctcaacacaacttccgcttcctgggttcaagcgattctcctgccttagcctccagagtagctgggattacaggcgtgtaccaccatgcccagctaattttagtatttttagtagagacagggtttctccatgttggccaagctggtcttgaactcctgacctcaggtgatccgcccacctcggcccccgaaagtgatgtgattacagacgtgagccactgtgcctggccctcttaggattattgtaaatgtttcactttctcacacagttactaccaaatttaattatgatatggtaaagcttccaattaagcaacaatatggcttagaaagcatagacagtaaagggtctggaactggggttggcaaactatggcctacaggtcaaagccagcccaaaagctaggaatggttttcacattttttaatgcttgatcaaaatcaaaagaataatatttcatgacacataaaaattatattaaattcaaattttcagtgtccataataaaagttgtattggggctgggcgtggtggctcactcctgtaatcccagcactttgggaggccgaggcaggcagatcacttgaggtcaggagttcgagaccagcctgaccaacatggtgaaaccccctctctactaaaaatacaaaaattagctgggcgtgacagctggtgcctatagtcccagctactcaggaggctgaggcagaagaagcgtttgaacctgggaggtggaggttgcagtgagccaagtgcaccactgcactctagcctgggccatagagtgagactccgtctcaaaaaataaataaaataaaataagttgtactggaacagagccaagcttttatgtatttcctatggctgtttttgcattacaacaaccgacctgagtgattttgctggagattatatggcctacaagacctaaaatatttactatctggccctttgaagaaaaagtttgccagtatctggcctagatcaatgttttttggcttggaaaaagcttagcacacgacggtaaacatctaagaaacctacaaaatctctgcaaaactacacatggtattacttgagtatctctacaaagacactctgcaagagagcttacactaacctacgccatggtgacaggggctttaattgacaaagataactactgttctattgcatcttactcactgacccacttcaccctgttaaaataaattagaatatataaatacacacatacatacatattccccacataaagtaatgctcactttatgtccaacatagaatgtaaagaagcaaaaggatcccaagttctccatttttttctaattctggtatcttttatagatttttatgtaagattttatttttatttaagaaaaatctagaggtttttccaaaagtgttcctgaaaacacaattcaccttcttgagtttctttgctgctttgctctcagataataattgcaattctcatattcaactccccctcctaatttactggattttgttttggggggacccacctggcattctcttcctgactctctgctctatgttccacgttcccttgtcatgaactgtgattcttttgtacgaaaatacagctgaggtaataacaattacaacaaaatatgtggtttactctgtccacttaattctcagtggacaggttagcttctctctcccatgatttggcaatttatgcacttagctatcaggagaatcaactaagagaatgagggcagacacatgcaaattcatcctctgttgtacctcaatggtatggtatgagagctgtgccttctatgtgtataagtttctgaaagggtggggctttgacatactaatctgcaatcctcttccacttgtaacatagtctggaatgcagcaatagtgtatttaatttttgttgaaaaaaggcatcttccagtggtcagtaaataaatgaaagctgctacagaaggtacttaatctgatttgaactctgttcattttactgatgaagctgacaagagtaaagtgaacaaagttctgtgaaaagcattggcaatacagataggaaagaacaacagaatccaaggaattctttttgtaagtgagtaaaacgtctgttagagaaatctgagcagcatcaagaattatatagactaatatacacaaaatccagcagagtaataagttctaagagaacttacatgcttggatgaaatgtttcttctcacttagagatatttctactacaaaagatagggtaatggtaagaaatgcaagacctgccccagaggtggaataaaaaactcttatcacattattgaatacataattctgagcttgttcaatcctttcttggtctgaaaaggaaaggctttttcttttcctgttttaaggagaaaacggggaagacagctgggcctagatagacaagacatgagtccaattctctctggacttaagaaactaacaccatttaaaattacacttccaaaccacatcagccaaaaactgccagttgtttccctctgattaatttgggatatttctacaaaaacaaatcagcgcaggaagacattttctcactatggcatgctatcctaatctcatccaaaagacattaggtaaccaacagtttcacagaagcaggagaaacgggaagataccaaagcgatgggcaaatcaacatcccttaaattatctttcatcacaaaacatttgactcccaaatcttcaccagaccaaaattaaaattccaaagttggactacagaggaactaaaaaaataacatgcttcttgctggtttgcttttcttcgtgaccattttcctaccacagattttatttattaccataaaaatgatacttgtaacaggaagttatggtgtagactttacacccagctcattatcaaggcagaggaaaggggagaatttgaggaagtgtttctattctcaaccaaaagaggtacatatgtaatagagaaagaactacaaaatcagggaaactcagctaacaatacgtagctttaaggctccacatgaaagaaaacagaactccaggagcaccgtgtaacgcctgattgctgagcgaatgtattttagcatactagttgtcacagcaagtcagtgggatttgaaagcacatttctgttttgacatctggcccataacaaaattactattgatctgttgtgagcttccagcaaaacagtataacctagtctcagaacaaagagtcatccactaaataacaggcaataatcatcctatatctgtgcctttagttcaaaatcaccactttgcttgtgttctgcttggtccattttgggataagcattctattcctgaatagggtttccagatctttttttatttttaatgaatcttaccagcccaggattaattctgtctttcagtagcctggtggcagcagcagtataatgctgacatctaccttgtgcgcacacttcggtttgctgctgattctggaaactgacaggacaagcattattttccaacagatgttctacaggcagtggaaggcaacgatgaaacaaatcagacagtcagagctgttcacagagctttgggaaatgtaaaaaaaaatagaagaaagaaaaaccattggcctcttgtctaacttattttcatagctctagaaaaatttataggcaagtgccactcacaaatgacacagctttcattaaaatgatcatttagaatttttagtaggctacattttctaatgatactaataaactgttagagaacttttacataatatggtttgatcaaaaaaaaaggtccatttatagaatgctttagttggatattgattatatgttgtcccaactggtaagtatccacctcatttcaggccttggccatatgcatcctcaaatatatcactgcctccttttcagaacaaagctatattaaccgagaagctatctgatggtttcttttgcctgcatcagtcaaaaaaaagacaaacaatatagatcaagtgcatctgttctctagactgcattgatttgttgcatatgtggttaaatcctgtcaagcaatcttaaaggtgaagcattatcatcagagaacccactctgggaggggtgcactgggtcttctacctgccacgcacagcagctacaaaacttcacccaaaccaaaaagacttttgaaacatgcgatctgagcccccagacctacttccagcaaagggcttttagtaaaatgatgtcataagtaaaggctaaccaggtatccattaccaccaaagagaaaactggcccaaaatgtaaaagggtaagtggaggcaaagataatattatggacatacagaagaaattcctgttcctaaacgtttcatgtcatggcatttcaagaagagcctagataggtgtccatctcagatggtttgggtatagtcttgactgcagggaggaggtatactagctatcccaccctgttttagcaactgttttattacttcaaacatctttgcctcctagttcctctatcctgcccttgttggcccatgaatcaccaatttgcatagatgagtacactgaagcattgcaagtattttctcatggcctcaaaggacgtgtgctgttgacagactgcagctgaaaaggaccaattacttaactaatgttttgcagagatgtccacatgctgaccacagcaatattgaaggcataaattattatgcaaagtcatgaatgtacatccatttcagagttatctacgggaaattgtcaggtcgactttagtgacaaagcacagccaagtggtgttttgagagagagaatccataacactccagtagcacagaaggtcttttaataatatctgcactgagaacatgaacaattgctcatttttcctggtttattttttcccatcaaaacattggagtagggctcagaatttctaaagtaaatcagacttttaataaattctgttatgcttttattatatgctaataaatttctttttaaaatctgttccctgaattaacagctccataaattcagctctacaagtggcagaaaccagaaagtacagcaaacatttatccaggatttgccagggcaggcttgatttcaaatattctacccgtttatactcataaattacttaaatgtcccagaaattcatatattttaatgtccaaactgtatctttaaaatttccatccacacatggtcttggcaaaaaattagttggcataatcatctttttggcattatcttttgtgctctaattttggctcagaatacataatcactgtatggatacgctaaacagcaaacatttcatctcctgacagaggctttccctatccttacttaccacacgtgataaactgtaattgtttcattgcctgtattcccactcgatgctaagctcttgaacagggatcctatctgtcttgtgaaccattatttcccaatctccagcattgtgcatagcacatgatagatggtcactaaatacttccggaaatatttgaatgagaaaatcaatcaaattcaaagaaagaaattataacctggagtttaccagatagatctcaaagtcattaaacaaatgcaataagatgctttactacttcagagataagaactgttcctcctcatatataagcattcatgtattaagtacacacagacagctaaggggagtttggaggaaacaccactgaatccacagagggaggcattagattcaacaggacccacaggccaccatttgaataatcacccaacttatccttgttcttgacattttccttctgagtatctgagaaaactgtggatactcagtcgctttggctttcattcatttttatttttatttttttaagatagggtctcactccattgcccacgctagcgtacactggcatgaacgtgagtcactgcagcctcaacctccttggctcaagcaatcctcccgccttggcctccagtgtagctgggaccacaggtgcacatcaccacacctaactaatttttttaatagtgtgtggagacgggacctcattatgtcacccaggctggtctcaaactcctgggttcaggtgatcctaccacctcttcttcaagtacagaaacctatgtcaagtttagttcaagattttatcaatcactgattttagcaatatggacatggtgttttttcttctgggaaaaaaaaaaaaagtaaaactaatgacgagggccaaaggagtgaagtcctgcctgctcatgcttgtacctataggcttagaaatcatatacatgctggctgagggcttctcccattccatgaaaagggtggggtgtgttgtatctcacagaaatgatgggacacaccaatgaaaatgatgactcaatagccttgaagttttaaccattcaaatacaaaatgtgtaaagtttgcagagatattgaatataagacaaacacagatttcaaaaacaaaaaaccagaatgctgtttcacctctacccaagacatttaataatgataactgtaactcctatgtggaactgcaaaaacactgaagaaaagattaagctcactgcttggaaacagtaggtggttttctatcatgaaataaagatacattgaggaatttttgtgtgagaaatttatcactatgctattaaatttgtgaatatgatcaaactttatagaaaatgagcaaggtactgacttactcacgccaatcacttggatgctacaggctaatatccagatagaaatatggactctgaaatcaatgagaagttgttctgggacacctctagccccttccgttattttacaattccccaaaccctgcatcaggcaactcttgacagccctgagagtttcaactgatcttaagttcaatggtcaatgtgtaatcaggcatcctaacagctatacctataggaaaaacaaacaagcaaaaacaaacaaaaaaaacccatgatagttctattttaagctgatgagaacaatacacattcaataatgtatattattgaggactgggcattgtactaggcacccaaaattctatgatgcattacgatctgatccctaccttcacagaattcagttcagcatggagccaagtgaacaccaaggaaatgtaatatggtatataaaaagtacagaaagataaaaggcatgtgctaagtggtgggagagagggccaggttgagtcaagggcatgcacagtcaaggatgtcacactagatggatggtgacaaacaaggattagaccctgggaagcaaggcaagggaccaatgagtgaacatcacagagaataataaatacaatcataatatatgaaaaagcattctaatattacagctacccaaaatgaaagggctcactctaaagctttgggatgttgtactatactgagtccaatccctaaggtcccttctaactctgcaattctatgactgaccaatcccaaatcccaacactccacccccaacaaaatgacacaagagaagttctcatttatgtcacaagcgaatagacagaaaatcatcatctctccatcagtgcaggtacattagccaaatccgagagctcttctcccattggaagacctaatgtagccttaaaagtagatacctaccacaaagaatgatttatgacagatcggcaattacgtgtgtttatttcattgagtttactcctcctatcactcctgggaaagaaactaggaaaaccatttgcaaactgctagggttttttgctgtttgccaagctagactatatattaatattcccagtaaagagcttgactaaaagtaactcttgatattataacaactcttacaaaaggctatttgctgcttctgaaacaggagactacagtcattaataaggataagcgcagctgttcagtccaccacccctgaggacaagatacatgatttaacaccttttacttaacaaggttcccagccaaaagaatccattttcatcagtatgtttataagcttacttgcatattctaatggcaacagtaccagatgacagttttataagtagatacaagagggtatcatttctcctctaagcatatgccaaggcatacatctgaagaaaatgttgccttattgtttataatgtacttcagtacctctttcattgaaaattaagtttattctgaagctaaagtcgagtaaatacaaatattcttgggctgggagccaaaggctcctgtgaattactaattaggtgaatgaaggggaaaggatttgaacaccaagggagaaaaaaaaatctgtacatagatctacacagctaatagacctcatccattaaccagcttctccaaaaccaaaacaaccgatcttctgaccatcattctcaccaccactctctgtgttaattatacatcaaaaataaatcagtgacattttttgataataaaagtaatggcagattgtacaataagcagaaagacccaaagctgtgtagcctggggagaaaaaagggcttggaacccagaagtcaatggttccaatcacagcattgcctctctctggagttcttaatatcattagtaacctttgatctcaatttctcccacctggaaaattcaaaggctacccactgcatgtaaaatttttctatatggaataaataaaactacacacataattgtaaagggttttagtgttctcagaagagactagacttcaatattgttaaataatttttaattacaaatagtcccaaaaggaaattttaaaaagcattgaatcagtcattcgaaaaacattttttgcatacccagtatgtgccaagcagtctgctaaatttgtggatgcaaagataactcagccaaatagaaaggtatccacagtaccaagatttcaaattactggggaacatgaagatgaagtccggcaaattacaacatgacctattagaagaacggacaaactgctatgggagcacgacttttggggatacccaactttttcagtatcactttaaggcaggagacaaaaggtggttggtcgggtctttttgtgtgtcctatatttctaataaatcacattctgaaatccaaattaacatagtctgtaatcaacattaggaccactaatataacttcagttggaattaaagaaatacggctccatgcaattctagtaatcaaaaaaaacataaaagaagaaaatgagtatagcttccagagaaaaccaaagtaaatcccaaccaacactcagcgataaaaagaaaaaaggaattcatttggaaaaatgcattccagaagaaatcagtaaagagttaataaagccttctgcaaacttaagagaaaaatatctctataaaaacgtacatgtaataaggctacagatcattggttagctgccagaaaaatgatggaatatggtatagtttacttatttctttttaatggctccaacattccacctgaaaaattggtcctggagctgtataattggggataaaaattaaatgacagtttccatttgtcatgatgaaagctgatcacttgtgttttttcatttatccacactgactaaagtggttccttacgtctaccaagccaatctttttccgaacagtgaaaataatgttgttactaaactaaagggagaaatggaatcatctgttggcatctgaacatacacttcattcaggttccatagttctctgttctgtatgtccacacgactagaggtaggggctagaggacaacttctgggaagtcaataatgtaatctgagactaggccattggtcccattttcttatttacaaatattgtgaaattaaatcgctaatttttcacattactagtagaaaatcaattcgcctctcttcctcatgtttaaaagtcagcttaaatagcaaaggtcagtaagcagattaggaacactagagggagaaatcaaccatagcttctacgtaaggaagatgggatgtacaaagctaaagtttgttgttgctgtgacatatttgcagggggcaggcacgtggaggggtgaggagaggctatgtgtgaagcacagtaggggactaatgactataacatagtgacaaacacagttttaatctcaaaacataaaaaatatgtgtttggcttttgctcatcctgatctcagaacgtatttggaagggggaaagcaattctcaaaaatgtatttaaatgactaaaaatagatttatgtcaacctgtcctgaagtatatgccttccctttcattctagactcaggctgatttgggtttgactgggttttcatcaataacctctgtctagtaaagtgtctcaaaactagagttgaactaagcaatataacatagcagtgataagcagtcggcttggggacagaccactacttccccacttacagctcaggaccgtgggccagttacttaactggctcgtgcctcagtttcttatatagacaatagaggtaatgagaaggctctgaatattaaagaaattagtaagtatgaattgcctggaataatgactagcacatagtaaatccataataatgttatactatcactattataccatgcaatcattgtttaaaaaaaaaaaatcaaagaaccgtgtagcccgaaagttactaacaagaaatttaaggggccaggttcagtggctcaggcctgtaattccagcactttgggagattgaggcgaatggattacctgaggccaggagtttgagaccagcctggtcaacatggcaacaccctgtctcaacaaaaaatttaaaaattagctgggcgtggtagtgtgcacctgtagtcccagctacttgagaggctgaggtagaagaatcacctgagcacgggaaggccgaggctgcagtgagccgagattgtgccaccgcactccagcctgggtgatgaagtgagacctgtcaaaaaagaaaaaacgagagagagaggtaatacaattataacaatgtactgctttaagacagaagaatatgtgcaatccaaacttatcaaatagataaactccagggtgattatttacataaaaagtatttactttataaagattcaacttggaaaggactttccttcagttcaaaagggtgatattactaagtgcctgttagatatctagtactaccagtaatttaaggatgactaagacagagtccctgccttcaaggagcttacaatttcatggggaataataatatctatcatttatagaacacctactatgtgctagcaagtgtacaaagtgctttacatattattatcattttccttactcctcatcagaatacaggggtcaggcattgttgttcttatttcacaaaggaaaaggctaagacacagaaaaataaattactcacctaaggcctcataactactaagttctgaggtgctaagattccaacccttttgggtctgagtccacagtcacattctcactagcacatcacactgccttccatttatttgtaatccagcaactacttgccagggacaggatcagcaactgaaggctcacgtgtttggaactgctgccaaaagatgttaaactagaaataggcactgagtgtttttaagatgagaggagctttataaaggccattcccctttatagattaaagaatggataaaagaactaagtcccagagaggttaagtaactcacccaaagtcaagtgataaaggagttctaaaagttatagtgtaaatcagtatgaaaatgacacttcttttacaaaaatttgaggtatgaatctattactcaaaagtgagataaacctatgtagcctaaaagggccactgctctttcgaaagagcaaggctgtaccctcagcctcgactaggagacaaccaagggttgcatgtcctggaggggtatccctgaggagagaagctaggttgagaaaaagtaacatttcaaataaaaaaccaggatccatcatcgtctgcccctaccctccagggaacccaatttgagacccctgggagctgccaaatgagcaaacaggtatgaatcctgaactgtaactgataataacacagctaaggtacagctagaaaaaaagaggtttcagggactccactaaagtaggtacaaactattcctttaagtttcagaatctgatatatggtacaaacataacaggtactcacctgcataactcccctcatctgtaggaccagctggaagtgaactaaataatgaataaatagtgatctctagtataatacctagacaagaacatatggcacaactgccagtttctagacttgttagtatctgtattccaaaaaggctgatggaaagacatgggccttagaaaatagcaaatctaattttgaaatgtgaacctgccatttattaagtatatgaccctgaacaagtcacttaatctctgtaagcttaaagaaatcttttcacctgtaaaatgggatatataatcccatttcactacttctagtctctttaggattaaaaaagcagcagcaaagacttctgtgcccatcatcagtttattgcctctcagcttcaaaatcaccctttttgtctgctctgtgaaaatggatctgggcccttcaaatgtttttcctttaccctcggacacaaggttaatctttatcagtagatggtgctggaggcactgaagcttctctagcatccatctacaggtacacacagaactgagcttctctagcatccatctccaggtacacacagattccccagtgcctggatcctgcagagcagagcagccaggagcaaacggtggctggtagctttgctggcaccctcctcagacaattttgtatcagagtgcctccaaagagacaccttctcatgaatggttttccccagcatattagagggtggaattccagcaagtttcacagcaccacagcaacttctctgccacagtgagccatagctgtgtcctctccaatactacctggatctcagcttgggaaaggtgttctttcttaggtgctctttcttagcacagggtaatggttgctcattagatctgctgtttctacattctttacaattctctttacttcttactagcaagtccctcattattccaataccttgttacagttaacgagtcacagtaagctttccctattcaaattactgtgtggttcctctctcgactgcacacagattaatacagttttctagaccagtgcctggcatacagtattccataaacagcacatatcataagaataactataaatgattgagtacctctcatccctattcttaaaaggcaattgtttccctttctcattctgttttgattagaatatgggcgtattttgactatcaaaattcctatatggtataagtagaatatgaataagttagggaaaagtgtgaataagttagttccaatagtttctgctataaatctgattagaaaaaaaatgagggctgcctcagaattaactgtctccttattcaacacacagcttagaaaattctttctgcaacttgcttgtctgacctaaagacaatgccacaatgtgtgaaaatgcctgctttttcttgccaaggatattcccaaaatgatctaaagaatcaaattgattaatatataaaacattaaaaaattaagtagtaaccattttttctcatttttcaactcataaactgcaatattttgaaaaattatagaaaacagaacatttcccagccaagaataacccattaatgtgtgttggggggtaggagggggtggggtggggtggagcgccactcccaagaaaagaaaaagaatggggttactagcaatatcacaaagtcaacatgtatttcctcctcttgcaaatgtaccagcttaattcttgggtaaaggagtataaaaatacattattgaaggtgtcatgtattattggcacatattgtgaaataaaattactataaaaatatagaagatctcaaatgtattaagtttctacttcaaattctttatttcaatcctcaggattattcttcccatgaaagaaaagctatcaccttagacacaatcccatgtcatctgtatttttacttctgtctgaaagtctcgcctaattaccaatttaacaaggagcagagaccaagagggaaaaaatatctcatcatcttttatgcaggcaccttgtccaatttcaagagctaacccccatcttaaaacgccccaaaatagatattgcaagccaccagcggaccccaacataaagcaagactcctcattaaaagttggaatggaacctgccaggtatgcctgcagggatgctcaacaatagcggtttatatcccatgcctttttcaacctagattaaattactgacaaaatggacagactacccaaaactgtgagcaatacattttgccaatgaaaataatgattgtgcttggtatagcacagatgctctctgctcaacttgtcagcattttcagctaagaggctcaatggtcttaccagacaaccctttccctgccaaaaccaataagccaccttcatttcttaagccccctcagggctttgaattactatccattttgcacttaaggtcagtcctgtaaaactgtgttttccccctagaagagtcataatcagaagcagctccagcctaacaccagcctacttaaaactcagatggagaaaattcaagaatatgtaagcttcttgtaattttcccctgtcagtttttcaaatttgcattcttaaaagttgcatctactgctttagaaggcaaggtgcatttcccgacaatgccaccgaaaatgctttcggtgttttatacgaaaacatgtatttccctaagccaatgtctaacagaggaatatttcaaaacagctaaactttatagttccaaacattctagagagttcaacagtctcattatatattatagtgacatacacatgtgcacacacatcccttaagtatgcattttgctagattttatttttcattttatgccagggaaaacacaattatgccatatctctttataggaaataaaacctttccaagaaaaacaaacctggccattttttttttcattcattcattccattcattcactcatggaataactcctcactctaaaaacctgctaaaaacgctgaatggaaaaaaagctgctttcacccctccctatgtctttccatacaacatgagaatcaggcatagtgattctgtttgacccagcaagttcaaccaccaaaaataaggtcctttgccttaaggaggggtgtgacaggtgctagtttcaagaaataactttcagccttcagtggaagatactgacaagagcaccaatcataaaatactggtccgcacaggcccatctttctgtttccttcacttgcatccaaatccaagtttccaggcccagtcactcctacttatctttctacttccaggcctcccacagtttttaacttcattcatagcctttattcctagttctaaaactgtgcttctatcttagtaatatggtaggaggaaacctgctaaatgcatccttgatgctgatgtgatctttccagttattgaacgtttcattgaattttacactatacaacttcaaatgcggaaagcagccaattcattttgttaactgttgttcagtatagatagccagctccataactatacactttgatttggtacatgagaaaacgtatttttcattacatcccttatcctcctaatgacatttccaaacaggattttaagaactgtgaagcagaaataaaattatgctcaagttccaaagtgatctcatggaatggaaaatggctatcattgccagtgagtattaacaggattcaaagcttgcaagtttctagttcagaaacatttctcaaataacgatcatctttcaaatgctccttacgttaccaatcacaacagaaattctataaaagaacttaagggactatggtgagatctttcccccacaaccccaattcctttatcctgtatccagagctcaccatcagctttggtgtacctccttcctttttaatcatcaatcaaggctaacatttcagttatctgaatttacacaaaaacctaaaggagccattacattgcttctgtaaagctcattctgtggtgacttttaaatagctttaagaataatctggaaataaaaatactgctgtagcaagttttatgtcttctacacacatatgctagagcaatttccttctcccagagatagaagggaggaaaatgtctaaacttcataataagcagccaattatagtcaactgtcatcttggttgtattaattatctgccttgcctaagttatcaagacctgaaagaagcctaacagccacttattttatattacgattgttccactatggaaagggctgtaatttttttgagggtctttctgcattgatacaggtatgtaagaattcagcacaatcccagggttttaccacgtgtagccatttgaagatacccgttaaagccacaaggctaatttccccttcttgattatcctacatttgctgagggctcacaaagtaggaggtcccaggcgaaaaaggacataggtagcaatttgtgcacaagtcctaaacttcagtaagttgtatgaaacaaaaacattatgacattattaaagtagcagcagcaactactgttattcattcaaacatcccctacagaccacttaacaggtatagtgtagtcattggcttcagtttaagacatgagcaatccccacagagattgttcttgaagtagagacaccatgaccatggaaatgggggaaacagttttccttgctaatttaggcatataagaggaggttcctaaccagcctgggcttctttcctaactacagggaaacaatcagaggagtcaatatgtataaaacaccggtggaattaggattacactcaggaaaccatcaaaagccagtcccctagagagtcctggaaagagtcaggagagcatctggggctggaggggaaaaaaaaaaactttttggaaatttcctcaaggcaagaatggaggacccaaagctggctgtaacttctggaagagaaaccgagggagaactattcaaggaatgaatatggattaacttacaagatatgtcctcccaggtctagaaggtactccatttacttgttaactatcttgaccacgttaatttcttttttaaaatttctaaggtttggcggggccagcggggtggggtggtggggtgggggggtgggggggctgggaatcatccacaaagacaagctcacttacacaagaaataaagtgaaaatcactggttttgacacccacttgttcagatgacccaagatttcctctgattatgtgaaccagacttttgttccagtctcctagcccagaacctataaaatccatttgaattacagctcaccaactgcactttaacccggaaactagaggtgaaagtcaagtgctttatctactcagacaagcagcttctccccagatcagaagcgttttaatgaaatgagacttaagtgaattgttgacataggcattaaaagttgtcatttaatatcaacagtatgtttgatttgtacacagttatgaaatgtcattcggaccagagagttatattgaggtttaccacattatagggatggatttccagagggaagtgagctgatctgtctcaaaataaaatgtgtttacattaacacttgggggaaacaggcagccctgcaaacatagatggagagataaaaataagaccagcacaaaactcaacttggaagaataatagaataaaatataatctctaggctctgtgcatatgtaatattttactatactttttttccaccttttaagagataaagtacaaagtttacattggtgagaaatatcacttctgggtaaaatctattatactttggtctccaaaataatttttaaggagaaagggtgggagtgattgacatggggatggaagaaaatactcaggaggtatcattgctttcttgaaagaaaagccaaacctataagcatgtaatgctttgcagtataaatatatataattagataaattttatctaactaaccaggtagataaaattacattactagttagtctaggtgtgatagaaacattctggcctcatagaaaaggaagcactcgaccaggtgcagtggctcatgcctacaatcctagcactttgggagactgaggcaggcagaccgcttgagcccaggggtatgagaccaacctaggcaacatgataaaactccatctctacaaaatttacaaaaattagtcgggtgtggtggtgcatgcctgtagtcttagctacttgggagatggattgcttgagcctgggagctcatggctgcagtgagccaagatcaaggctgcagtccagcttgagtgacaagagtgaaaccctatacccccctcgcccccaaaaaaaaccaaaaaaaaaaaacaagaaaagaaaagaaacagcagcacttatcacgggctatgtgccttgaactgttttctccagaagtggctatgagttaggccaaataacttacttgttgtcattgtttttgtttttgagacagagtcttgctctgtcacccaggctggagtgcagtgacaggatctcggctcactaaaacctccacctcccaggatcaagtgattctcctgcctcggcctccagagtagctggaactacaggcatgccccaacacacccagctaatttttgtatttttagtagacacggggttttaccatgttggccaggctgggctcaaactcttgagctcaagtgatctgcccacctcgccctcccaaaacttactttcttatcacaaatccaagtcaaagaggtagagcctcatcaagtatttcctgccatgctacaacctaaaaaatgaaatttaaacactgtaataattccttagtgtcaagattaactgactcagctaaacaagcactggcacttttgggaatggattcacttataagatatatccttctaggtctagaaggtcctccatttgctttatgccttatcatttgacatgagaatagagatgaaagagaagttcattcattggtcattttttctaaaatgttctttaaaaaaaaaataaaacaaaacaaaaaaaaaacaaagccttgcctcttcatggatttggaagcaaaattaacaaaggtctctcttttggagagtctaagtctaagcaattaaagttgactctaaggaaaacttgaagggagctcttgcagcataaaaaaaaagtgatgagcttttgtttacaacagatcttaattctttatctttcacttgaggaagctgtaaggtctttggcacttggctaaaaatagcagaagtaaaacaggtgacaaagatgaatagctcccagagacacaattcaaagcagaggaatttaagaaaaacttcagtagtgcctgcaaaagatactttcctgccaggtaaatcaaaatggaagtaaattcctcctcttgggacagaatcacaatttgccagacagacatttctctttcaacatttcatgtttactgtagggctaaatttttgaaaatacgttcatcctcttaaaagctggttttgctatagggtcaaaagagtttcattgtaatctcataaaatgtgaagatcctacatcatatcaagttccaaattctttgaaagctactggcaaaatggcaaaccaaatggacttaacatacatacctgctgtctctgactaaaggccaggattctcccatccatgggcaaggtcctatcttctcttggtgcagccaataaggctttggtctttccaagagttcattttaggtcaggcaaacaggatttggtcaaagatcaattcttcagtcaatttcatcctaaaagatgtgcctcgtacaggagcttatattgtatatctgtccatctatcttaagggacaagtgtggcaccctatcttctggtattttagaaagaaatcatttccctttctctcccagtttccttgccagcccataaaataagaactttcaccttcttggaagtgctggagaggaaatttctaaaccttccttcaatccataatgatagagtgaataacttctctaataggtgagactggaaaaagcctcaaaggagtggcagtgaatcctttctagactctttatcagatacattcttttcttttttcagattcttgttattaacatggcaagtccttgttggatctcatcagctactagcttgaggtttccttcgtttccaaccaattgcaaaatcaaaacagaaacttaaaagaccgcataaaagatgctttaaaaatcacgtgcaactcccactgaaaaattcatgtatttctttggatgtcttcagtgagttttgggaaaaaaagaaaaaaaagtggagggtggtggcaaaagtatctctaagaaaagaggtacttcaaaggcaaaaaaaaaatcatatatatatatagagagagagagaaatattggtctctggtagaaaatgcccatatatatctctaaatagtaatgtactaagaactcaaaatgtagatgaagcccctggaatgttcagtgacaattgcaactgtggaaaagattccagtagagtcaagtttcttaagaaattctctgaatatgccaggaaagtcacacatgttctgtggccagagtagccaacactcacacctgatgagccttgtccctaactaaacaaaacaactttaaaataacttccctacaaaaaacaaaaagagacagtcccttcaaaagctcctccccctaagaggaaagaacctgttaatttgctatgtggccaacatggtgaagtacttcacaaatcgctggttcattagcatttctatccacaactttgtattcaaagatcaagttgacagcagcgtgttgcgtgctctgcattcttatttggaaatgccaataactggcgggatccagaagcaactccagggttcaaataagttccctctgagaagtggagcctttcatgctgaacatcctacaactggcatagtggcacagttctaaagagcaaaaagaatggaagttgatgtcctgaggtgattagtttctctcctgagcacttaactttttaaaattaatgatggtaaaggagccataatcttaatagtttccagcaaggatccaacatgtttgaatcaagtatagtaaaacaaatgtgggcccttaaagataatacacccaaagatgcattattgccattaaaggagataaacagtaagaactgggtagatgaggcaattacttgcatacttaccagatatgaatatacataaaagtatgtgacttaaccattctgtaagacattttaaaagacactgatacaaaaaaaaaactgcatataaagtaaaattaggaggtaacatttagattctacatacttgatagggtcagggaggagaataactacactttaatttttttttaattacagtcacaagtgacatatatacagaggctaaagtacaacctcaatttgattttatataattttatcttaagtcagatgagtttgagtaaaaatgtttaagtaaaaagaacattataaaagtctcattaaattatcattaaaggcttagcacttgtatatatagataagacataggactagttgaatgttacagtagaaagagcactggataggaaatgcaaaaaacctggactttaatcctggctcttccactagctgtgtgattttgggtaaatcactaaaatcccttataaaatagagacagtaatccctgtctgccacataggatttttgcaaggatcaagtgaaataatgtatgtcatgtgtattataaacctcaaaaacaccatatcaatgtaatatttccaattatattaatgttaagattagggacactggaacattaacaggttcccaaataaccaagcactttctagatttcaaacctactgttgatcatgctgttccctctgcttaaaatgctttgccactgccagactatcagctcagtaaggacaggaacctctgtcttatccacctgttaattcctgattgttaacatagtacctaagtgcagacttcatagttaccacatactgagtgcctactaattgccaggtactatatattaagggcttctacatacatttccttaatctcctccacaaccctaagaggtggcttacaaaagagaaaactgatcctcagaaagggtaaataactttgcaacggtgacagagccacataagtggcagagtcagaatccaaatccagtctttcaaattccaaaactgtattctttccactctgctgttttcctctgcacattagaggtgctcgataagtcgaatctggtaaaagtgtgcattttaaccataatatacataaaaagacattactcaaagtatttggatacaatctaaaatttcaaacttgacttttaaaatccatggacttagccagggtaagaactccaaaagatgttgctggatttgcagatatatcaaaatacaaatgagaaattcattcttagttagccagcacaaaatgggactgaaaattctgagtgaggggtaggagagaaaacccagaaccttttgtcttgccagcaaatccttaaataattcagctcccatttatttaaataattaagcaattgcaactttatttaaagagcacttacatgaatctaaatgtctaggctgccaagaaaagtggaacagactttaaaacctcccccctatacctcctttctgagcagaaaaccagcctaaggagtttcagcctgataggtaattgttttgtaaaattaaaagtcacagaaaattggagtttagaatgggaaaatgtcatctcaaccgtaacactaataaaaacggctaatgaataagtgcattctggcaagaatatataaaaactgcaaagcccaatgtggacagtatggaatacagaaggaatacatgtgagtaaacataaaatgagggattatccttatttgtgaagaatccattccagcaggaaattgaactagagaccttttgcatccaagagcagcatgactacctgtggcgtttacagaaaatatttatgggtgtactcttctctttcccctgtgggtctcagctgtggaagcaataagctgatgtttgggggatactaaagtctctctctctctctctctctctctaattacactgagctctgattaattttcaaaagtataaatgctcatatgtagtgaggaacaacgtaactataattataaaggctttaaaacaatgagctatgctttaccaatatgttctacagcaagcagcaaaagtgaaaagcaactgagatcatcacatcccagctttgttaggtgtgtgatcttcaaacaagaaaatgtaatctatccaatgctcagtttcctcatcagtaaaatgaggataatagtagacactagaataggggtgagaattagataagacaataaatgtaaaatgtttacttagcagggtgcttggcaggcagtaggtattcctaaatgttagctgtaattattattattattattattattattattattattattacattataccctgcccctagtccatgcaagcattttatcttgcaagctagacaaaagtccctggaatccactggaaagtcctatataaggggagagtgttttccccccatccacatttagcattgatctcatttctaggggttcagtaaccacatacctcttcaggaataccacttctgtggcttgtaatctaatgcatgtaccaataacatcccaccagacataatttccattaacaggtcctccagaatcagataaaagactagcccagatatcaaactcaactgatatttccatttacatatttctaagttaaggcatacatcctcacaaagatctaatagattttttaaattaatcaaagcccttcaaagttagaacagagtagataccccttttcacttcatctttgcatacaacgcatagcaaggcttcacaattcggttaatcactcatcatgtaaacaaagaaacctctcgagagccaaagagcaacatgtgcatggattcatgatgcataagggtttttaaaacaggaacaatgcaatctattcaccagagaagagtacactgtgccaattaaatatgttgggttccataattataactgcaataatgaatggaaaggagtgttattgctgcacaatgcacttctgtattccggtcagtgatctgtctctggtctgattccttcagattttcctctgattagatcttactgcagattactctctactatcagtgtattacgtgtgttctccccacccaacaaaaggcctaactttcacaaataactaaggtgaaaatattctattcccttgatagagttttatactttttaaacattgaatttatagctacaatgtcacaattacattttccaaagagaaatgaaaaagctatgaataaattttcactcagacctgcctttctctcaagaaaagaaatgtagagatcttcacccatcccctttgcttcccagagagagagagagaaagaaaagaaagagagaagaaagtgaaaaaaagagagagagcatactctgagcaaagataaggaggctcttacttccctgctggcagtccagtctaatggtggcatggaccagttgattctttccaccactagtgaacctgaagagactaaattggaaggattgaaaagactttcacacacaaagttaattcaaaatggtttagtcactacttgcaaccatctcagaaatctgaagaatttcattctggaccatatgtgcatatggttttctcttatcctcacacacttatgcttcagtgggttcaataaattttaaaaataaattacctcctactacttcaccataacactcagactttctggcctttccatactcaggccagactacttctgtgtgtttatatataatttgtttaagcttctattaaaccctctactgatttcccacaaacaggatttaaattttggaactgaaaatgtacttaggtgctttggaacctgcaaagcagatctgaacacctagcaccctttttttctagttggcaggtagactcacaaaaaagattctgtttctagagaaagcccccctaccttccaaaccccctctcctgaggtttaggctatcgtaagcttctcagtcttacttctgggcagcaattgctgccgcacagctagtctacacaagggttgaaggacaccgcacacccacccttttaatttcagtttgctctctaacgcaaaccttttccctttggccatgggtattggttcacacaacgtgaacagctcttaaaatcagtcccaaaggccaggcttttcaggtgctagaagtatgtcacacaatacaatatttacaaatagcccaaaacaatacaactcaactacacacagctttactagcttgacaaaatcctctcccacaagtaaccaagggctatagaaatacttgggccaaaaaccatgcattaacctttcgctactggatttacataattttctctgaagatctctaaatgcactgtcaccagaattgttttaagtggcaataaataatggaactagaaatgataataacagccctaataataacaaaagttatttattgagtaattaacatggtgaagcatcatactttctttctctaatgtacctcttattctcccttttctcagctctggtgacagtactgccatgattctggcctgggtcactggaggtaaaagtaactttatactgcctatgcactagaaagaaagaaaaaaaaaaacacaaggaagcacttatatcaactggacactggctcaatgttttccatttttctttttcctgaaatccatatacagccacagccttgttcctttcaagtacggattaatttatttcaggttctgggcctatgaacccatgctaatttgcatggctaaatagaaaggctccaaaaacaattagcaaaagatctttagtaggaagagatcttctaagcctgctaaccaacctgaagtaaaatttcagtgtaggcattcattcattcaatacagatttactgggttcctaacgtgtacctggtactgtgcaatggaaatggaaacacacacacacacacacatacttgtattatataataagtatatatataataaagctcccaatctgtcaatatttgtggtttagtagggtgatttaaaactctaaacataattggatagtatacatctcacaaaaaataataatgtagttgagataaagcaaaggttgtcagggaaggtgtcatcttcatataggaaggtaaagggtaaataatatctcaaagaatggatatgggagaagataaaagctgaacaaaattcttaaaggtgagaaactgcaaactgtggagaatcgcaagttaggaaaacaggtgagcagctaacggggaatggtatagaccacagccatgagggaataagaaactgaccctgagcaaagcaaaaggaagtccggatgtaggcaatgttttattaccaaggtcaggaagatctggcaactacttgcacatgaagcatgaaaagaagatgaagatgtctgcagagatttaggttcaggggctgcctaggtgaacggcggtgagctatgaaaggaaaaagaaatgaatatggatgaacctgttgagggacttgctttttggtgatggccataggggcagcctttctaatttggggttttgtattttgagtatatttgtatatttgcttgggaagtgagatagtgaatagttggaggtaagctcttttttaaacagggaagtttgagagggcagggggactcccaggggtagcaggaacagcaggtagttgacaatgcagttcaggaatttaaaaaaagaaaagaaaaaagttgggctgtagggaaaagcaacacttgaagttgtgagagggaataagatctagaacaccaaagagaacccatggaaaaagggaagcaaataaccgaggacaaaacactgggaaacatttagccggtagagggagaaaaaagagctagcccaagtgctgccaaataatgctatccaaagaggtacaggcagtgctgcagaacaaatggaggaatttttaaatggaaacagaagttaatggtgccaaatactgtggggcgggcaaagaagataatgcttaactaagggccactgatgcttggtgaccttcgaaagtttcatttcagtacagcggaggcagcggcaattaaatcgtgatctatttcagaaagctgactgcttccgccggacaaatgaatggctgaaaagcagcccaggaagaggcgagagttaaaccggaaaggaaccgccttgcatatcacctgcactacatacagggctaaatgtgagcacctcgggttatctgtgagttctcccactcgacagagtgacgctcctttggctgaatcacccaatctggcttgcaggccaccgtgacctgtgctcagtaaggtgtaccgacatcatcagcggcctctgctgacaagtgccgcatctcatctcacacagaattaaaacagataacaccagagcagagccccatgaacctattaaatattccacaaataatttatttttgatgtggaggaggaggagggaggaaagtaagggacattagaaaaacatgattatgttgaaaagtatctgaatatcaacgaggtaagggttataatcacaacaagacttaattgttctgtccaggcagaggctgggagcctatttccctgactttcaaggcaggaaggtttaagagaggcccttccagtttgcgtggcagtctatatggctagcacctagaccatcctcttttaaaaggtccacacataagaaaggcagtgggatcaagaatagaaaggggagaaagaaggaaaggggatgaagcaggatgaagagggatgaagtagtaggtgcccactagggaaggggatggtgactgggaagaaaggggagaaataaattgagctagagctcatgggctcctgtaaaataggcacttggagatagctggcaggagtagctttacttcagcatggtctctacccctttaagaatctagttttaacacagactctccccaaaaaaatgcatgcaaaatattgcatgttatttctggggactcaccaacctcctgaaggctattgattgatcctatggaccccactctggaagccctctgctttaactcatcaaacttattttttcagcacttagacacctctgaccacagcccttgaaacaattctatccccacctcagtttactaatgtctttcctccagaaaaaagaacagctcagactagctaccaatgtcaacatttgttaaaacatataatatttttatatcctgatttaaataatttcttaggtgccattcacctctggtttaaagaaaaaatcaattcaaagcaaaaactgatgtcactgtgagttcttttcacctagacacagcagacaacaaaacaacctcaaaagagaatgagatatatatgtacattcctgtttcagaattgtattataggaaacaatacagatttgccttcctttcctttgtaaaaatccaggtatctgacatttcactgccattgggttctcctatgaaaggttatgttttcataatggaaaaattctcactgacccagtggggtttctacttccttactcatcaattacaatcatctgcaaatttcagcttgctttagtgaagtacagctaagtgttttaacgctcccaacctgcaaaggagataagaccagtaaaatgtcacatccattttgttatctttcaatctacacctggagcctgaaaacaaaaagctttttttttttgggccgggggcggggtgcagccaaattttctatagaaatagatcctcagctttccagctgccaggtgcaaattaatttttctcccaattttggcccaattgccacttgcaagaaatgctatattatcccataggcctttaagtccctgagatgaaacatcttcaattcagaccttccagtcttgtttgctgaagtctgctgacagagactggagacaatctgcatctattcccttttcctttacattgaaccaattagcaatgttaaatatttaacacattagtcttatttcactgaacaaaacaatccacaagcagcctaggtagtggcagttcaagacaggaaatggatcagatgtggagaaaaccgaaggaagggaaaagtatgttataggtgcgtgtgtattttaaaaaatataaaagtctattcacagttcactaaagatggattgcttgtttctttccttctactgacaggtcctgaatctttatggagaacattaaattaaagcgcataataggtttatgtagtgtactgcacgttggagacattagtcatgtcccttaagcatttttctcattttctaagcctgacttaagctccatttccccattgatgagggaaggccagactaacccacaatccacatctgcagtctggtgtgccattttttatatttgtcaacagaggctgtgtcctaaactcaaagacctcatagattattatatttctggcatggtttacagaaaccagtgtaaagctaatagggtcattcaagtggaacttttttgtttttcactcttccctcttcaaaacacactgtggcattaagggggaataaaaagagaaaaagaaaacaatttacagttgtcttgcagaaccctgactgaatagatgagtagggcaatttcttctcaaccacataggccaaatttatatgtaatacagccagaagctttgaaccaacaataccagatcacttaaaagatgttgctcagttattctagaacattctatgccagtatcagcatcctttatcgatctcctaatctggtaccatgttttcaagaaatttccaggaggcactcctatctactgggcatcaagtttacagcattgttgggctgacccagaggaatgctatttaaaatatacacaacctgtacaaccacttatctgggcatctaggcaaatctgatgctaatgaggaagctgaaaagaacaggttgcttgccatgtacctagatttcattagcattatacagactcctgcatcatattatttttattgtgaaataattagagccgttgatctctgcctatgagtgctactacctcagcatactacatccgggcttgaagaaaaagacattttgataacagtcaaagagaaaaacaagattactgcagcaagattacccaataacttactgcatgaatttgggctagtctcattatatcctagatccaaaaagctccatatgatgaacttactggttctagatagctctgttctgagtgacatgagaggtgtttagtaaacttacaatcagtagaaataagatgtctagttaatgtcttggcatatgacacccacaacctttccccaggtattaaaagaaggaaataaatgtatttaggttacaatagctaacactaatagagcccttaccaagtaccttctaccatgaaaagcatatagatataaagatagtcccatgacctcatgagatagatattattatccccattttacagacaagaaaacgaaggttcaggcaggttaggttacttgcacaaagtcgcacagtcgatatcagaaaaagacagattttaatcctgaagagacttacttcagaatctgcctcccttagattttttttccccaagcattcaattttgatgaaacagcctctataactttttacaggcaggaaaagtagaaccagtgttgtaagttttaacctgggaatttggaatgcctttgcctaggtttttcttaatgttttgatgagcaccactggctttaattctataatagaattctgctaaaatggataacaagtaatttacagacttctagttcagagtgagcaacaaacatgacttccatgtattcaacccataatggattataagactccagcaatgtgactatgattttcagagaatgttcatttagccatacaggtaattagtaatttgttatttagtttctggtaaagacatgatgagccaaaaaagctatgaaaaaaaaacttccaccatttcccccaccctgtggcaccccaaaatcaaaactgcaatgacttgtagcatcgtaagtctgcaacagttcctgtccaccagagtgaatgaaggcagaactagtttgacatttcctgctggctgtgattagagcatcttttaatgaagctcacttcaaatcattttaaatccatttgctcatgtcaacatcaatgtactcagcattatctaccaattagtaaaccggaaaatattctttagataatctgaaatctcagtaaaatattcagcatgccattcatttactacaaactgccctgtaaaaacaaattagcaaaaccagctgtcacaggacaacataaacatccattaatacaacccaactacttcagtcgctggctaaggtttttcaggaaagagaaaacatggtggaaatataaatcaacaagactttcaaatgtttagcacgtgtcttcagaataacatgttgcaccaatattaaggtgtgcatttaccttccccatgtgtgagatcaaatttggacgaggaagaaaagggttaaatgaaacactcttcaaaattctttcaattaggatctcgagtttttgtgctgcaataagtctagaaggccaaaagagttctaacatttgtcatgcttcataaggatcagaaatatcaaagagcatgaaagctgaccaaatatgaatatgattatgattatgcaaaggaaaatcaattgaatcgtaggtctcagattttgcacaacccacttatatacactgcggaaagcaccacccgaacttacaggaaacctgtgagtacatcacttaccagccaacattgactcgtcctttccacaaatcagcctgacaaaattctataatttaaatatggcaatatttcaatagccaccttccacttaggaccctttcagtatttttcattttaatgcattagttataaataaactgcggcagcacctgttaagagggattaaaaatgcttttatattatgagagaccgggtgagagcttgttctctgatgaagacactcatgatatgcacaagacgtctgtagtggaggagcagtattcttcaacaatgatttcgatttaagaatctaaattaggcttcagtcactgatgactacttctaccttctaaacgatagggaacacttcagagtgggtacctaacacaaaaactgccaatcatgaactggaatgagctcgaatacgcaaacccaactgattgaagatagaaaggcttgaaggtgcaaggctgctctttcctcagaagagctatgatcccaaaatgatggattaaagtaccagaaccagtacacaagatgaccacaacagtttcacaaaatatttcctaaatgctcatggggccacccaactatgaagctgttcaatttccaggacatttccattctgagatgcactaggcatattaaggcataaagaaataaatacacttgaaaacaggtggcgtgtccctcagcccctcctcaaaggctgtgttgagcatggaaaagagagaagccgtaacagggaccacttaggctaagaccattgtaattttaaaattgtctcaaaggagaaaagaaatctacaatactctcatcctattctgagtgaatgagtttacagggttttctccttactcttcagcaagccaaggcaaacgcctaaggacctttaaacaaaagaaaaaaaatccaaagaactttaaaaattttttaaatcacatacccagtcacatccatacatcctctggagagaagtcataaagttgtctaaagtttacatttctcttcttaacattaattattaagaaaagcatttcatcttgattatagccaccaataaaagtgaatatattctataagtacaaaatttcataaccaggtgctacactcagcttacggtttgcatatagaaaaagatgtaataaaacaaaagcattctgtatctggtatctacaagaaagataagtaaactgtaatgataatttacaattttgcacattttaatttcctacttccagtgtttaccaaaattttatttaacagtaaaatagattttgtgaaatagatacatgttcattgggggaaaaaatcaagacacagaaaattacaaagaagaaaaactgtgagcatcacaatctcagtcttatattcccagcaccacgttacatgagatgagacgggtgcactggaaagaaaaaagcttgaagatagtagatttgaagccttctccaaaataatgaagactctcctagaacaggtgagttgtgaaatccagaagaaaagaacagacaaaacttcatgaataggatatttgttaaaatcctaaaagacttcaattttaaagaaaggaattaacaacagtttcatgaaaatggccaaggtaccttatgtcttacaggggtgtgtctgtgtgagtgctgtgcatgtgttttttaagaaaggcaaaagggtctatggataatggaagggggacagcaccttactgtagttttgtgggttttgagtttttagaaagagaaatcatacaggcatgctccaaattttcatttatcccaaggttagtaaatgaacataagtctacaggaaaacccagactagggcatgatacctgtattagtctgttctcatgctaataataaagacatacctgagactaggtaatttataaagaaaaagaggtataatggactaacagctccacatggccagggaggcctcacaatcatggcagaaggcaaaggaggagcaaagttacgtcctacatgcagcaggcaagagggcatgtgcaggcaaactcccctttataaaaccatcagatgtcatgagatttattcactattaaaagaacagtacagaaaaaaacccacccccatgattaaattacctcccaccgggtccctcccacaacacgtggaaattatgagagctacagttcaagatgagatttaggtggggacacagccacaccacatcaatacctaagatgcaaaatatacattctgcactattgaactcttatagaagctctgatttctacttctctaattataaatatggctaagtatactcacctttcatataaagcacttcagccactcctctataaaaaataataatagctgacatttacctacttacctagcaccttctatgtcccaggcattgttctaatagttttacatatattaactcattttaatacaacaactctatgaggtggatgccattatccttccccattttataaatggaaagactgaggctcaaagagattgaacaacctgactgagatcatgtagaaaggaagtggcagaatcaaggtgtgaaaccaggtggtcagtctcttgttccacataaataagctgtgggaggcagtgctttaggatgacatgaaactgtaaattgtctacatgcattaaaccgtttcaaactactctgctacttggttctttatttagtttttattcttttcctaatcatgaggaagtgaaacttttacataaccatactatcctcaacttctgggctttttttttttttttttttcgagacagagtctctctctgttgcccaagctggagtgcagtggcactatctcagctcactgtaacctccgcctcccaggttcaagagattctcctgcctcagcctcccgagaagctgggattacaggcacccgccaccatgcccagctaatttttgtatttttagtagagacgggctttcgccatgttggccaggctggtcttgaactcctgacctcaggtcatcccacccgcctcggcctcccaaattgctgggattacaggtatgcgccaccgtgcccagccctggggcttttattttaccttctgcttccatgaccttggtcattaagcagagcagcaattttctaatcagcaaaataaaaaaatagtaatgcctactttttactcttatcagcaaaataaaaataatagtaatgcctacactgtgagatatgatacaatgcatgttaaagtattctgtaaactacaacatgccagacaaacgttagctgctattataatgattaaacttttcataatgtcatcttctctccttctccatgttagaccactggacagttccattaattaggtgtgttaggaaaagaataaaaactaaataaagaaccaagtagcagagtagtttgaaactgtcttcaataatactgattaaactagccattggcaatgaaacaacattcttgggagggcattgtgtcaaaaagcccatttaaccagcctaatttattctactggaaaaaaacctttcagatactattagaaagtaagctatcatccattaaaactaaagttgaatggaaaatttttaagaaatgcaatagatttgtcaaaaagtcaagtaatatttcttaccattcattaacaattataaagcactaaaacttgaagccctgtacaaattaggacatttgcacagaccagaaccatgaaatgccatatatatatatcattcaatacatttactaagggcctactatgcagcaaatagaactgcttttgtggaatgatttttttctttaagtgtgctgtcctggtagagttaataaaagctaccatttatagagcacctaatgtaggacagggattgtacaaggacattacctaccaaatctcacttaatccttgcaatataacaatcatatgaagtagacagtattatcccaattttttatcaggaaactaaggtcaaacaatgggaatcaatcactggaagaagtgaaggaccccgaagtcaaaactggtccccctctctgcagtacgtgctccctttcctcgtgtcagcagaggtgccccagactttttaaccaggacaccctccaacatcagaggagagggaattaatgaataccctgagtagcctaagacatagccaaaagctgccctagcacaaacatcttcattcttggctattcatgtacattttcctttctactcagggacatatttgctgtgttgacagttaaatttttttttctccgacctattagtgaaattgacagaccaaaaatttgtaccaaatatagcctgtgccattttgggggaacacatgtctgtcaaaaggacagaacatacatacagcagtcaaccaaagtccttacagaaaaacatgatcaacaaggagaaaagagcagaatataaaccaagcacctattgctcaaacagtgaactgagactgcctcgaggaagtgaattttgggactgacattttaaatgaggaattagaagtgactaagaaaaggagatgcaggtattcaaaatgaaaaagctcacagaggctgagcaatggaagtgggctgaagagaggtagggctactcagcctttcacactgagtatgtgaatctgggtttacacagtacactggttctcaaacattagctggtgtcagaatgaccccaaaggcttgttacacacagatttctaggctccacccccagagtttctgactcagcaggtctggagtggggcattctaacatgttcccagattctgttgacgctgctggcctgggcacaatatgggctgagatcggaggagagatggagtttgttgactggagtgaactggagggtttcaaacgtgagatggcagtgagctatactttagctttcaatctgcagagatagtgggggagaaggaagacaccatggatggaatgaatagcaagaccagtggtcataaaacaagaaagattgggttgggcatgcaaagagttcatgtacagaagctagcaggcattaaaaaggtgaacgtaaatcaagggaggaagaagagggcaaggggccatggcaggcactgcaaggggaaagaggagctaggtccaaaccaaccaggcacagacaatcagcagaaattgactacagatttgaccacaccagggtcccagaaagagagagtcaaaaatgattctgaggttccaaagagcaagtctatcttcaagaaaataaaggggaaactgagaatggttgcttatttgtgaggatgaggagaaacggaactcagttttgtgtataagttaccaatatcaaaaggtcatcctagtaattgtatcctatagctaagtagatgtcagagcccagggagggaaattaagtttaacagtggatcacaacacagatatgggtttggagtcatttgcctttggaagaaagttggatctgtgacagtaaatgggttctcagaaggaagagcatatattagaacagagtacccaggctgaaatcactaaagatgcccctcaaaaaacatatatatgtatataggggggggtgtgtgtgtgagagagagtgcacatgcacgtgcacatgcatgcctagttattaacaaatcaatgtacaggcttagtttgtaataatcagaaattaactaaatatgacattcttcaaaattctccggtttgccaatattgaaatgttaatttattattcactgccacagtagtgtcactctgtaacctcttaccaagttccttgcatgagccctctggatgcaaatcactcttagcccatctgtgttctcacatgcacaaaccctaacatcctttccttgctgtacaaggaacatatatttatgttgctctatttaaaataaagaaaaatgatatacagctaccttggatttagaaaagaatattataccttgttaaagatattgaaaattaattatgtctggtaattaatggcctagaaagcgaaaaaaaaccttagatttcttatttcagataattttctgtgatctacttgtcatatgtactcttccaaaaccatactgttcagtttcttaaaaccaaacatttcaaccagaagcaaaataactaaggtaagaacaggtgctaacatagcttctcagcacaagtttcatagtcagaaaactcgccctagtttaagtattaatgcaatcatttgctagctgaatcatcttaggcaaggtacttaatttgactaagactccttttcctcatcagtaatctgaggtttaaaaagtaagcaggccgggcatgatggctcacgtgtataatcccaacactttgggaggccaaggcagaaggatcgcttgagggcaggagtttgacaccagcctggggaacatagcaaggccccctatctacaaaattttaaaaaattcgccaggcgtggtggcacacacatgtagtcccagctactcgggaggcaaaggcgggaggttcacttgggcccaggagttcaaggttgcagtgagccattatgccgccactgcactccagcctggatgacacagtgagatcctgtctcaaaaagaaaagtaactacctcaattggcagaaagatagacaagctttaatcagaaagaatccaaatacagaactacacaaatatggtcaattgacttctgacacaggtgcaaagtcagttaaaaggagtaagaatagtcttttcaacaaatgcttctgaaacaaatgaacatttataggcagaaaagacaaatttcaatgtatacctaatactttatacaaaaagtaactcaagataaatcacagaccaaaaagcaaaatctcaaactataaaacttttaggaaaaaaaacaagacaaaatcttcatgactttgggttagacaataagttcttagttacctcatcaaaaacacaacccataaaatataaaattaataaactggactttataaaaattaagaaccagcaaaagacactattaagagactgaaaagaaaacctacagtctatgagaaaacgtatgcaaatcatatatctcatgaaaggcttatacccagtactctcaatacttgacaataagaaaatggcctagtttttaaaaaataggcaaaatatggacgggcacagtggctcacacctgtaatccagcactttgcgaggccgaggtgggcggatcatggggtcaggagatcaagaccatcctggctaatatggtaaaacccggtctctactaaaaatacaaaaaatacaggcgtggtggtgggcgcctgtagtcccagctactctggaggctgaggcaggagaatggcgtgaacctaggaggcagagcttgcagtgagctgagatagcgccactgcactccagcctgggtgacagagcaagactccatctcaaaaaaaaaaaaaaaaaaaaaaaaaaaattaggcaaaatatctgaatagacacttcaccaagatattcatatcgcaaataagcatgtgaaaacttgctcaacatcagtagtcatttattgcagcactattcacaatagcaaagacttggaaccaacccaaatgtccttcaatgatagactggattaagaaaatgtggcacatatacaccatggaatactatgcagccataaagaaggatgagttcatgtcctttatagggacatgaatgaagctggaaaccatcattctcagcaaactatcacaaggacaaaaaaccaaacaccgcatgctctcactcatagaagggaattgaacaatgagaacacttggacacaggaaggggaacatcacacaccagggccagtcgtggggtggggggaggggggagggatagcattaagagatatacctaatgtaaatgacgagttaatgggtgcagcacaccaacatggcacatgtatacatatgtaacaaacctgcacgttgtgcacatgtaccctaaaacttaaagtataataattaaaaaaaccataatgagatatctctacatacttactagaatgactacaactaaacacacacacatatactgacaatatagtgttgacaaggatttagagaaactggaatccctatatattgtggtgggaaaacaaaatggtacagtcactctagaaaatagtttggcagtttcttaaacatgtatagttgtccctcagtattcatgagagactgggtccaggaccccttctcacacccaaatcctcagatgctcgagtcgcttatataaaatggtatactatttgcatagaacctgcccatactctcctgtatactttaaatctctagattacttataatacctaatagaacgtaaatgctatatagttgttatactatattttttatttgtatcattttttattgttgtatattttaattttattttttttcctctctaccttaggctaagaatttttattttttcaaatattttctatctgaagctggttgaatacacagatgcagaacctttggatatggagagccacctgtacttatcaaatgacctggcaatctacttctaggcatttagccaatagaaatgaaaacttatggctcacaaaaaaacctgcacccagatacatagccacattactcgtatcgccaaaaactgtcaacagcctaaatgtccttctgtgaatgaagggatagactatagtacatccatacaccagtggaatactacttggcaataaaaagaaatgaacaactgatagataggtacatagagtaacactgatgaatttcagatgcaatatattaagtaaaagaagctacattcaaaaattgcatccagtatgattccacgtatatgacattccagaaaaagcaaaactatagcaacggcaaacagatcaatacggctgccaaaggttagcagttggaaggaggtttgactagagagagacaccatgaggggatccgggtgagtgaggaaactgtatattgactgtggtaatcataccactgtaaagtagatatacaattctatgcatgtgtcaaaattcacagaactctacccaaaaaaagtaaatttcagtttatgtaaatttaaaaataaatccttaaaggtgtaaattaaaattactgctagcaaaaaggttcactcttataaaatagtagtgggaactcaatgaaatgatgaatgtaacttgctcatagtaagcacttagcaaaatttttaattattatggtattaccaaagtctcagtatttaatatgcaattcacattcaaattaaatcaatatatttatcaagaaccaattatgtcctggcacagagttggcttctacaatatatacaagccatatatagtatctgtactctcaagagtctcaagaatataacttatattctaattttataatataaaaacaaaggttaaaattcagttataaaattatcttggtcaaagtcaatactaaagtatctaaactaaaagatgaccaagaccagataatccacgatcatttccatgtggtttgtaactatactagaatgattggtgatttgtttgtttgattgtttgtttgtttgtttttcctctgaggcaggtttatcttaacttagaggtggaaaccctttgttacttagtccagtgttacaatgggtttgcatgctctctgcatgcatcaggagatggcagcaggagggggccaggagcacgctgcgtggtaggagaacatgatcctagaattaaacattctgtagggcataatttacactaagaaaatgcagaccttattagcatcaccggatacacaaacagactactcaacatttacacaatgataagagaatcagggtgataaagacttcctagttaaaaactctcctggaagaacgataacttagaaatcaacaaccgtatatatctcataatgaggtacttaactttgtcatcctactatgccagcaaacaagccatggggcacacataataactgagagttaacagcatgctgacgtccactgaaagagacagatgacactcaagaaatacataacatccaagccctttggtaattttatttattataatctgccaccttcatatcaatgattttcaaatggtaaatcttaaaataaatataatgggccacatccagcatttctttaaaaaaaagaaaagaaatagactagaactgaagagtacagaacagagtcgggcaggatagggcaggatagcatagggtagacaggataggatggtgcacagattaaggtggacaggatatagtggataggtttggattgataggaaagggaaaggaaaggaaatatgagagcacaatgaagaaaaaaatcaaggtacacagaatgcagtaaaggataaatacaccatataaatttattgtgcatacagttgcatggatcatggaaaaaaaaattaaacactgccttaaatcttatccaaggtataataacatcttaaccaaaacctctttaaaggctatttccattctcttcccaaggacaagaatccaatggttatttctaagaagaggaattgcctatccagcttcatgtaaccaaagcagacaggaagaaaattaaaaatgtaagcctgttttctaaacttgcattaagtcaacagatccataaaatatatccacaatgtcaacactgtgacctaaagtctacctcactttgtagctttctcctaacagatatcatcactgtattgaaacagtaaacttcacagcaagggtctggaatagtgatttctgctccactctgtgtgctaacaaactaagcttatacattgaaaatggcaataaacggccagaccatgtgcattttcttcctaatcctatttgcattgatgactcctctgcaaaaaaacaaactggctgcactggagaagtgtcttctccagattgctgctgcagctggggtccaggcagagcctgggaccaaacacacacaaacacaagaaaactttacattcagtgcaatggaggcagaatctagaaaattgcatccagatgaaatcctgcagaatacagattccattctattcttgtccttgggaaaagggtggaaacatgcttttaaagaggttttggataagaggttcaattctactcaaaattaattgcctaggaattaagtcaaaaaggtaataagttaatgcattcctgatcattaatcagaaagtatcctttgttcaaattctacattaaaatattccagttttaagaaatttcacgtatcccaataatcattcaaatacttttaaactataaattatacataaaattcctaaatcttctggtattgtatatggagatcatataattttaaaataaaacaaatctagtaatcaggccagcaataatgctttaaacaaaagacaaagtccatcaaagcatactcaatagcaactaaaatgtaaataaaacaggttaccttgcaaagtgataatctaaagtaaaggatatattcagaaaataactgaaaatgtgaagaaaaaaaggggtaaatatctagaaaaggcttaaaaatctgtatgatgtttcaaaagacataaatataaatacctctttaaactcctatgtatctagacaaaaacaaagagtaaataaacgattactgcaaagcctaatgtatttacataccacacccatttcaactgatctttttagaccctttaaatacagctttgtatcttctctctttctctaattaccaaggtaacccaaattcactacagaaattttaaacaatatgcaaagttaactcagaaagtaaaagtccttcataatctcactctctagagatagccattgttaagagctttctgttgattcttcacattttaaatgaatatgccaattagatagtatgcattatagattaattatatataaaatacttacacagtgttctacagtatgcttttcttcacctactgatacaccctggaagtcttctcttgtcagtagatatagatctacatcactctttttaatggctaccaagtattccattgtatggacagatcataatttatttaaccagtcccttactgatggacatttggattgcttccaattttttgctattaaaatctatgcagcagttacatctttctacgtatatatttgtgcacttgtaaaactatgtctgtagactgaagtgattttgtttgggggtaaaagaatacaataaacgtataaaaaattattcacttagctttaattcacactaccataaatcatctagaagtggcaattgctctaattgcttaattattttgatttttatctttaagacttttttgagaataatttattctactcaaaattaattgcataggaattaagtcaaaatgtaatgttaacatattcctgatcattgatcagaaagtatcttatgttcaaattctacattaaaatattccagttttaagaaatttcatgtatccccaaaatgattcaaatacttttaaatcccactttagacttggaaattcatcttaaatagattcactgtaatcacagtttcctatttgtcttccaaaaaaagaaaaacacacaaggatccccatcacacatagagcttcagaacccaacccaaaaaaacgtacaaaattgtccctcctaaatgagtacataagaaattcaaatacaaaaagtcatgacatttggagtctgatttccaataaataaccctggacacatttcatggcaaacaaaatacttgctgagaaatatagttaccagggcaaccataactgtccttttatgttttatttatcaattgtgttgctgaactattctcattcttggaaacaaaggggaaaaatgtattataaacagtgataattaattaaggttcccctgctccaaactaaatcactcctaccaaatctgtgtttatccaaaagacattctattttctgcttcttagttcttgtctaggctaaggacatggatggtagatcccaaagaagcattcacaagttaacaatattaaccttaacactctagatggagagactattaatataatcatcaattctcaacagacaacaggagagatatggaaattctttgctgtggcatcatcacctagtaaatcctcttgaaatatggaatgaaagaattttaaaatgtgtgaataaatctacttatctttaaaattataaagtttgtaagaacagaaattccaaacatttcagcatttaagttttacctttttacaggtcccaaataatattctcatctaatccagtatcatctccacttaagaaaagatacctaagtctatttatttttagcatcctagaatactgttatacctgcttgaactccacaaagaagaaaaacaaaacaaaacaaaaaactggaagagaaagaaaatggtgtagaattcccagtgtacaaaatgggaaattaagagcatttataatgagtgggatttactaataatccttatcaaggaggtagcaagggaacaacaaagaaaaccctgagctgcaagtcaggcctggtcttagccctggccttggatccacttgaataagtcattcacttttctgagctggtctcctcatttacaagatgagggagttctgtgtgctctctaaagtccccttcagctctaaatttccatgatacattgacctgccttccctctgaaagggaaggaagatatcaaggacatctcagactggtctctgggaagagtgacatttcagtctgctgctcagacaaggataatcagcacacaaggggccttgggtcactgcaacgtaatgtttccagcctcagctggttgcttcctagaatttctgagttctcctggagggagaacatttcaaaccttcccagtttctcaccctgcacagctccatctcaccatcaacaggtttagcatgggatcctactttcccaagaaggttctccctccctccaggcctcagccctgcagggtgcaatcttatctacatccaccctccttcttaaagccttgcccattatctccacctcagaagaaaacaatggtctcttgcccccacccctctcagcaaatgcctcctcctgagcctcatcatggcccttgatggtcagtgatcaactctcactttcctatttttcatctccctctgtaatatctcttattttatgatatatataaaccttctcacacctccctaattcaaaaaaatacatactttaaaatttctctaagttctacacctccttatttccagtccccttctccctcaccctacctttaccagtcaagcctcttcaaacatgtgtctacagcatgcttcctattctgcacttccatttgctccacgcattgccatctggttcccacactcactgctgcactaaaattgtaaggtagaggtcccctatgaatacctaagttctatagccatggtggcctcccttatcttatctgaattccctgtagcatttgacactgtggctcactcaccttcttagatgccaaaacaaaaggctttcctggctttcctcaaagtctcttgacagccccttcttcactcctctcactagttcatcttcttctgcctacctttaattgttgacgttcctgacattctgtccttagcttctcttcctcttccatatacattcttcttaggagatctcatccatggccatgtctccaaatgagtgccacagagtgctgctaggtatcttcacctgaatgtgcctccagctcaacttctgcagggtcaagcacatcctctttaatcccaacactgtctgctttctaaatttcctgtcttagttactacacccatcacctacttaggcagccaagccagaacctgaccattaacctagactcctcctcttcccactctcttgatcagttatgaaattctactttcctaaacatatcctgaaaccaacttcctcccaagctgcctagcaactacctgggttctggccctcaaaatttcagctggccttccacagctgctccctaactgctctcctacctgagtctctaatcctccagattcgtcctgcaccctcccgctcccctcattgacactctccatggaataaaacccagacttctctttattaccaagttggtcctgtatgatttgacaattgtgtaccctctccagcttcatattttggtgctccttcaaaggctattcccctcagccatagcaaactatctgcagttcccagaatcccccatgcttttgtctttccgcccattatctctctacctggaaaaactcctctaataccgtctctatctggctatctcctacctacctttcaaggctcaactcaagagaccccctagaagtctttcctgactctaagtctccatagtgagttagacattcctcttctatgcttccacagcactcctgaactatatctattatggttcttggcacatggtattgttatttttactgtgtcctgcaaaaacatctaaaatataagttccttgatggaagagagcctatataattcatctttgtaaacctagtgcttatcagtgtctagcacatagtaagtgatacacacacacaaacacatacacacacagacatgcatgcattttctcaaaaggatgaggacaaaatttagtcacattaattttaactcttaaacagtacttcctgaagcttctctatattcactgtagcccagagccttcttgagttgaatcacaagatgatttcatttgtcattggaagtagaggtatttataaacgtgtttctcttataagatggttaattctgtttggaaaatgtttgctgtgcactagacatcatggagtcccctaaagagttagctcctttaaggagctgacaatctcacagaatctggaagatatacgccaagaaaaaggttgtagtgaggttttggcatatatgcatttctgtgcattaatatttttaaaaatataataaaacgaataggactacacatgaaaattttgttttcaaagaaaatactcattccttatattaagatttggaagttaattcaaatgtccttctgccatctctcagttttgttagttattaggctttaaatcactgtcattgggcaagcagtgaacacggaataattatttcatacttttccctctccttctctatcatctttaaatccacaatatctcaatccaactgatgtcagtaaatccagtctgtcccaacttttctctaaaactcttaaaactatttgaatgaggtgttgagcagctgtcagttatggatttgaaaataaagacgagtctgaaaattatacgttcagtataaaaagattaggtgaagcaattcagaacgtttaagaactttaaatcaagttaaaagcagttactatggccagacctcatgaagctctgcttaagagttgcattaacctggcagtcaaaactatttaaaatgaataatgtttttttcacatttcactcactttcagcatcacacacacacaaaaataacaatgtgaattggcatacggcagtagagtcatgtaacagtaaccttcaagatttaccttcctaaggacaaagctagagctattaatctatgcactagatgagctacacccatctaaggccaaaaggggtaattcttcaaatgaggaaaggactattaagatattccaaaggcttttagacatgaaaagcaagaggagagtcaagaaaaattcacaagcccacaatagctcagtccaatgttcaatataaacctactaaatttggagtgaatatcaatataactcaaccctcttccaacctcctctcactagttaaaaataccgatgagcatgagaatttggctttttaaatgttttttagtctagagctatgcagccctatatggtagccgataaacacacatggctactgacctataaattaattaagattaaaaattcagccccttagtcacactagccacatttcaagtactaaatagtcacacgtgactagtggttactatactgaacagcacagatatggactatttccatcatcacaaaagttctattagacagcactggaggcatagccagaaaaaggatgccaaactagccagcccaggttccagagctctactgatcaactgagcactttttggtcatcctacccataggagaccagtcatctcctaaaggtaacatgcaaaatgtccacaaggatgtgtcctttacataaaggagttaagaaaatgcagactacaactcagcatgtttccacattaggcctgagctacactctctcaactgtaaatcaaaaggctcccacacatcaatttcattcatgaccccctactaactaatatgggctaaggaaccatgcacagtctttctggatgtcgtacagcatgctgaaaaccagggggcaaacattaatctacctaaagaataggagttgccattaagctgacctagattcttcctgccatccggaaagtgctccctgtgctacactaggatttgtttttgctctctggtggtacttgttaaaagctgcacatgtccagaaaaacagcttccatctatcctccctccatgcttaagcctgccaaagctgccattggtcatgtgaaatacaaggatagtcgtgaggtttattaagtttctctgtatccaacaacttcaagtatcttaattaaacattttaaataatatggacaggctgaactggctctttctagttccctataccatggtaaagacacaatttggcgtactggtatgctacagtgagaaatggactccaatataaaaacctgggccgggcgcggtggctcatgcctgtaatcccagcactttgggaggccgaggcgggcggatcacaaggtcaggagattgagaccatcctggctaacacggtgaaaccccatctctactaaaaatacaaaaaattagccgggcgtggtggcgggcgcctgtagtcccagctactcaggaggctgaggcaggagaatggcgtggaaccgggaggcagagcttgcagtaagccgagattatgccactgcactccagcctgggcaacagagcgagactctgtctcaaaaaaaaaaaaaaagaaaagaaaaaacaacctggaatcttgttccggtgttgccatatcctagctttgtgactggctaaatctctaagtcgaatccatttgcttaaataacctcttccccagagttcattcactttcaagacaatacactcaccttcgatgattcttctgcaccttggttaacaggctttcaccccacaccaatcctgcccatcttccacctggtactgactccctccttcttccacaactttaacttccagtcctctgactagtcctttctggcattcatcacaggctgtttatcttgttaccaacacaccttccttaagattcaacctctctgcagcaccccttaaggatctctcatacacttctgcctgtcttcagcacctaatacaatgattggcacacactgggcctttgaataaatgtgtattaaagaagtaactaaataaaagcataatgtaaaacttttgctaccatcttgatatggtttggctgtgtccccacccaaatctcatcttgaattgtagctcctgtaattcccacgtgttgtgggagggacccagtgggagacaactgaatcatgggggcggtttcccccatactgtttgcttgtcagtgaataagtctcacaaaatctggtggtttataaggggaaacccctttaacttggctctcattctgtctcttctctgctgcaatgtaagatgtgccttttgtcttctgccatgattgtgaggcctccccagtcacatggaactgtgagtccattaaacctctttttctttatataaactacccagtttcgggtatgtctttaccagcagtgtgagaacgctaagacacatctctttgcagatgactttcaaatctgtatctgcagcgctgctctcaacctttctactaaactcttatttcaaactgctttctaaacatttctacctgaatgttccagtgataactcaagtttaacatatccaaaaccaagttcattgcattcccttactaaacccacatataacatttacatttttgttcattagagtagtcattctcctagtcattcaagtccaaaatcaaagcacaccttcatttctattatttgttttccctcaatccccattctctagtcagccatcaatggaggctccattctacctcctattcttccttcactgccctaattcaagtttttgttgtcttgcttgaactattatactcctaaccaatctctccatttctaatggaagatcctctcaatttctaatcattgtaggactcatgaacctctcaatttcttatcattgcaggattcatattcctaaaaaaccaacctgatgttacttcactgttcaaaaaatttaagactccccaatgacctcttgaatttatttatttgtttatgtatttattttttgagacaggtctcactctgttgcccaggctggagtgcagtggtgcaatcacagctcattatagcccccatctcccaggttcaagcaatcctcccacctcagcctcccaagtagctaggactacagttgtacaccaccgggcaatttttttatttcttgtagagacggggtctcactatgttgcccaggctggtctcaagctcctgggctcaagcaatcctcccacctaggcctcccaaaatgctgggattataggcatgagccatagtacctggccttgaatttcatttaaacctgacattcaaagtttttccacagtctggccccaaactatctgttgctaatcccatctctcactagccattttagttttcctacctgtaagcctttattcacatggttctcctcaacatggaatgcctttccttctcacctctttctcaatagcaatccttcccatattttcgagactttgtttaaatggaaagccttctaggcatccccactccaggctagctccctcctttatatccctctaatggaaagatagaggtgcccgtgatctgaaatctcagctcctgaaccagttctctgctgtggccacagtcccaccttccagaaccccaaggagaatacgaagagaggaaaggtcaggcaaataagtattctttgttactgcctacggctttggtcttagccctgatgtgctctcccagtaaccaggcttcatttgctccagccttgttgtttggaaattgaaagattcattaagtccagtggtttttaaaccattttttaaaaaagtaaaacacttttttcaaagagaatcttatgggggagatccaatgtatgaacatggagtttctcttgttgaaatggtagagtgctttgggaactagcaccagataaacgttatcaaatgaatttaacttcgatcagttattccattataagtacattatatattcatctttttaaaaaatttatctttttcttgctcctttagttcatgaaaagttcaggtcaaaatcttgaaggtgatgacctcatttaaaaaaatcctaaaaccttgaaaaatattctattaaaacataactctatgcactcaccttatgaaacaaggataaagagatgtaatcacaggtaaattaatatgaaaatgggagatcattttcggttaaaaaaggtgaaaaaaaatctgctactatcttagtctgaaattctaactttctagatctgattcatgctgttgcatgaatggaatataatgcttgaggaataataattcaaaaggaaaagaaaactgaacagtggttaaagaatcatcaacttgttttcatgcaaatgaccagaataatgaaataagcaatcctgccgacaggcctacatgtaattgtttttaaataggatgcttgaagcattagccacctaattctagaagaaattgattcatcttttcttcttcttggataataccaatcatatactatacattaagacactgacaaaaatttgtatttcaaagatacaatttttcttgaacattgccatcaaatcattatttacttgacagtaggtcatgctgaaaaagatatatctgctgagagttatgatggaaagaaaggttaatgcctctaacttaaaaggtcctttaaaaggcaatccctggaaaaaaaaaaaatctaccaagaaaaagaatatggcacttggtagaaatcaaggaagacatagcattcctctcaaaacttcaactaattgcaataatccactcacaatgcctaagaaatgcaagctgtgtaacctaagacaatatagagctatgtagctacaaggcaagcatcaataaaatactaagattctccataattcaaagcatttaaagtaccaaacacagactaggctggatgcaagccttaggcagggaaaagggaagtctaaatggatggatgtgactatgaagggaacactttagaactaagtcatacaaaaacaagttatgagaggccctcctccccctcccaataatgtcaggaagttagagttattgagtaggcatcacttatgacagtgagaaaaagggcttgccaccccctcctctcaaaaactccttcacaaggtcacagatacatcagtgttacaaacgcatttaaaaaatattacagcaataaactctggttagagtggttccacctctatattcacaggaaagaacaaactccaaacttctcctaaattaaaaggtaatgttagcaaacacatactctctctgcctacacatgaaatctctcccctcttctacacaagaccaaaaggaaacctactttctgtttaaagctagatcagttgtaggcaattaactttataagcttaactttgccagtcctatttcacagactgtatagtcacacaaatagtggaagcatcgccacaaaacagactgccttacccatgtcatttttttaaacacagcaaaaagccatttctcaggtttgatccgattactgtgatctattttttgatcctgtagccactgactccagatacatctttattactgtacaaggaaaactgttaccctgaggtttaaatttccgtatgttcaccatgcctcttctaagaatatatatatctcagttttaagacaagcctctcatgaaagctgaggtgaagaggaacagatgacctcagagataagtttcttggtttgttgcttcaactctaaagtgacgatatagcctcagcaatgactcaaagtctaggtatcccaggactgtgaagtgattaaataaatggaaagagattctcttatctggactgctagactaaatctctttaatgatgcccaacaaccaagtatgaacaaacacactagaagtcattccttcaagatacaaaagtcaggcacgttgatagctcttcattcattatgggagaacaaacaacttcaactaagaattatagccctaaaaaagctgataataagaccaccactaaattaaattcatagacactaaggccttggcatattctgtatcccaacaaccagtatttataagaaatgaaaaggataggatatatacatattagaaatcaaattgtgtaaaaaatgttaaatgtcatgaaatggttagagaagttgtgacagaagttgaaaggaaaacatattcaagctgagaaattatgtaagacttaaaaacactggacttcggtctttacatatacatgggatttaaatatgcctacgtggaaggtatgaggataggacatgtctattggtggaaacaagttggacgaaatgtgtagcgggcatatagaagagactcaggccattcagagaagtctgtttgataggaaggaggaagataagttaggagtagcccttagggaagtacagaagaagggttcaaagaaaagatacctaaccagcctgagtaatcatggaagtttcctttcagaatgcagtgcttgaggtgaatcttgagagagatgtaggaactagccatatacattaaggtgcttaaggtagaggaggtagcatataaaaagcagagaggcatgggagagcatggtgcatccaggacacatttactctggtagtcctaaagcaaaaacaatggtgtggagagccggcgaggccaagcatgaaggacactgcaggacacactgaaagagggtaagcctcacctttagggtgccaagaaaaacatttaaagttttgagcaagaaagtgacatctaaggtgtattttaggaagattcctctagaatcagtgttaaggatgcattacaaggaatgaggctagcagtaaatgaaacaattaaggggctgttataccattgtaagtctactttcctcgtctgtaaaatgaagacaggcaggacctatagctaatatagggggagatgataacaaaggagggaattctctatgaggactcccaggtttatttaactcattggatggatggtggtacccttcatcagaataggaaacatggaatagagggagatgtgggaagaacagattttttttttttttttttttttttgagacagagtcttgctctgtcgcccaggctggaatgcaggggtgcgatctcagctcactgcaagctccgcctcccaagttcaagcaattcgcctgcctcagccacccgagtagctgggactacaggcgcctaccaccacgcccggctaatttttgtatttttcagtagagacagggtttcaccatattggccaggccgatctcgaactcctgaccttgtgatccgcccacctgggcctcccaaagtgctgggattacaggcgagagccaccatgcccggccagaacagatgtgaagttcagttttagacgtcttgaattttaggaaaatgcagttaagtgtttaaaactgtgggttttgaacatagatatagttcagatcctggttctgatacttaccatttgtgtttcttggacaagggacctattactgtcctctcctcttcctcttctgtaaaatggggcaacagtggtaactatagggtgacagtgaggattaaatgagatcatgaatacagacactaaatataactgctgttttgtcattcatattatttgagataactggaacatccggactgagatgtccaagaggcacttttagaacatagtctgaggtttaaatgcaaaagacatcttggttgtgcacttaaaagtaaattatactgcaattaaaaaaaaaagttggaagaattggggtttgaggcatttatttgccaacttattggataaggagaagggttaaaaaaagacagccgatcagaagcaaggtaaggcatggttattaaatatcagagacacgttatattgtatgaaaagggcaatccttattttcttgcaagtaacttgatgaattaaaagaaaaaaaaggccgggcgcagtggctcatgcctgtaatcccagcactttgagaggccgaggtgggcagatcatcaggtcaggagatcgagaccatcctggctaacacggtgaaaccccatctctactaaaaatacaaaaaattagcctggcaaggtggtgggtgcctgcagtcccacctactcgggaggctgaggcaggagaatggcatgaacctggcggcggggagcctgcagtgagccaagattgcaccactgtactccagcctgggcaacagagcaagactccatctcaaaaaaaaaagaaaataaaaaatgaattccttccactatccaagtaaaactatgaacttggaaggaagaaatgggagaaaagtgaaaatagtaacttggaaccaacccaaacttggaataaaacttggaaccaacccaaatgtctatcaatggtagactggattaagaaaatgtggcacatatataccatgcgataccatgcatccataaaaaaggatgagatcatgtcctttgcagggacatggatgaagctggaaaccatcatttggagcaacctatcacaaagacagaaaaccaaacactgcatgttctcactcataggtgggaattgaacaatgagaacacttggacacagggcagggaacatcatacacctgtaatggggtgaggggcagggggagggatagcattaggagaaatacctaatgtaaatgacgagttaatggatgcagcaaaccaatatggcacatgtatacctatgtaacaaacctgcacgttgtgcacatgtaccctagaacttaaagtaaaataaaaataaataattaaataaataaaaacaaaaggcttctaaagtaaaatacagccaaatgaggaggaaggtcatcataacaaatacgagaacctaggatttgtcaaataatacatattataggcagatattaacaaaggctgtgtgaaagtttaagagaatagaacactactcattatattttcaaaaggaaaaattgaaaggatatacaagaaatgtatgaaattggcaactataggaagttgggtgggaatggtacaaaaaacatagggaacgaaatgagaatggacagttttgattttgagccacgttaatgagttatatgttcaaattataaatcaacaatgataggaaagaaattaaaacaaaatataaacagaaataaatgatcctaactgtatacctattgatacataacacacacacaaaaaaactaatctgtaaatttgtgaacatgatactcatctaccctcagtgggatctattttaaagacaaaaagagtggcaaaaaatcctgcgctctacttggtagatttgttgtctacaatggtcttggtggagtaattccaaaactattttgtactaaaaagacgttgctatcactgggaaacagagttttcaccatgggagaaagaaaacacaaataaggaatgggagatggagagaaagtaccctcagatgttagactggaattgaatgtattagcatgacattgtgatttaaatgaataaacatttttaaaatacactcacacagttgacccttgaacacagggcccctacccccatgcagctgaaaattcacatataacttttttttgagacaaaggatattttatacacacacacacacacacacacacacacacccttgtttgctcacggaaaagtttagaaacaatgacaagtcagtagcaatgagcacaattcttagatgtgtccgctgtctaaatatcattctttgactaaaaggaatcaggattccttggagaaataactgattccaggtatgggggcaggaaaatacaatgtaaacatagatatcttcttgtgacatgaaatacaaaagagcttaaaaattaatgagaatatattaaaaggatacaggagccactctgaaggggttcccactggccaaatccgatggtaatgaaacataccatactgaacccattgtaattttctaaaaaaaaaaaaaaaagagggggaagagtagggaaggcaagctcttctttattcagaaatgcctctacccaagtagaggaattacagaattagaaaatcacagttttataaccacggacataatatttgattcagacaaggtttaccaatgctgctcaatccattaagtaaagggccattagagaacaagatcttcaggctcaaaactaaagaagacagagggctcttcacaacgaagtttgctcacaagatatgtatacacaaggttacttattaattataaagggacaaaaatggagaaccctacaaattcacctacactcagtaactaaatttatatcttgaaccaaggatcaagctagtaatagggcaaactgatattatgtccctcttgaggcagtgttacaaggaagttggcagtatcagctatgcagggttcttgcaaaagatgtttaatctgaactgaaccatgaggaaatgatcaaacaatttgtagaactacagaacattctacaaaagagcaggtggattcatcaaaatgtcaatgccataaaagataccccttaaaaactccttaaagaaaaaacaggtggcaagcagggtaatggttctagattaaaagagactagagaccatatccaatgtgtgatctctgatagattctgcagcagagagaacaaagtaactggggaaatatgaacatagactatataatttcaatgtaataatggtattgcgtgtgcccaggaaaatgtctttattcttaggcgctacatgctgaagtattcatcatgatgcaatgtgctttcatgtggcttagggaagaaaaaagatgagtatgtgtgtatacattattgagagagagagagaaagcaaatggggaaaatgttaacagttgatggatctaggtaaagtaaatacaagtattcattgtattcttctttcaagttgcctgtggttttgaaattttttgaaataaaagttgagggaaaaatagactagaaccttctgaaagacaaagatgaacctaacacagtgtctggtataaaagcagatactcaattttaaagtcatttttaaatgctcatttttctaccaaatgtcttatgggttagctacagaaacaccatttctttattaaacatagtatataaaatataaaaaactgcatgaaacaatatgtcctttctgtattagaagacccagaaattagagattataatcattgtcagtttccccaagattacaaaatgattccatttacttatcaaaaaacattcaactccagttaggatcttgctgtcacggtgttcttcagtttcaccttagagatgactgagtacatcctgaattaatcctttttacatagtattttctttttcagtattccctaatgtggaagacttacaaaagttattattattagcagtagccagagaaataacccccaccactaggtattgctgttttaataaaagtgattgataaatagagataggtaaataggcagaaaacacttcctacttaagagtgttcatatatattattttatttttgccatcttgtaaagtaagcagtttgattaaagcactgggttttactatcctgtaatcttaactgggtattccacttgccaacctggcccagagatggagagatttgcttcaggaaagggaaataaacagcaactaacaattatgtgattactaacaaaactaaagaagacagagagctcttcacaatgaagtttgctcacaagatatgtacgtacaaggaaaagtgaaattcagtgtatttaagctaatctctacttgaaccttttaaaagataaaaccatttgagcagtaatttagtactaaattaacttggtttttttctccctatctttgaagttttcattgtttaaataagggtttctgcaagaaaaatgaagcaatgctccttttttattcaaaagaagaaatcaaggggatgacttgtaacatccaggaggctggatttatacagccatattcagcaaagagccaaataaatatataccacataacccattccccaaaactgtcccaaaatacttcaagataatcaacttttaaaatcactgtattatcatgctgcatagcctttttctactagcaagaactgaactctgaagggaagggtgtcaggcaagcaaaaaaggaaggaagaactctggcagatattgctcccagataaaggctttgaaaagatccttacgataacaaatttagcaggtagactgagaaagaaaggtttcatttttttgtttcttgagccagtgataatccaccctctatgttatctaccaaaatgcaaaatgtaactaaattcctagacctgtcccgatgctggcctggcagtgactgatggcggtaacttcatttagccaggcagctctgctcccaaagtcaaacgtgttgaaaacactagctaataaaggcctgggttttaaagcacttcccttccatctctctgggtagattttttaggatttattttattttatttattattttctggtaactaggtaactacacgcaccagacacaagcaccaaatactcctctaaggtggtggtatctcttggatcatcttcagaggagccaatctcattcaccccaagtcagcagttccacatgaggccctctgactgtgacccttaaaaagtcttcctacttctaaaggacttcactttttgtctgaaagtcttactttgacagcttgtaatttgtttagtcaattacacaattttcatgctgtaggaaatccccatattcaaatacaaactaccaaatggagacaatacattttcatgaatgtattgttttaaattttcacgaaaatcatggccataatatcaacacagtttggcttagcatcaagaaacataatcatgtataaacctgtgaagtcaagaaagaaacttgtgggttgaggtaccttttaggtaagtatgtgttagttaaaatgaaagatgtaaaaggaaggtgtttattctcaatgtaggcaaagagaaatcagccatcctacacctacaaaccaagacagttagttaagggaaaaaagataaagagagtattttatgcaaaggtaaccagctgaaggctgataggcagaaccactttcttcctcagtttcactggagaatcatcagtcttccagtcccatcaggattaagctgaaaagtaataagaaatgagggcaatagagagggagtgggagagcaattgaggaagaacaacctaaagacaaaacagtgtggagtttgaatctgatgcaagaagtaagaatttgagattaggtttctgaatgggaaatgttatgatcctgtcctgaaaagaattagaattgcagtagctagcagaggactagagtagggggaactggctaggagcctcctgttagcaaaacacagtttggagagggcactgatgtttccagagaatgtcacttagaaacaatcagccccattttatttcagtgcaagcaggaaagctaaggaggggaaaaaagactccaaatttaggggccttggagaccaggatgtcaatggtgtcattggtaataatggagactttgagaaaagttgatacctactgcaaaaagattaaaggttcaaattttttaaacgttaacttttaggttaatcccagccaagtggagatatggcacagacaatgggagtcagggaactggagaaccctttgttttcaggcagattcttcccacctcctctagggacggcataactcaattccaactagacactgcagtccagtgctggacagccaacgaggaatcagagcacctaccttcccaaggaagtctgccaagagcaagatacttattctaggcatttttaaaagtctatgtcactggaatatcaacttcaaacactgagtagcatttaaatatatatcacagcactttcatttcaagcctatttaacatttctgaaatacctagatcaaaatgttaggtcaaatgcctgtattccagtaaaacatctactaaaagaaaaaatttctcccaccttatctcccttaagataatcacctcattcaagacacctgtcagtcataacaggtttttctcagtgctgggtttttctcaaccttaacaccaagtttcttttgagtaataataaaggccacacgtcatttgagctgtgcatttgtataaatatctacatcgcccttttttctaaccctagttcaaggccaactgcaccaaagcttttgagaaccagcacttggaagatcttcaaagagaaactgcccattaaccacaacagcagctgctggctagagcctgcaatttaaatctctgaaaaagaaactgtggcttctgaaatttaaacaaggaggtgccacttgtaattacaaacattccagtgggttccttccttcattgatggtttccaaactaaggctttttattcgattttgctggtgctccccaaatcgtgaatgtaggcattcctttgtgcttttcttgtggcctggtcaactcagagggggcggtgcagggggcaggttttcacctgtccagggccattcggacccctcaaaatcatctcatgcataattccctgtttgtctggaaacaaaaaaaccaaatgttaaatgcttcagatttatagtccatatttaatgaaatttttgagaaagagcctcaaaaaaaaaaaaaaaaaccctcacatttcatgaaccttggaaaacggaacaattttcagaaaaaccaaagactttttgaaattaacactgaagcattccaacatttctagctgaagttaaaaattcacattttaaatcaatggagcaaatattaagaagtaaaggtagtaaccttttctctccccaccatccttcaccaccatcccacaaaaataaggcccaaatacttacagcctgatgcatgagtttcccacaccaaagaaggcattttgtgatcacttcagttacagaatagcggctgaaattagcacttagccagttcgaaatggaaagagacatttttattttaagcaatatattcacaaaatgcaaaggtatttataccatggaggcctttaaagacaaatatacgaatggggtatctcatagtcatcaaactaacatgagcctttcctacagaagtcctcacatggacggtaatcattatgggaacaattggaaatggccagtctcgccaacggtgctttccagcgcacgccacagttgagggactagctacaattactgcatatttacacaactgtatttgcacaacaataaaactcatcttatccgatccaaacaaaaccttgctcaaaataaaccaaaccataggagaaggtctcctcagtagaagcaataatcgtgctgtagcttctctggcctctgcctttgctttcaccaactgcaacaagccttcattctctcttcctcagtaaagctaaggcaaaaattcggtacatccaggtgagaatactgtgcgtacggccagataataatactgtgataaggagtggaaaaagaggggctgtatcttagaaatcattctaaaagtaattatggaagaaatgataggatgttcaggatttatttaaagtaatctgaggaaaggaagaagcacagaggggatagagcgaccaggggtggataattattgaaactgggtgatttgcatgcatggttaaatatggtattcttcccactttgtatacatatttgaaattttccataataaaatgggaaaaaagaaaaatctgatcaatgtaaaaaaaaaagtcatccttcgaaaataaaacttttttttctttaaaaaacaacaaaaaaaattctcagctttttcttggtttcatgaaaagaggcaagttcctggtaagaaaatcaagctctgttcttgttcttaagaacatttccttttttccttagttatacagaaccagttctactgctaatattaatccttgaaaagacaaataaaaaactgtagaaatctaaatctgagccttcagaagcctggtttttgcatatcagacttattccaatgacacaaatccagatttctcccctatgaaggtgctttggatgacatttctgttgcggctgccaaataaattccagaggtttcaggatcatttgtcaacaccaaagacaatattaccaagaactggtcctttcttcccagaggtcactcctctgatccatgggtttattacctagagcaacaattaatcttgctgccttcaaaatacaaaatatttttagccaagatagtgtctattcatgatccatatctctgaccaggcatccttgccaggaggcggaacagaaggtccactggctggacatcaagggacctgtccctatccaggatctgtcgttaacctagccttagttcaactgcagagtaagattcttccctccctggccttcggctactttacttcaaaatgggatttcaccagatgatttctaatatctttcccctctcaaaaattccatgattataagaatctctaattcctcaaaaggtaatatttttaaaaacagctttagtcccaaaatgttacattttctattacataatttttaatgtgaatatgaatattgtatgtgggcaagtttttgtatcctgtgcatatatatgtatatataagtatgtatatgtatgtatttgtatcactacttatacatacacacaaacacacacacactgataccattaggtgcttatatgggactaattgcttccaactcaaagcagcaaattttcaattctgcaacagatgtcgctgtgtgatttctcctttctgtgctggattttcagttaaaaatgcccagcataatggtcaaaactattcttcccaagaaaaacgtacagcatttgaatcctttggatttattttgaattttcttcatctgctggtaaatttccattcaaattatagcattgattagtttggcccaatttaagagaatccccacattaaaatgcaccttttgctaaaaacagacacacacacacacacaaaatcatttctaaaatgtaaattctaagtgaccaattaggcattaaaatgtcacgtacagaaatcccaagagaatgagacagtttatattcatagcaatcttatcaatttttaaagcctaaaaatcatttagcaatataggccaaggaataataaaaattcacttatgtatgagactaaaatgtaccaggtgtgggaaaaagtcactaaaaactccaagagcaccatcaataagaatacaatttttggatgctggttttcacagcatttctttccaaataaataataaggctaatgttataattgcaagacatcttaccaatctgacattcactatcaaccacttcttgacacatgtcatagaaaagtgacatctctttcccttcaaccaatatatcctccaacaacatcaacctcaacaggtagctagcattgtcttctgttgaaatttagagctggaagaaaggatttcacaatctctctgtggagacccaggaatccgttaccttctgggattttagagagtgtggagagagatgagcaggcagtgagccggggaccaactccgataagaatatgaagtcaggaagtgagagaggaaacgaaagtgtcctgcctgttggcgtcttccctgtcccactcccctttaccaggagggccattggggaaaactggataaagcatgtacaacatccatatgaataaagctctttgttccagagaactgcctgctcttttattccccccctttttcgtatttgttcatttcaaaagattgctcaatgggtctcttgttcctccaaaacgtcccaggcaaataatgcaagcttgtctcgtcacacaagtcactaaatgaagccttgtgcgtctccagtgacacactgtaaatataaagtggcattaatgagggatattttatcaaatctatcacagacaagtgcaagtccctactgcggctattcaatctgatgcagggaaaggcaacaataacagggcggcacttttgtaaagtctctatccccggtttgcaagccccaacaggccaaagcaagcaaaagtcagcccccctccttcccatcaccaccataaatcccccatccaccagccatcttctctaatcctgaaaatgataagaggggggtgatcagctactggttcactcgggatcgtaaacaacatcatgcatgcaccttgaacgtataacaggcgtgattaacactgtggagtgagcttaagcaaacccatttttactgcatttcattaacatccatttcatccaaacatcacaggagaaatgagaggagattttctgcgggggatggatggcttcagttacaggagaaaacagaaccaggacccacgcacgatggtcctaattcgctttcccagcaaggatgtaaacgaaacaagcctaatgaagtcagatgcaccaacaggtttctttaaccctgggagtgggaactggaggcctctgagaaagcttaaacagaactgaggaggaaaagtcccttggtgcccacctgaaatttacccctggggtatgggaccccggaatgagccaagacctcctctcaaactcaccacgaaatatatatatatgcattaagagaaaaaaattaagaaagtcatctcatctcctcactacaaatcatacccaattactttctaatttgaacacaatctgataaccagcatacaaacagggatgtacacaagagcaagaagctgcttccatggtaactggcaacagaattttcatgtagctttgacatgcacggttgagttccagaccgctcctaagtcagcatatatccctcgcagggaaggcaacttctcaccgcgagatagttacaaatatagtaccgttgctactacccggtgccttcaatgagcagtcttgacaggggaggcataatctaatcctacttctgctgccaagcgtcattgcacgactcccatttttagtcaaaaagcaatatccccgaccacagctttccaccgccccccggcttttttttttttttttttttttttttttgcagccaatacaagtctattgttgcctctattatgcgccagttaccgagcctttactcacgctcacgtttaactgacactggcgctttttacaatgcagcagcacgagggatctctttcaggaacattttattgaacccatccagtcagaggcatcacctgaaatgaagttgtaaccacaccggcatcggctgaacccaattatctcgtaactcataaattaagaattcacagaggaaaaacacataaacaacatccggagacagtggcatggaggaaaaaaaccctcagcgctggaattgacgctgctgccagacgccccccaataggtttcccaagccgagctcctttgcaagcctattttgggggcaagcagccaacccggcgtcccccaaatctcaagctagcacccccacacatcccccgtctcctacagcgtgtctcctgcggtgtttacataactgtgtgtcctctagcgtgtaaacaaaaggcacagcccaagcggagaggcgcccctgaagcagcaccgtggccccaacgctgtgcccgcccgggcctggggctccgcaggtgggggctgagctctcggcgtcctccgccacttgttgctcccgggtcctgcagctctggagctgcaaggaggggctttgcaggctcagagccctgctgcatcccctcctgcatcgccgctcgcaccccgcggccccgtgccactcggtcccggcgcccgcctggagcctgcagcaggggccagaggacgccgcgcggctgccaagcgcggcgaggtggcgggaagggaggctgggtgcagcacagccggcctctccgctgaggaagagctccggctcccttttgttagcaaaagcaaacactgccctcttctttcccgaccgcgccaacgcgcccggcacacgggcagccacacatcgggctccagccgagtgctcggtgtcttcagggaaggcaccgggcgtgcagagccgcccctgggcaaattcccaagactgctcttcacgcagggagcgcgcggaggcccgcagggtgcccgcctggccgcagaggccgcgacgccccctccgccaccctcgggccgccgaaagaacgggcagccgggaaatcccgtgtccccactcgtggcagaggacgctgtggggcgggcgggctgcgggctcccggcgccttcccgcagaggcggcgacagcggccgccccccccgcggggccgggccggggaactttccccgcctggagccgggccaaaaagacccgcagcagagccgagggggcggagggctgcgaacggccggagggaaacacgagaggcgtgcagtttggggacaggggagaaaggcagagcgcgttgggggaaggggcaggggagatcagacaagtctggggatgtcctggggaccggggagaaatcacgccgcgggcggctgggagtcagccaccaggaggcttcggggatggagaactgggggggccctctggagaggtgggggcgaatggacagccctgggaggtgggaggacctgcaagttacggggagaacggcgagtttagaagggtccggaagggttgaggttgtctttgaaccatccccttcccccatgctttacagcccccgggccccccattctcactccactctgcaccccgcgccaagccggggagagaaggtgtgggtgcagccatccctggggactctcattcacacttagccgggcaggggagaaggggctcacagatgccctcagccccttccctctcagccctgagtttcctctccacactccctccgcttcggatgtaggaagtggggggaggttgtcatggaaacgtttcccccctctgtggccaaggctactggggtgccttcggagatttaggggccaaccggtcggtgcccacacctacctgtggggatcagtgccgcggcggagaagagcaacagcagaagccggagccggagcccgggaggcgccgccgccgccgctgccgccgcacactgggatccgctcggcagcactacactcgccatgtcgggcacctgcctcagactggcggcgttggctgcctccggagcccgagcggacagctaatgagatgctaatgacatgcgctggaggcggagtccgggcagaccaatcacagcgccgcgagcccaacccggctctcggagggcctcgctccctcccccaccccgccccctggcgctggcgttcggcggcgcgcccgcgccacctaggggcggggccaaggggaggggcgtatgcaaatatgtttatgttaaaattcgggttttgctttccccggatcaaggaaaaagtgttctcccgggcgcctggcgtgcaaggactcgggctccagggggcgggtctagcttcttgtacacctttattaggaatgtttatagcaatcgctgtatcagaccgacgactggagaatctcccttaagagggtcctctgtcccgcacaccgagtgcatctggcctagcgaaccagacgttgcaaatttccgtcactcaccttgcaccgaaggaatagatctttgggaacgggggctgtgcgggagtggagagtaagaaggcaggtccccggattgacaaaacaatctgggagaagtgcatgcgtgctttgcacgtccggcggagcgggagagcccgctcaacagcctagcggtagactcggggatagttggagaaggcagccgtagagtcgggttctgagattttccagtcggtctttttgcggcagaatctcgggaaaggtagatcgaggagggtatgctcaggctcctccgcttgtcgagggtctcctccctggttttaatatataggtgtgtgttgaatatatgtgtgaaatatttgtaatattagatatttaagattacacaacaacggaaaaaattagtcaaggcttcaggtgaagagcgggggtggtgggagttggggagagggagtgtggtgaaggcagggtctgccgtgttcctccttcggggctcaaaccctctcactcctcctctgcgcccccagcccttcctaaggaagctggggaccaacaggtgctccgagcttcccctgtctctgggagagcctctcctgctaaagcgacttgcatctccggactcactctccctccccgaaattctctttgctttcttttcagccaggcagccggctctcttgtttgtctgctttttaattacttattttcttcccctctagaagatcgtgtgcgctctgaccctctgttgctcaagcatcaaattgaaggacgagccatattaagtgtaaaggtttataataatttaagtattcatagaatgcagaacaataagatgtaggaaatacaatttgcataataaatatcaatatcacaacagctaaaacaaaccatgacaaattatctgtggctaaatgaccaagagattactgaatgtaaattgctaagtctgagctatagtctagaagagctgcgccaaatgacttccccagccttctgtcctcatcttgctataaaataaataaataatacatatcaaaaaggaagtcatgatctgccaacccaccaaatgagttacacttaaaaacagcctcctattatccattatgcataaactaatttcgagactgcccggtcttcacagccctggatattctgctctgta

SEQ ID NO: 82 - DNA, 194316 bp, Homo sapiens
  source 1..194316: mol_type = genomic DNA
ttatctgggatcagaagacattttcccacaggaacaattttataaacagtggtgttccacaaatgcctgcttgtgccacagtgtacctgaaatgcaacattgactgtatgattcccaccaaccattatttattcttttctctgggaaagtgcattcctcttgggatgcctgaggctcatctctccctctgcctgggagcctcagctatagttttttgggctgtgcagcagtagcagtcaggaagaggggagggaagcaaccttcccaaaaaagagatgagtgtagagagttgatatggatgcctctgggtaacttgttaatgctggaaggctgaagaaggaaaccaacagtgcgaactggctacttcccaactgttctaaaagaggcacaaagggcagggacattttcgtaaacagagatcatttctaagtcacatcttcataaacagggaaaggcatatagtaaaacctcccatttttaaagaccagtatctggacttgtaattagccaggaaaaatattgtgaaacttcttggtcagtgatgaaacagtctcaaacatataacaatgagacatagatcttgcacctatccccaggcctgacaaatagtaagtgctccaaaaaaaggggatttcaattttaattaagtactaattgagtgaattctgtattgaaaaggacaagactatgtgtgggccagttaccttaattctcattagcatctactaattctgaccctcttatagcacacatcctaaccatgaagagttggtcggagcactttcaagacgtcacctgaacattatgtcacctctgcgggatatatgcatctgtctaccccagcccaaagcaggtggtgggtctcttcataccctctctgatgtgcatcaatttctaggaatttctagtactatctccacatcaccaaatctgaggaaacaaaagagataaggagaggaaagtgaagccagtgaggatatccaagcctgtaggaccttaggtttattctggccagtattacctgctaaaaaagacctacgcttttggtttccctttggtcacttatttttataacacatgcagacgtattttggggaggtgtgcctctttcaggctagaatttagtctgctcagcagacccgggtcctgtctccttcaggttttagaattgcataacaatttaaactcattttgtatgtgcaagtactttgaaaagaaatatactattaagactccctctggtaagaagccttccccacccccacgcccaataaactgatctgttaactttttgtttcagagactgtgctttctttttattgctgcatttgtgttctacaagacagcctctttctccaagattaacatttcttatgattgttcctgacaatggattcacttccagaggccctgctaaggataaccaaaaaagggcatggagcaggctggttttggcagcgtgcacgcagtttcagagctttttaggtcttgggttttctgatgagtgatttcctgagcatgcctagggaatgacaggcatctccacaggcaggctgcatccaccttggctggggtgtcgtcattggctgcctattagaaaaacgacaggacaatgcataccaccgcctcccgactgtaaacataggggatatgtgttcacttagcatggacttctgggaggggccaaggaagggcggtctggagttttattgaatagagcagtgtgtattcggctgcctgcctgcccgcctgcttgctctctggctgtgctcctgcttaaagaaatcagtccttcctttccgacttagtcctcgggaagaagtttcagactacaaggtaaggcacagaaggctttcttttttatcttctagagagaatctggggactttctccggctttcagtcaacattcctggctaaggtagctggagatgcaagaatgttcaaggcaataaaccatgcaaactcccgagcctgactgggcttcactgccatacggatattcccggaaggcaaacaggatgagatttccagttttgtttttagaattgggacaagaagagtgaccatatagagacttacatttagggaacactggcaactttgattaggatagccttttgtttaggacagccatatgagattatacctgatatccaaaggccagtgttagcaagcctactgcaccagactgctcacacagtctcttctgcatcttttattgccaaagatttgaagaggttttgctttaaaaacaaaatcaacaatcctttaggttgatgagaagccaaaagggaatgatttttttaaccaaaggcttttgcgttatagtctgctgccagtatttaaaactagacttccagagttgcaaggaaatacggtcagagatggagagatcactagcacctagcactggttgggttaatgtcactgatgggatatttgctaagacagaagatgcctaggctggtctgtttcctataaaacctaataacaagagaatgcatgcgctagtgggtgtgtttttttagaaagcacatttaacgtcctaccaaactattttttaagaaatctttttttctgtttgaaagtgtgcctgagtgtgtctagagaatctaaagagatgtcgattggcaatgtgtttcagaaaggaaggaggcaggcttttatatctagatagacatatttgggtgtctgaaacagtagtacaaggcagctagttggtagtagcctggaattccttttagaaagagctgatggcaaggggtgggggaattttagtgctgtggcaatacatggtcaaaaaaagtggatgagaacaaagtgcttgatatttatagatgccttctattaacaggactatgcagatggacttgtaaactgaaaatccttctaatgtgtttgtcaaaaccagacatatacagctagaacctgagtgaagactagatgctatatggcaagcagggtaaatctgatgattttttagtagtgctggctattaaagactaccagctgcaaatgactgattcaactggattttattccatgcaatgcggtagtttggggttgagattcattaaataaagttttctctttgtatttagaagtttggggataattttcttgggaatgcctatttctccttctagaagtgatatatgagaacagaattccttgtgaatttccttccctggaacagttctgagtaagtgtgagagaaaagctgcaggcaaaagctatagtttaattactgtccttccctcgaagagatcaagttccaaactattttcacagtgtttttaatgtcaatcaaaatatggagagcaatttttcttttaactgttctctaaaccatgaagggaatgcagtttggaaggagatctataatcttgggatttgaggataaattccattttgaaaccaacatctccgaatccctgaaagttcaaactgtgctatgaccactctctccagatcccccatcccccttctcttgggctccccacccccaacaaccataaaaacactcatttttttccaagtaacactttaggtgttctgctgttataggtagagatagagtgagaggatttgagtttatgctgaattttaggcagttctttgtgctacttccttcctgttgaatgttacctagaacacatttccccacatagtgaggccaaaggagcacaatgaaaacagtaactttcatttcagaaatataatcacaaaattccagaacaaaaagtcactaagagttgatcctaggacacacaaggaatgtatgtacaatggattgatccataagtaaagtgcagggttgtttcaagtattcgaagcaaatagaaggtgtaatttaaatcattccagtcaaaagattgccttaagtaaatacacaattcttatattaaagttaggagaaggagaaccaggctcaaactgcagtttaaaggattttaaatgagatacatgaaagcatttcctgacagtaaggcaactgccttattatgagaatcattaacaattctaattggctcctgtgactggcctgagaatctccttgtcttaggtagatagaataagttgatcttatggccagccatgtaaaggtccagaatctagcccaggtattctctgttctgataaataaaatgcacctcagcaggcatttttgtagaaacacatgtaattgtctccatttgccattttcttgatagcatgattaccagttagtcattccttagcaagacgcaaaagtgattcagagatgggcatgaaaagagatttgctagttccccatttgcctgtagtctatcacatgtctcagaaatgtggtcgggggacaggaaaaatgctgatagagtggtatgcaaatagcatggtaggactaaggaggaggttagaaagatgctgccaaagaattttcagacttcaaaagggcgttttctgcgttaagttctcttagggcctgagaagataccattagctccttactgaaagtccttcatctgtcaggctaatccaagtttgctattggagagatgcccataagtcctgagtagatgggtagtttaaagagaaacttttggcacaggcttaacttatgagaaccactacaacatctcagttctagtattggttcctctgcttaagtaaccctgacctttttgaggaaatcatcagcttttgacttcatctgttgagtgaagaacggacattggtaatgcttctccgatgtcccacagtggttaagacgtccaaatgagatgaagctgtttgctccctcttccctgcagattctataccctgaactgcctatcatttgagtcctctggacattatgctcatcttggctggtatcctccacttcttacctagtatccctaatgatctcttcctttctcgtatttaaggacccttgagtgatatcttctcgctcctggttatttctagagccctgagccgtgtccagtgaatactggtctatcccaatgttgtctgaatttttactttgatgatcacagactaagaggacacaaatataaggaagtggaataagatgggccatcagtggtacaaggcaccaggaaatccaaagatccacttgagcataagaccagtgagaaagtgctgacaacagaaagcccttaagtaattgaggcagcttctctgcctccagccaaaagcatggaatgaaccccggaacgtcatgcctgggccttgtaggaagggcaaggaaggcaggaacacctggctgtggttcctgttggtattgaaaccagactgctccacggagctcgcctctcacctctttgcttctgtctttagtgctcccagctgtaaccgaccctagttgcatccctaacttccttacccccaggcctccacctgtaacctcttccccagctcccccatccctgtaccggatagggagctttcttgatccaacattgacaatttgcaggggccagctctaagatgaggcccagagtacagcagaacactctagcacagataggttctagctagggaaagccacttgcacagacagaggagatgtcagagcatgttttgtggtaaggacccactctgcttctcaccccaaactcataattggcaggctgtgggtaaggctatgggagcggggtcggggggaaactatgacctgggctgtgagggaggggtgatgaggttgttccctgtgttgttcttccctgtgttgttgctatggaaacctttgagaatctgataaaaactgtgaacccttaaggtccctttgtaaacccacgcttcatgattgacaggtaagagacctttgagctggggcatgtaagatggggagtggggtcagatctggattcccatagaagacaagggtggatgggatcagaacatgagtggaggtgtccatgatctggaaggaagaaaagagggggtaaatacacagatatataggtggagattgcgtcatatgacctccatttcaaagaaaaagaggtcatttccagaaaagaagcaattttctatggggagctcgtgggggctagagaaatccaggaatggctgctattaagtgtacgtaaaaagaacacccagaagttaataaaaggcttgctaagcagcagtaagggaatagttgaaggaaaatacatttttaaaagattttagtatatcgggcactcattttagtacatggcttttctttgaaaatatatgtatatgtataaatgatgtataacttgaagataaattgctttttgatggtatcctgaggcttctggcattgttttgtgaatactccatgaaagcacttgactaaaagggaataatctcacttggagagaaacatattaagcaggaatatataattagttcctctgacacccacatataacattccccctcgcttgtctcaagatacattgctggggaaccaggctgacttcaccttgtgctgaagaccagaaggaccaaggcaaagtgcccaagagggccaaggaccagttggcatcaaagatattagttccactggggtcaggaggaccagtctaagccagaatggatatcagttacaaaaatgggctaagttgtgcatgacagccaggtgagtaaagaagaaacagcaaaaatcagaagtcaggcagagcttagtgaagtagtgtatggatgaataaggtgaagtctgggagagcacatggcccagtgttaggaagaaatagacctctatgtgagcaaactttggtagctcaagtaaagggccaggattgtaagacacagattaacgaacggatgaaatcacagggatatccaagagcagaagcccaaataggaccagggcccaaagagagtagagttagagtcaaggtgggtgagaggatcccagccgcggtccatggatatttactccatccctttccactagtgtgactcagctcagcgcacgtgtctgcctctttctgttgttctatcaactggaaaatttcttctgtgtttccaggtccagtcctgagagaggagatctgattggttcagtcaaagactattgtctttggcaaatcctttagtaggaggaggacatcaaaggcacaggcgcgcctaaggatgaattactctaatccaggcagtggtcacccctgggcaaagaagagctcaatgggtaattttagttagaagagaaattgagcatggaaggcaaattagctgaaatgtccaacagctctcaatgggaatcatttgaattttgaggtgaataaactcctagagaggcaaacacccaatgaatgatcacacagttcttgatgatcactgtgacccactgagccagtgttaagggagattaatctagaagtttgcaccactggtaactgaaaggataagaatcatccatctcagaaagattttgggaaaaaacattctggatattattgttggcaagaaacttcatatgaatcttccatgtgatatggctcccttcaaatgaaagcagtcttgaagatttaatatgtaatcatttaacaattttaataaataaaaacaagcacaactcaatgtaaaccacagtacataataaggtgaatgcataaaagctggtgtactcttaatcactggaagtttcagatctaagcaatatttgctatgtaatttttaatccattgagcacccatcatggtgtttgtcaagtggactaaaatatcccctgagttctgcatagttcggatcccatttgggaacttgtgctctgttctgggctcatttttctgaaaggcatggatacatatgcattctagggttagcatcaaaggctggagggagtcaggaggcaaaacatatgctgaaccgataagggatctagagctgtttatcccaaagaaaagaaaatgaggccacataaatatcttctaatatttggggtacttttatatgaacatgggagaaggcatttgtgtttctcaaggcagcagaacagaactgaatatataaattcatagaatttttaagctgggcaagaccttaggagctcattcagcccaaggagtacatataacttttcatctgtatgccagctccaaccaattggcatgttaagaaggattctgaggatgaatctaagctcagaggggaggggaaaatgtggtcactgatagtgatatctgttgtggaagagaagggccatatctactcaagtaccatgttttagtcttcattaatgtggtctgtaggtttttaacctctgggtggtggatccctgggaggccacaaagtcattgcaagaggtaaacaaatctgtatatgcagcaagtgcttttggcaagctactctgagtaaataatatatcttacatcatatgtgctactatttttctaattctatacatacattataatgataaaatgctaatttatttaaaagagttattgaattcatagtagcttttaagtttgtgtttttgtgttttattaatgagtggacttaaaacatataattatattatgtgtgggaaggttgggacaggaaatttgggatcttaagtagaaattctttttaaaatatgaaccagtgatctattttttattctccaaagcctagccacaccaagtaaaattatgtatgtatttgtaggtttcttcgattaatgtctgccctgtcttattggtctgtcagatatataaggacaggaacctctatttttttttcattcgtatatacccagtgcgtggcacacggcagaatctcaataaatatttgttgaatgaaataacaaaccaagtgacttgaccaaagtcatccagttaattagtggtaagatagttccaaaacacacagctcctaagttccaagcagttaaccttttcaatataccacattacttcccctgatagtaagagagcatgttttaacagttagcaaatttaggttatacaatgctgcccaatctgcctatatacccatgcatcttaaccagtatcttaatcagaatcaactgtagagctttttgaaaatacacatccctgagacctatcctctagagattctgattcggtaggtctagaagggggtccaggcatctgtagtttgtaaaagttccctggtgactctgataaaacatcctggctcagaaacagttctgtgcacctatcgttaaaataattgatagtagatgtatgtagttacttattcctcagaagcctatttctttagttttgaataatttctttctaaaaattatagttgcatatgccaaataatccgtttggccagaagagcaaaacctttagttttgcttttttttcagtttaagcacaaagttatcaaccctgtaaggtcaaatttttctgatgagatttccagtgtttgcttttgtaaaggactggaaatgtggcaagaataaaatttctcatggtatttcccacttccttttccagccatcattactaagggaaatttaggcttagggggaggggtgaatctaggagaaaaaaaattttaagtatttctgttcttaggaggttttgagcagatatttcgcttcctaggaaaagctgaagatgtttttctctgtttccactttgtggtgaggatgcacaaatcctgaagaggggagaagcttcctccacctccaccctcacccctacatcttctctagggcaggagtcatcacagcccctggtttagatgcttccctgggtggcccttttgaaagtatgtggaccctaagagacaggagactttgagtgcatggatgggggataatttgcttttgcagaaggacagaaaatttatctctaggttcttcctttattcggcagttaggaattacatcctctgtattgcacagaagaatctaccatattcagagcactgagtacatggattatattcactaaagattggagagccaaaagtttctctgcaagagtgacctgatctagtaagaatgtcaaaattgttactatatttgtacccatgctcttcggtttagagggcaggtgcttccgtgtgtacatagaagcagagcttgttggagaagaggagctaaaaaggaattagattagaatccacctctgtacaatggcaccatctggactcagtctccttcatctctaacactgtccccactttctctgcaccccaaactcatactggctcccaaaagctcattgttaaactttcgagaattttgagagccagttgtaaaacacagccattataaaaactaaatcatataaacttacaattaaacacattatatgaagagccaagataataaatactcaaaactcttcctaattattttgctatgtttcactattatctattctcttgaggttagttacatctattgtggctatatggtggaaatactgtataaaatgctgtgcaactgagcttctcctcccaattcttcattcagtgatgtcatattcagaacttgaaattgaccatgatggaagtaattacaccacagaaatcagcccatgctacaaagcagactcccctcccctcacccaagaacttgttgctaaacattgactagcacatcactgaccctaagggatgcggtggtaaaattagcctctgcattggagagccaagcggaatacctctgtggttcagttacatgcatattcataatgtatgcttatgattgcatatttgtttgtttgcttgcttatttatttctcatgctcctagaacataagctctatgaaagtagagactttgtttggctttttcagtgctgtgatttgaacctaaaaatgtgctgtgtcctgcacatagtattaataaatgagttaaatgagtgaaagaaataaatgtcaggctggtagtggtagctcgtgcctgtagtcccagcactttgggtggccaaggcaggcagattgcttaagggcaggagtttgagactagcctgagcaaaatggtgaaacactgcctctacaaaaaatacaaaaattagccggccatggtggtgtgcatctgtagtcccagctacttgggaggctgaggtgggaggatcacatgagcttgggaggtcgaagctgcagtgagctgagattgtaccactgcactccaccctgggtgacacagtgagaccctgtctcagaaaaaaacaaaaagtaaaaaaaaaaaaaaaaaaaagtctacaatttctactttaaaaatacctgaagccagtgttcatgttggagctcattgattcctcatgaattgtatcattgttcagtgtttagaacagtgcctggcacatgctaagtagcatgtagatttttattaggtaaaaataaaataagttatcttcataacagctaattttacagatgaagaaactgagttacgattagattaagtaatatagctaaggtcccacagctagtaagtagctgggtcaggatctaaacccgggataatctggaggcactgcccaccttctttaccactgtgctatgctgcctcttgctagttactccacgtcactgagactcctcttttgtatgtggctctagaaagaattgagatctatttgagaacaaactttggagtcaggagaacttgagtttgaatctcaaatttaccacttttttcacttacaaaatggggatgatttctcctccactttgtagttgtcacaactactagaagtaatatcttgaaactgctttgcacgtacatgatagacactcaattacaaatggtcagctattggctgtgatttcctgtggaggctacctgttagcgtggggcttagccacacactgtcccctgttgcctcctctaggccatcctgtagacagattaaaaagggctcactgcttctacatttggggtctccaggaggtaagactaggaccaatagatacaagttctaggaagtcctatttcagatcagcttacagactttctaaatagatatttctgtctctgaagcacgaacctcgctgctctacagaagcagacaacttccactgtcctttccaaccagaaggtttacctgcttgcccttatcaacaaatctatgctgcctttaacattttaaatcattttatctagtatagctaaagagttgtattattcctgagattgggttgttttgcaggttttcagtgttttagacctggaatgagagggagtaagaaaagagggagggagaggaaaagagaaaaagaaataaggagagagagagagagagagagagaaaggagaggacagagagggaggaagggaaaagggggaagaggagggaggggagaaggaaattggaatttatctggagaaaaagtactgaacttgggagagagactgaagagcaatggattgatagttatctgaagtcctcacaggttaaggatggttgagaagataagctagctcattcagctaccttgctggcatactagctatgtgacaggcactgttctggttgaggactgctctctcagagcagtaaagtaaatcaaataacttgcccaaagtcacactgctggaaaatgccagagctgttcaaagctcctccctaactccaaccctctccaattctctacagctatctgctctgtgtcttcccccaagaaagcgatggaaaccagagcaggaggtttccgtaaccagtcattataatttgtcagggagccatactgcagttcaactagacaagcacattgtcattccctgccatataaggaaacagagctaaacaccattgctttcactattgactggagaggttgctcaagttagagttagacaagatgaggatctagacctagagcagttaaattaaattaaaaaaagaaagaaagaaagccagagaagtagttttgtgttttcttttcctggtaccagagatagtttaacaagcagtttccatccttctccctgactcaacgggagattttccctgacattaggcactaaaggattcaactactcgtacaaatacttcaagctgttttggtgtttgattatgtcaaattttaagaaaaggcagaggatcagttcaggtattcaaaaggccaacatatccaaaaggtattcaaaaggccaagacagagctgcttctgtgtgggtcaggtagaaagtcaaggactgtatttctctgtccattgatttacaaaagaaattagtgtccactcaccttcccaggtgagatactacttattaagaaataaaatcagaaatactacttattaagaagactttacatttaagtttgaccttcttgtccaaagctaagaatattcacggggtcactctttgccttaagactcagacacaatgggcactttatttgtttgtttgttttttgagatgaagttttgttctgtcacccaggctggagtgcagtggcacgatctcggctcactgcaacctctgcctcctgggttcaagcgattctttcacctcagcctcctgagtagctgggattataggcacacgccaccatgcccagttaattttttgtatttttagtagagacggggtttcactatgttggccaggctggtctcgaactcctgacctcaagtgatctgcccactttggcctctcaaagtgctgggattacagggaccatgcccggccacaacaggcactttagaatgcaggctcagtaaccaactttatgaagggagaaacagaggcatgaacagttgaaactatttccttaaagacagccagttccatcttgccatacagagtgcccacattttcagataatccgaagaggcatcacttagtgtccccagggaaatgaaaaacaaaaaacaaaaaacaaaaaaacctgtaaatagtctggtcatcttctcctaactatcatcttggaccagattgcatctggagtactagtttattaggcatacccgagactgggtaatttataaagaaagaggtttaatggactcacagttccacatgattggggaggcctcacaatcatggcggaaggcgaatgaggagcaaagtcacaaattacatggtgacaggcaagagagcttgtgcaggggaactcccatttataaagccatcagatttcctgagacttattcactaccacgagaatagtatgggggcaactgccgccgtgattcagttatctccacctggccctgcccttgacacatgggattattacaattcaaggtgagatttgggtggggacacagccaaaccatatctgatgccacaacaaaatgcacaaacaaatttatttctggatggaggttagaagtccaagatcaaggtgtcagcagggttggttccttcaagggctgtgagggaagtctctgttccagccctctctgtttcacttgtagatggttatctttgtgttcacaaggcattctttctgaacgtgtatctgcatccaaatttcctcttcttttttttttttttttttttgagatggagtttcgctcttattgcccaggctggagagcagtagtgccatctcgactcactgcaacctccatctcccaggttcaagcaattctcctgccttggcctcccgagtagctgggattacaggtgctcgccaccatgccaggctaatttttttgtatttttagtagagacaaggttttgccatgttgggcaggctggtctcgaactcctgctgtcaggtgatctgcctgccttggcctcccaaagtgctgggattacaggagtgagccactgagcctagcctcctcttcttataaagacaccagttgtattggattaggggccaacttaatgacctcattttaacttgattacctctgtaaagaccctatctccaaataaggtcacattctgaggtcttaggggttaggactgcttcaacatatgaatactcgggggagatacaattcaacccatagtatgtcccaactcacaatggtggtagaaatccatatggcacattttctgaagctcaagtgccaaagaccctactgctgctggtattctatctttccactgggtctaagggaatgctttgctagaaatcccttggccttttgaatttgcctttgacatttactttctgcctttctcaatatgaaattctgatcccattaaaagtcaaaagaggttttcgaaatgacgcactgaagtacagcttcacatactgtggcctatctgtggacagctatgaaaccacggcggcagaccatctggtatgaggcctttaggagccaaggacggggctcagtgggaaggcttggccagggcagcctgcaagccagggaggcaggcgctgagaggggagcagcttcagggcagctggccgggccagggaggcagccacagagggaccttgtgcatgcctgcacagggcccaaagagggtggcccttttccgtcatttttatatatgctgatcacaaccacaaatccccagacacaaggaaaaatatttgaagcctacacatatttgcgctctgaatcatttgtctcttgtctttattttcctctctctcctctctatctatccttaaatttttatactttttctctcaacagtcctcctcactttatctgtctttgctctagttggtttcaagcgcccatacattgtgtcttgtctgcattttccatgttctatttttaaggtattttattttagcctttttgtcccttttttgtccctttcctaaagctcttcttggtgcccatttcccagctttggtcctgctcatggcttctctgtcttaggccaggggtagtctatagacaggatgactataccatttatcgtcaaactgggacacgttgaagagggaaagaaggggcagttaataatttccctaaaatgcagtcccgaagtgggactgtcccagtgtggagtggatgcttattctatccatggtgtggttttctgctttccacaaatctctcttcacctatcaaccactccctccatttatgtaccattttttttttttaaaccttttatgttctggtccttcttttttatttcaaccccaagaagctttatgtgttcttgtatttctgtcttcttttatctcctcctcattccttcactttactctactctgctctctatcttgtctcaccacttcaattcttcttctcccttgatttccttcttttgggtacagactggactgcagctcacagaggccatgcctgtctgccatgatacatgcaggacatagtccctgcatttctgaaacaaatcaaggcacagctgagcacatacacacacacttcaaaataagccaccaaatgttacaagctgctttgggtctcagatgagccctgagtggactgttcaccccttcagcacctctacccagagactagaacaatccctacaccacgcaagcagccatgcctgttactgttacggaggcatgttctgtgtatgtgtctaggctcgcacgggatgcatttcctataggtgtacctatgtacactagagttgaaaaatgatgaaagcatatgacccgaaagacaaaaagaaagtgacaggtgagctaactgtgcattgcctttgttatgacttcagtaatctggatcatcttatcctctaaagaaatgtataccaaaggcctagcaatggctgccataggttttttgttgttgttgtcaattgaaacagagtctcactctgtcgcccgggctggagtgcagtggagcaatctcagctcactacaacctccacttctcgggttcaagtgattctcctgcctcagcctcccaagtagctgggattacaggtgtgtgccaccacgcccagctaatttttgtatttttagtagaagtggggtttcaccatgttggccaggctggtcttgaactcctgacctcaagtgatctgcccgcctctgcctcccaaagtactaggattataccatgcccagcctgctataagtctaacataagtaacaataaacttttaggcaacaagatagaataaatatttttttcagttctttttaaatgttctcatgacacagtcatctgcaacttatggtttattctgaaaaatcacttcaattttccagatattccttagacttaaggttgtgcaaggaaggcctgaaactccttcccaacttgaaaatgagaaaggaagagtattttcctcttgtaagtcgctggaagccagtccactgatacctgaaatacttgacagaatggcactgtgtcagctgtcaggagctgctctcgtcttttttatttatttatttacttatttgggaattttgaccacaattttctttctctttttttttcaaatactctaaaaattaaagaatgaggaaagaagactgtgtccccacccaaatcttatcttgaattggagcccccataattcccacgtgtggtaggagggatccagtgggaggtaattgaatcatggggatgggtctctcccatgctgtcctcatggtagtgaataactctcacgagatctgatggttttatacaggggagttcccctgcacatgttctcttgcctgccgccatgtaagacatgattttgttcctaatttgccttccaccatgattgtgacacttccccaggaactgtgagtcaattaaacctctttcctttataaattacccagtcttggatacgtcattattaccagagtgagaacagactaatacaacagtgaaatagatattttatgaacggaaatacaggttttgttcaagttctctccttccttcctctctctttcccttccttccccctcctccttttctttctttctcttcctcctcattcttcacattcttccagtttttgtttcttctcccactgagattgatatggctggaaatgtgctattatgattgggcagccttgtgctttatccatggtggcctatagctctcttgcttatatatatctttttatgaagatcgatggtaacaaaaaatacttcacccacactctgctgggaagatgcgacggtggaatggaaatatctatccagagagctccctacgaccctaagacttgacagagtcatccccagccagcctggagccactgacccacctgtgtctgagtaactgggaaacaaggagtgtaggagtttgagagttatttttgttttttacttttttaaactttcatgcctttccatatttctgctcttagatattctgttaaaataaaacaacggctctttccatgggagtagtttctagcttgctaattcttttttgagagagtgtttgcatgaggttttaagtttttaaagtcttggctcttatattttgtaggagccctagactccagatagtggtctaatagaaaattagccctggctcctgcctcatgtccacagctgataatctgtgtgactttgaatggcctccttgtgcctcgggcttcttaattataaactgccaacagccttttcccttctctatgatgccaaggtggggagcaatgtgatctttaatacaaaaggatgttaggcagtaaagtgtcttaaaacacagacatggatttcctttcttcttcctttgaaatatgaagacttttcctggttggttttgggggaagatagaaatcatatattcataaaggacacaccccatattcagagttcagaatttggagtttccaataatcatctcatgcacgagagctgactccctctgctggggctgccccacccccagttccagcctttccttctttcatttttatttatttattttcttagagatagatagagtctcactctgttgcccaggctggagtgcagtggtgcaatcatagctcactgcaaccttgaactcctgggctcaagcaatcatcctgccctagcctcctgaatagctaaaaccacagacacagcaccatcacgccaggctaattttgtatttttttgtagagaaggggtctccctgtgttgcccaggttggtcttgaactcctggccccaagtgatcctctgcctcagtttcccacagtgctgggattgcaggcatgagccaccacactggccccatcctcatctttaaaagcaatattgagaatcatcttgtttggagaaactctgaaaccctacagtgctgaaaagggaggattgagacagactgccattcaattgaagcttttcctctaatgtagtaagaattttttttttctttttttcttttttttgagaaaaagccttgctctgtcgcccaggcttgaatgcagtggcgcgatcacagctcacggtagcctcagcctcccaagtagctggggctaccacacttggctagtttaaaaactttattttttgtagagacgaggtttcattatattactcaaactggtttcgaactctagggctcaagtaatcctcccaccttggcctcccagtgtgctgagattacaggcctgagccactgcacccgacccagaaaacttttttaaaagctttatctgaaaccaaagcacatagtgcacaatggcagactcttagactcttgttgccctcagattttctaaaattgtcttttatcagcatttaagtttctaacacatgagatcacatatgtgaaagtgcttgtgctttgtaatatctgtgattttactatctatagcagaatatattaaagtgtaaaagtgctccaggaacctaagaagagtagaagaaaagcatgtttgaccccagcaactgtgcttgcagccaggcttgaacgagcaatcatgtgggtgggttaaattgtttattttttatttttgagacggagtcttgctctgtggccaggctggagtgcagtggcgcaatctgggctcactgcaacctccgcctcctgggttcaagcaattttcctgcctcagcctcccgagtaactgggactataggcacgcaccaccacaccggctaatttttgtatttttagtagagacggggtttcaccatattgtccaggatggtctcgatctcctgacctcaggtgatccacctgactcggcttcccaaagtgtttggattacaggcgtgagccaccatggctggccaaattgtttatttgtattgttctttaaataaaagtttattttagaatacttttaaatttacagaaaagtagcaagaatattacagagttctcatatgccccacacccagtttcccctattgttaacattaaggcacatttgtcacaaataataaaacaatattgatgcattattattaatgaaagtccaacctttatttggattgttttaggtttctttaagccccttaaaatagaaaaatgtttcatatggggaaaatgtaatgttcacattgtagctatatagttggaactctaatacatgagtgaaaatggtttaagctaactcttttcttgaacatatgcttactggactgacaatctcttgaggactttccacctgtaataccttaggcctcttctgttctctggtttgtttcccttgagaccgttagcagattgctcagcctgacccaccctggtgccagatgttggaaccctcttgctgctgccaatctgactagtcattccaaacagatggtaatatccagcatcacaccccctcccacaatttcacagttttaggcagaagccttagagtgaacacatttacctggctgttgaattgctgaaactctgttcttaaagttgcttcataccacagtgacttgtgagagctttgacattaatagaaggtccaaaagaagacctgagtgacgttcccccaaatcttgagatctaaagactttggccagtttaaaaacactacaatttatggaaaatacctgttagtaacaaatagagaaattataaaggagattgctttttagaaatcaccccaatgaccgtattccacatcccgagcttccaagctttctttgaaatacgagttaccagcagacactagtggaaagaatctttttaattcaatctctgcctttgagcaacttgctgactgacatctagaggcatctcagtcttctggggtggcaccttatggtggaaaggctggactagatgtggtctctcttagttttaaatctgcttggattggggctttataacgttccctcagaagtcttgttggtgtcctttctaccagatttctttttctactgtttcactttcattaacaaattgcttcacaggggacaaaattctagatgtagttcaaatactagttacaaatttgctgccttcaagatacctagttatttgattgatcacagttgtttttaaagttcattttaagtagagttatgatcaaacatgtgcaactgaatcaataaagttgaaaatatatcacgatgaggaaatgtaggtatcttctttggtatcttcatatcaaaaaattaattgagaggaacccttactaatgagtgaaactaatattcttgactcagagaacttcctcaaagcctcaaaataacaacaatttgaattggtcatctaagtataaataaagttgggaagagacacctttcatgaaaggaatggttgaactaactctcaaataggaagacatcaaagtcaaggaagaaagtaagagctcacggcttggggtggaaatggttactaagtttagccatctgctttggtctttcctgttccacatgtagctatatagtttacataaaagtatctctccagaggatcagaaagaacagatttatggaaccagatgtgagttagcatttctacaggtgtggctctgcagctgaaagaacatgttgtaccagggatgaagtttcttattatgtaatcaatataaattaccactagacttttacagaggttgataaagcaaacacgtgtcattcggattggccttctggtatataaagagaccctgcttcacaacgtgaaaaaatgtaccgtttgacattcataaaagacttggtagaaaataccatgacaataatcaggcaaggttgttcccccttgcacacagaggggatagctggtggctagatggaaattgtgttcatatgtttttcttcatcaagaaaaacaaggaaattttcataaatatttttaaagtctctcagaatctgataagaaagggccaagaggatgaaaatgagaggactggggaaaaataacagaatgcaagagaaaagatgaaaaaaggcagaattagttaacctatagaggaatatatccttaggtggtatagaaaatcagggttataaaaaaagattggtaaattgcagatcatttaaacatttgcacacaaaaagagaattttaaaattctagacaataaaagtaaaaatgttgctgataaattaatttgtgtcaaagtatttaatacaaatgttttgattttttaaagctgagtgttttatgctagattttacaatgaaacaaaaagaaaaacttctatttttgggcttctaatttgcttaaactttttcaatttagtttaaatgtattgctcaaatctctgatattcttactaattaaaatttttttcttaatcaattcatttctcagacaactgtgccaatctcccataatgattgtggatctatgacagtcttcttataaaatttctccttataaaatttgccataattactgttcatgtttctaactatgttgcttaatacacataagtttatgatttttacatcttaaagcatattttgtctgctattaatattgctacatgtttcttttgttatttacttattacataaatttaaaaccttttatttttaatatttctgtctaattatcttaaagtgggtctcattaatagcatatagataaatttcaaaatctagtcacagagatttctatcatttaatgtatgagataaatccattatatttgttattatggattatgtacaggatgtctgaaaatctgaaaacagggcaaacttaatttaaacaatatattagtcacattttaaaaatacttgcttaatatgttttcttcaagtttcagacaacatttcaagtaaagtatctttaaatttaaagcaatgtccaattttttaaccctaaaaagtataatgaatacactattttctgaatttccagaatttttagaccctatgtaatgtatttattgtacaaaacataggagcatattatttgaaatgtatctaacctacagtataagtgcctaccctatattttctgatttttttggactcaaggtaatttagtcttatttttaacatcatattttgtatttcttctttcccatgtgtattcttcacgtctttattttctcccttcctagtgttttattatgtttattgattcccttttagtctttactgttttggttatatacatccctattctagagaatatttctattaacatttaatatgcatatattacaaagtataaactttattttccctcaaaactatccgtgttcatcctataagctattattgtttaataatctgtttcgtttttaaaccttgacaaattcatttttttttaaaacagccaattgttacaataatctaccaatatattttgttgatttctttgctcacccttgcttctagcatctcactccctatttctgggttcaaattcctatttgctgaacttattctttagtagttcctttagagagtgactttgggttgtaagctcttagactttgtaaaaatacactttttgcttttacttttaatttagacctcactcttggatattcgtttagctgagtatagaatatttttgcttggtacattgaagaaatcacattttcttctctctctctctctctcttttttgaaacagggtctcactctgtcacccaggctccagtgccgtagcacagccacggctcactgcagccttgacctctggggtcaggggattctcccaccttagcctcccgtgtagctgggactacaggcactcaccactacgcctgctaaattcgtgtatttttttaaaagatgctattttgccatgatggccaggctggtctcaaactcctgggtttaagccatcctcccatctcagcctcccaaagtgctgggattacaggtatgagccaccacacccagtcaagatattattacattttcttctcacatctatttaggagaggttggctgtcagtcttgctgtcctgtcttctgccaatataattcatgttttctctctggtcacttttgtaactgaagtaaaaaagcaaaatttccacacagagaaatattcagattttaagtgtaatatatatgtgtatgtatgtgtgtagtatatatatatatatgtatgtctatatataaggtataagtttgccatatatatgtcaacatatatgtgtgtgtgtgtatgtcatatatatatacatctgtctatatatgtcaatttccattaccacattgcctaccttacacatctactgttctgatttctatcaccatagatcacatgtgtctattcttggaattcatataaatggaatcaaatagtatatattttttatctggtctgttttgtgcaacataatgtttttatgattcatccatgttgttgcatgtataagtagttcattttttaaacttaataatatttcatagaattaatatacataacttgttttccattgtcctattaatggtcatttgaatcgttcccagtttgggatattatgaataaagatacaagagatgcttctcaacttatgatggggttatatcctgataaagctattgtaagttgaaaatattttaagttgaaaatgcatttaatacacctaacctactgaaacatcacagcttatcctagcttaccttaaatgtgctcagagcacagttgggctaaattatctaacacaaagcctattttataataaaatgttgaatcttatgtactgcatatcactagccagagaaaagatcaaaatctgaaatttgaagtacactgaaattgcaacagttccatactgttgtaaagtcaaatcttcgtaagtcaaggaccatctgtgtaagattcaagtacctttttccgtgtttgtgtgtgtaaacacaagtttttatttcttttggctaaaactgagaagtggaattgctgagtctaatgtacatgtttgtctttacaagaaattgccaaactgttcactgcggtgatgctgtttttaacacttacaagcaataaattagcattccagtggctccctatctttaacaacatttggagtagtcagtctttctaatttaaacaattctagtagttgtttagtggtatctcattgtggtcttattttgcatttgtctaatgacaaatgatattcggcatattttttgttcttattgaacatatgtatatcttctatgaaggatttattcacgtttcttgcccaatctttaaattaaactgtttattattattttgtaggagctcattatactttctggatacaagtcagatatatgtattatattaatacatattttctcccagtcagtggctcaccttttcatttccttgatgctgtattttgataaacaaaagttttatattttaatgaaatcccatttatcattctttaaaattttatggctagttctttttcttttctctttaagaaatatttgcatactctatctaggttgcaaggatcttctatttaaaaaaaacttttagtttttgtttttatgtttagatctgtggtccatgtagaatgagtatttgtgtatggtgtcagatagcagttgagtttcatttttcccattcatttatccaattgttccagaacaatctgtcaaaaaaccttgtctttatgaattgtattgactccttgttgaaaatcattcatctcctgcataggtgtgggtctaatttttttttttttttttttgagacagtctcactgtgtcacccaggctggagtgcagtggcacaatctcggctcgctgcaaccttcgcctcctgggtttaagcgattctcctgcctcagcctcctgaatagctgggattacaggtgcaggccaccacacctggctaatttttgtatttttagtagagacagggttttgccatgttgaccaggctggtctcaaactcctgacctcaggtgatccacccgcctcggcctcccaaagtgttgggattacaggcgtgagccaccacacccagccaggcatggttctatttctatagcttcttttctgttctatagattcatttgtcttttcttgcaaataccaaactgtcttgattactgtggcttcattaatgttagacattgcttgttacctttctactgttggagataaggatttagtacattcatacaatctccccgttcaatacggcatcttccccatactttcaatattataataattgtatgaatacttcatagcttaccacatagtatactatgattacattttctttctatattaccactttccttgctactatcccccatgatttaataatgacttcgtttcttttacctgtttgttttctatcattaatgcctgccccagggtatctgacaggaatgtcaaaccctttttaatacagtcaaacacatcaggtaatttgtcaattatttttctttaaagagacttttctggaaacttcttggcattttctaggtttggtgcacagcttgctgttctaaatcttcacttcacagtcatctgaggcatttccttcctaggactgaaaggaatttcctttgtatgtgggctgaaatttgaatcctccatttcctggttcccattattcctccttctttatactcttgttttgatgaagaagattatctaagagcatcttgaacaagcgtccagggacgacaacatttcttagaacttaattgtttttagtatctttgatttaagacatacttgattaatttattggctgggcatagaattctaggctggaaatcatttttcctaaaacttccccaaacatacctgcactgtaacctcccaacagggtctccttgcccgcttcctagacagagctgatttgtcaagatggggaattgcaatagagaaagagtaattcattcaaaaccggctgtaggggagatcaaagttttattactgctaaaatcagtctttctgataactcaggatgggaatttttaagggtaatttggtgggtagggggccagtgagttgggagtgctgattggtcgggtcggagatgaaatcatagaagtagaagctgtcctcttgagcttagtcagctcctgggtgggggccacaagcccagatgagacagtttgtggatttttattcattctgaatactatgggcctgttcaatccagaaaaacacatcttatagttagaaattttcttatataattttggtgataatttccttctcctcatttcccatgttctgatacacacagtctcctctgtcactgaattattgagagcttgaacctcctaaaccaactctctgattttgtattttcttaactatattctacttttctgtatcttattctaatttttgagagtttccttaactttggctatatattgtttttagccatagtatttttaatttctaagggttctttgttgttgttgttgttgaacatttctttttataacatcctgatcctctttcatagatacagtagttctctatgcccctggaaatatcatttatattttcagtgcctttctgcccctgccttatctgagttttctctgtgttcctgttttctattatttgtgctagtctctgtctttcattcttccctcagaatcctggtgatccttggctgtctgtccatatataggagcaaggcagtaaaaagctgattaaaagctatgggttcaggagtgctggctggcagaaaatgggccagttatctttcttcccatggcaatctccaaatacccatatctctagatcctttttcttgaacaagtttatccaaagattttctttttgctctgttacccaggctggagtgtggtggtgtgatctcggctcactgcaacctctgcctcttgggttcaagtgattctcctgcctcagcctcccgagtagctgggactatagacacgtgccaccacacccggccaatttttgtatttttagtagagatagggtttccccatgttggccaggctggccttgaactcatgacctcaagtaatccaccctccttggcctcccaaagtgctgggattacaggtgtaagccaccacacccggccccaaagaagattttccaaaactcttcctctgagttgtaagcaaagggtcaacattctgagaagtcttagggcattacctgcattgcagagccatccccatggcatagtttccccatttgcctttggtaggccctgtcagtttcactggttctaggccatgtttcacatcagtgtcttggctggaattcctaagcagatagttcatatttgcttcccattccctcccacaaaaaggggtttttctccccccagcccacggtttagcttcctcattagtaggctgtcatgggtagagggtttccatttgtgttcgtagatgaaatgccacctttctagcttgtggctttacacaggcgctcagttccagttttctgccgtgttaccaatgaatgctatcatacccttaactcaggccaacttctctgtctttgagtttcctctgtattctggaacctggagatgttcttctcttgcttacaagctcatttaagtgttgtttgtaaatgttttgcttattttttctgcaacatttatgcatttgaagcagagtagaaatgcttcttggatctgcttagtccatattgaccaaaagtctaaagttattgattcagaattctggactctgagagcaatcagtaaattatagtgcctcggtttgcttgtgtgtatattatcaatccttcgccaacaatttttttctgttaaaaaaattcctgttagaatttttataatacttatttttctatatctgtccattagtgtaacatggtggtcaaaggagaatttttttctggtagtttttcctgtcacaacatggctcccaaagagtagatctagtaaatgaaacagattgccttggactatcttaataaccattgccatcatttttcccccaaatttcacctatttattcattcagattgcattattaattgaggaaaattaaattatctagtggagatttagctttgaaggtaatttcagacatgacagctgtggtcggaggaagattctcagtttgtatgcaagtggagaagcatcatcatgggcagaggacttagcccctggtcctaatttctatttttccatgctcaaccttttaaatagaaatgagtcttgtaatgggaaaaatggaaatattgctccttgaggatttgaagaatatgagacctgaagacctcagattttatatctattaaaacattggcacaaccatgcaacattctttccatgataccatgactggtttattgaggagtctcaactcactgggggtataaagaagaaatgatttctatttttccctatcagtactgttctgtgtcaaacttccttttattactagctacagggggcctttaattacatctccgaccagtttctaaactcaagaaggataaattgctcctaccctcaccccactcccccaggctagagtctagtggcttagaattgtagggttctggctcttaaacagcttattttccttcattccagtgaataaccctggaatatgggggagcatgaagagggtggaggaagaagaggtctgtactagacttctcataataactggtgttatgaaatgacctaagccaatctgcctcttcacagttgtctggagtggagcgatctcagctcactgcaacctccgcctccctagttcaagcaattctcctgcctcagcctcctgagtagctgggattacaggtgcccgccaccatgcccagctaatttttgtacttttattagagacggggtttcaccatgttggccaggctggtcttgaactcctgacctcaggtgatccacctgcctcggcctcccaaagtgctgggattacaagcgtaagccaccgtgcccggccgattatctccaatttttagatgtaggcaccatttcctcccagataacctcaataccaggtgatatgttacaatggaaacaagtctcagagactaaattctgccacacatgaaacaaataggcataaaaacaattacaaagcctgttccatacatttggtaaagtccccattccatctttttttttttttttgagacagggtcttactttgtcgcccaggcttgagtacagtggtgcaatcatgtttcactgcagctcccaactcctgggctcaagcaatcctcccacctcagcttcccgagtagctggggccttgggcatgtgctatcatgctgggctaattttttttttaattactttttgtagagacaacgtctcactatgttgcccaggctggtcttgaactcctgggctcaagtgatcctcccaactcggcctgccaaagtgctgagattacaggcatgagccaccacctggcccccattctattttttaaagtgctctgacaagtgcttttgcactttaagcaaaagatccactccctggcaaaagttacaatattctaatggcagagccagctcatgttctagtcaggccagaaagtttcattaaatgggcacaggcctgaatagaatcctagatctatggcacgcctctgaatgctgggtttgtcagatttcttaatccctgtacacacaaggatggagatgcctgaataagtctttctatccaatccaatcacatatattgaacacccactcatttgcctggtgaagcattatttctctgtcctttatgccaatttgcagaccttcaggatttagagaatgatattgaaaacatcaatcttaggctttctggagtgtgtactcctgactagagtccttcatatgctaacagttcctagggtgcagattagaattaatttacatatattgtctgcactgaagtattttaaaacaaattttcaacagtataacattggtgacaatgctgagccaactcttaggtgatgaggggctcattgccaagggataaaaaagtagttgaatattttaggatgaaaataaactaatgttaagaaaatagtacaaccaggggagagactatctcatagaatatctatatttactaaggaaagaatatgaaggctagaatccatgaggattttatattcctcccagcaccctacttttaagctgaaattaccagtaaaagttcatgagagacactgtagtacaataccggggacacaggtagtatacgtactacaatcctgcttatgggctcttgctaatgaatcatggttttaaattcttttaaatttttatggttttaaaattctttttaatgtagtattttgggcagctgaagctgacgggtcagaactgatgcataagagagaacttcattgtaatacaaaagtcactgggtctgtcctagctgtgagaacttagataaaatattgaatcctttgcgcttccatttcctcatccattaaaagataggggtgaggggtgggagttataagaactaaatgaaataatataaataatttagccactgcctgttgaggctggataaatatcagttccctcctcttgtagccacaaagttttaactaagctgatatgtttgttacattctgctcatgtcttttccaggagaactccatctagaacaaaatgtgcattcagcaaggtataattgtgtatgtttttattgtcagttttagtcatatctgtcattttttattttccaacatgaaaagagaggtttagggtagtcacattggaaaacaaagaaaataagattaaaattccctcaaatcaactttggagccctaaaatattaatgccttgacggcttactcacaatcacaaaaggctgtgagccaacattcagctttgtattgcagaggtgatgagaacatattttcattgctagaaaaaaaattaagctatacagacagaaatgggacatgggagccaaattccacaagaacacccttgagtttaagggtttttcccccatcttttgacaatatttagaaaaccaaagactataaacttttaaaaggaatcttggatgacttacagaaatagtaaggtcaccaaaacactttgtagatattgaatttttataaaagtatttaagttgattaatattattctcagaggtagcataaacttaaggatcataaatgcttactaaaagtgaacatattgggactagttgccaactgctgcctaatcaacccaactggtccaatcctgcattttcagtgaattgacttaaatcctactcatatgaaataaatcagtggtcggagatagcaaatctgccaataggttactctcagctgtcttaattagtgtttcctacatttttccagtttctggtacacctttgaactgccagattacacctggcagattacagctgatggaggatctatttgccctttatttagttatatcataattcatgtataagaatatgtattatgagctcactattagtagggtacatgcatgctgtttttcaaagagtcaatatcctcctgcctagcaccctgggacaagagtgtcccctgtgtgatggctccctggggagagagctacaacaaccattgaactggccatcagaggatcaaaccattgactttatctttagggtttctcccatgatagctgaagatcttctctttctctgcacccacatgagtgtgggccaatttttgaaacggcagcagtttcataaaacccaaagtttacctgtgaggcctgctcaagccttcattctgtgctcagcctttgcattctcagtctgagaatgcctcccatcctcttttagctgacgatgcagcagctaggtgtgtgggagttagcctcttggcaactcctgggccatggaggaatggccaaccacccaagttgcctacagattttcccaagcacatgtctatcaacatgtgctgtcagccaggcaaattgtttcattggtcttggatgcttttccattcactctgtactgattgaaaattaatccataattcaaggttcagctcatatacctccaccacttccttattgccccagtgagaataaatggttctccttttgggttgccacagcacaaacctccgtgtattatatctgaccaatagggtttactactctcatctccctacttcattaaaaggcaagaacaatttttattgatccttgtatatcctgccctcaattctagtgccgaacacagcatcaaacacaaagcagaggctcaacaaatgctgaatcgaactgaattcaattaattgaagaaagggttgtttactgacactgtactaacacttctaatattatcctgcctcactagggagtcttcactgggggcaggggtctggagtacaatcagaatcaactggacagttttccaaactatacaggctaatggtagtggactgtgttaaaaagctattcaggatactccgaaattatccctgctcacatctcaccaatccttatgctagttgaggaccttcaaagaaccctccctgtccaaaatacatcattcagaatcttctgtttagctctcttcattttagtgaaagtctcctaaaactagtcctggatgtgttttcatcacacttgaagtttaattaactgataactcaggcacaatggaaatacttagatagatgctcttaaattacatttaaacaaaactatttacaagcgatctagtaaaaatctgtgtctttaatgggctatttttaatgtttcctaaacaaattattgtaggtgggccaattttccctctttacttgttacttagaagcccatttggacatgttctaccccgatctggttctctcaccccactggctacagaatagtgtgtttttgtttgaaagggtcaaaacattaagaatgtgacatccaaaatatgtgctatttttttttcctggagtcaaaacccctaaagtataaatcgtttttaaatgaagaaagcagtgccaaaaggaatgaaacatatttggtccttctccaaaacagagagatagcactgaaacaggaagtggatgatttaaatatccactcggcatcttggcaacatatttatgtttaagggacttaaggttaaaaggtttttgtctggcctgggaacactctatcttccctagggtttggaggtttggggaaaacttttaacaacttatcaaatatttgcaattagccattttttggagaacaaattgttactgagaatgtcataggaaatgttccctataagctgcatgctaccattactctcctgcttcttatgataatctctttagccacctagcttcatgtggtagaaagttattattttctataaagaaagaagaatgtggttcgagttcttgtaactacttctcccaaagttggaactacacagaatgactgaataagcagaatgcaaaattggggtttaattgattttgtgtgtgctgtttccaaggaccacttagtgggcccattcttatagctagaaatcgacaatatcgggagtgtttacacaaggaagtaggccttctcctacttcccacccttcagagatgagagactgctattatccatttaccagcgcaccactggaaagaatagttaaaaaaaaaaaaaaaatgagctcaaggtttttggtctaaaagactggaataatggtgttttcatttaccaaacttaggaagaacatacaaggaggaactatgggagtgcaagtcagtagttcagctttgaacattttatatttgtcacaacaattaggcatttgattggaattgttaaataagcagttggatatacaagtctggggttcagggaagaggtcctgaatatatttttttgggagtcaggcatttgcatggtatttaatgccaagagacaagacgagaccaagccagtgagttattagatagaggagctcagtcccaggataatttttagggtcttccaacatttaaaggtcagagtaaagaccagcaaaggagactgagaagagtggccaatggggcagaaagagaaccaggagggtgagatgtgctagaagccaaatgaagaaaggacttccaaaagaaggaagtgatcaactgtgtcaaacgctcatgtattaattaagatgagaattgagaattgatcattggctttggcaatgtagaaatattgatgatcttgaaaagcatcaaggatggtagagaaaaagcctgattggcatgggttcaacagaagatgggaggaaaagaactcggagcagtgaatagagacaacattttcagaattttttttgaaagaggggcagaggattggaataggagctggagagttgtatgggtttaatgaagatttctttttttcttttagcttaagactagatatattttgacatgcttgtatgatgatgagaataatctagtagaaagagatcattgatgatgcataagagaggtgacaattgctagagcaatgtccttgggtagataagagagcatgaaacctagagctaagtagggttgaccttcaataggagcatggacaaatcaggcatcgttgcaggagtaaagacaaactatccagattcagctgtaagtatattggaaaatatgatggtagaagcctgtgatgctcttatctgattgcctctattttctcagttcaataaggaagcaaattcttcaactaagactaggttagggaagcaggaggtttggagacttcaaggcaacagaggatgtttggacttgggaaacagcagacttgccaggtagcactaaggacccagttgacattactggtaacaaattttaagtaaaagcacttagcttagctgcgtgttttcctccagctggatttagcttcctgtctgcttgctacatggagagcagtgtttagagtgatgaatcaggggatgtcagctggtaaaggacggtgggtggctgaggcatgtgggaacacaagatcattggaggacagaagcccaaggaactaagaggccagggtattagaatgatcacagacatgaatgttgaaatcgctgagaattatggcagaagtagcattggaaagagttaaaaccaggagctaacatctagaaatgaagggaagtaatgcagggatcaggaaatgactgcaacaaggaggggtagaggataatattttcaggaaggaatatagctgtggagcaaggagacaattgcgtctacttccaggctctgtgatacaaagggtatggaagctgtcggaagagctataaatcacgagaggaagtatagagcatgaagttgcagggaacattcaaagaagagtttgagatacagggtcttggctaatgacttatctggagttccagagaaatcagaaaggggaaagacattgggtcagagcaggagatgcatagagccagttggctgtgggagtaggggttccacaaggagctggaagtcctgggggtcttgcagaatgtaaggcatcatgcagtcagtcccagtggtctctcatgaagagtgtagtggtgagactgggactgctgtggagggatttccttccaagaacacacagaattctggggctccctttccctttctactgaggttgattggaggcttgggaaggagttggttactaagagcacacaaagccctggggaccaccttcattcctctaaccctacggaagatgctatttattccataccttgtttaatgcttcagtgcagctggtccacaagtgtttgctgtatccagaagaaggtcagataaagagtgaaggcacacccctgttggaaaagaagcaacagtctctctatgattgttgattcactgtttgcctgttgactcctggaattaacactcaacagagtcaagaaacctgggtattggtcttgactgagtgtccttggataaatgcctcccccagtttgaatttgaatttcttctctgtaaaataagggagctggatcacgtgacatctaggttcctttcaagccctgaatctgagtctttaactgtggcttcctagattttgggattggcctacattggcccctgcttcctaccctttattctcagttttgccgtggtctagcttttcatttcttatgtcaggagcatgggccagccacagtacttttgactaggttgcttgctgtcccttaggtgactgtgtcctcatcatgtccggacaagtgatgccaaggattgctgcaactctagctggcctttggggatgaagtgggttagaacccaacacacactaatatggttggaatttaggctgtgcatattgtctgagaagcaactatcaaattgcttgtatgtctgtgacacaaagaacaagaagagatgaaaggagaacatatactccatgttgtctctccggctggtcctcaagttgtagaatttctgcctcttttttccccagtgctagtgggacttcccagtcccagtgcctcctggagaagtttcccgtcattgttcttggataaggaaaactctgcttggggttttggtacatgtcactcttgctttgtgaatatttactaaacatggttttggctgtatagctctgatgcactgtaatgatatcattcacctatctgaagtctcactgtttagaggggtgaccctctaaaccatttctcatgttttttaaggttgaaggaatgtttagctgagcctatgaggtcctataccaaaattttacctatcttctggaagctagcaaggcctaggatttttactaaactgaaaaattcaatgaattagtggaactgagaaatttggtgtttagagaaaatgaaaatatagacagaatacttaccaccatttacaaatatacaatattctcaaaagaaccaattatcaaataaaacattttaagatatctatcctttgaaaaacaaagcctattaattttttaaaaactatcctcgaactggcatatatcccctttgtaaaatatcaattccttaagaatctttctttcaaaatagcaattgtgataaccagggtcattcacttgtgaacttgtcttgtctcctcttaactagatccagaacatttgttttgctcagtgctatcctgctttcactcagcctatctaaagttttactaatttagttcagttgtataacttccctccaggagtagtcatctccagctttaaaattttatttttctggaatcatgcaagagtttgttatgcacaaatatggactataggctttaaaaaagctaaattttatgtcaaattggaatttatctcagtgtctgattatataatgtgatgttgcaaatcaatagatgtgtccctagcactgcatcaagtaaggatgaggaacacaggggccatgtcaatccaagagcttcacagtttgtccattggcagccatttattgaaggaaattgctagattcttggattttccacttattaattttcacatgctggaaaaggtgcgaatttgactagttccatttagtctgcaatttaaaagctaccccaaaatatttgaaagagcttatgacatcattcttagatcatgtgtacatgctcagaaaccaaacctattcctgaatagcccctttctcttcagccaatttaagcaatcagtagactgttttgtatatgcaacattaactcatttggaagatttatgcttatgctgttgctctgactgagctggtcagaggattttagaagtttccaggcgaatgggtaaaatgtagggagtaagcacactttgaagtgaactgtgccatcataggatcaatgtattcaaatagacactggagaagacatttccactgtttcccatactagttacatttcattgacaatcccatggcttcaataggtgagactctactgtgtcagaaggtagaacaatgagcttcagtcttcttgaacttctcttgtgaaacctgtttccttcctggctttattaaaaaattatgtcttctgtttttggaaaagtagctgtcagaggattagagacaattcattgaattggattacttgttgtcacaaatattataatagtattgtagagcacagaccaacggagagctgttcccatttgctaggatgttgttactgcttcggttttatttttatttaaattttttatctctgctattctcctttatggtcaaaattgtaaagagtgcatctttggaggaatgcaaggtaggcaagcttgctaagagcttctacaagactaccttaaaagaagacttatatttaacaaacagaatctcaacatatggacatacaccctcttgagctggttagaaaggacttttttctttatttgctctttttgaccactgacatttattttaatttttttcatttttaaacatttttattttgaaataaagtaaaagattaacaggaagttacaaaatagtatagaaaggtcccaggtacccagttttccccagtagtaacatcttgcataactacagtgcaataccaaaacccaagaaattgacattcgtgtgattcacaacgttattcaggtaagaaggtctttttaaaacaagaaataattcattacaaccacggggttcctctaaaaactgtccctttaactgaagaacacctgattgtttgttgtttattcagtacttctccacattttgcagaggcacacaaaatcatttttataaatcccaacctatgaaggacagaacaaagtcattgttctatttttcaaagtatacaaaagctaaacgagaaaaaaatcatctgggaaggcagaaatccattggtgcaaagtttttagaaagctaagtgaagtagtaattatcttactcattccattattgaagacctcttcaaaattttattcatttacaataaaatttcaataaattcaattccattctattacaataaaatttccccatatatttctaaaaagtcacagttttgtggcaacaagatttagaattttcaaacaatactttttgtcacacttgccgtcagcccattttgttataacctcatctgtaataaacccaaaagagtttactctttttctttatttcttggttaactgtttttgagttttatatgcacagatagcattccttgaagaaagaggcaaggtatacatacacacagttgggttgctattttttttcttacaatgtatttatactgttgtcaatttaaagaccaaaatattctcaggaaaatacaatattttactttttaagcttcatattctatgagtaataaatttagttttgagggataagatagcaaaccataaatatggaagcactctcttaaggtcaacattaaatctgataatatgtagaatagatttaagactatttcgaagtttcaactagagtttcacccagtgtgctttcttcttaggttttaatgctggtttacaaaaggaaaagtaaattgctttctggtaacaaattattgcagaagatcttctacttaaagcatagatgcatttttatttttcatttacttctctgtttttgaagggttcagtgtttattcggcggaggtttatgtcaattatttaatcagaagcaggccccagagtttgccagtgatattttggaatgtagggtctacttcaaagaaaggttccatgtctcttgacccagatgaagccaatttttcatagtgaagagcaaggtaattcgattttctttttcagagcaaaaattatttttagactgaatttgatgggtcatatttctctgctcagtaaatcttgcaattatcactccacactggaaaatgtaactcaatgacccaccattgcgccagagcttctgtgggcagccgagctccgagaggcagctggacatgatgtgaagttggtgtctatgacatactgcaagatggaaaccaagcagtcaaccagtggcagtagttcacatgccaacatttttgtttatttgtaatggaaaactttaggaggaaaacacaggagactgggtgccatgggtgtgaggtagagatttcaatcctgttcagtcacaggaaaatccaaattggccacgctaaaccagatccaaaatcccagactaatttcctctcctctttcctctgcgagtgtttctgatttcacacaaggcaagagcaactgagaacagggagcctgactagatgaagtaagaaccgtcgtgaggcccaggagcaagaaaaaaaggcctggagttgtagaacatgctagaacatgaatgacagtctctgcggaattaagaagcattctccactctattccatggcctcttgctgacctaactcctagtcttccttcacatctcaccttaggataccacttcctaaggaaagcttaacagactcaagtttgacttattacctttctctgtgccctgacaattcctgataccctctccagagcagggttatcacaccacattgtaatatttaatattgacatccctactggactgcaagcctaatagaacttgggccataccgctcaagtttacaattgcatgctttttgcttagcactgtgtctagcacacaggaaatgcttaatatgtatgcgttgtttatgttatccatgccttaatgtttgggatgctccagatggcttaataaagtgtttaactatctttacaacctcaacccagtccaatgtattgaaatcatctctaccaagctttgggaaattcaatcagcatctaagaagcccttgtaaaaaacattttagtacccaatgatgactatacgtaaaccctctagctcctgacccagatgtgatggcacgtgcctgtggtcccagctacttgggaggctgaggcaggaggaatgcttgagcccagaagttcaaagctgtagtgagctatgattgtgccactgcactccatcctaggcaacatagtgacaatcccatctcaaaaacaaaacaaacaaacaaacaaacaaacaaaaccctggttttaagaaaacaatgaagatagccatgaaaatacacactggcctataaatgtatatgctaaaagagaatggaaactgaaataatggatctaatgaaaatcaggcatggttttgaaattttgttaatgtgcttcttttttcacccttctattcactttagttggattttcatggaaattcagatctaagagagaattttgagttcatgtctacacagatggtaaccagaaacttctaagacatattctcagtgtaattttcagcccataatgatgagggtggtctgtctacattgtaagaagattaaactgacagatctatgatcttgtacgtatagatggacaatgacctaaaagctatgcttaaaattgcccctggagacattttactcctgaatctgttggtttccatggtaaaatattcagttgtatgttgtcaaaaaggtgaaaaataaaatctaggagaaatctgtcatgggtagaagttggtggaacacatttaatccaccagataaaatgcttccggtctaaaagctgctgaaagatacttgaaagtctagatgttgggtgatcttatccagacagcattataagatatacaaaatatttgaagtaacgtcatattacaaggagaaaaatcattttcactgttcctggaagaagtctttctgtctacactttacccactacaaatgttgagatgttctgaaggactaccttgcacctttagtaattaatatcatttaaaaattaatctcttttaaaatgagattttccataaatgctagatgcccaatttcaaaggaaaaatctatgtgatactctgacatattggtcaaatattttattctaggggacatggtgggtagcaaggggtggtcgtggactgtaggaagtgttgacttcaaaatatatattagcatttccatcattttaaaagattttttaaaagactaacaatataacatatggacaaagggatacattccttagaaaaattttaatggtaacatgaaaccacagtaaacagtgaaggagaggggaggagaaaaatgatgcaaactatttacttccccttagaggctagaatgcagttgttttctattaaacttagattacgtttatgcgtaactgactcaattataaaatgaaagctaagcaactgttggaatttgtgattacaccatgtaaatgttacataccttggcaatgtaaaataataatataattttttaaatagagaagaaagagactgtaagaaaaaaagtaagtgtacaaatttccctatgctttatagtagggattcagataatgtctagtgataatatctgtagttaaaacaacaacaagcccagtcttttagtttttttcataattttaacttttaaaaacccatatctcattgtaaagaaacatttatctttagttcatcaacttctatcattgaagctgtttctctttgttaaattattgtaagtaatatttctaaatattagactacatttataaaactatttctacctatccatctatttttataattttagagatatccagaattttgttcaccaaatgttaacaatttatttctgagtgctagatataggtgattttttttaatgttctttatacttttttggggttaactttttaaaagagtcaacgacattttttttttttttttgagacagagtctcgctccgtcacccaggctggagtgcaatggcacaatcttggctcactgcaacctctgcctcccaggttcaagtgattctcctgcctcagcctcctgagtagctgggattacaggtgcgcaccaccacacctggctaatttttgtatttttagtagagatggggtttcaccatgttggccaacctggtctccggttcctgaactcgtgatctgcccacctcggcctcccaaagtgctaggattacaggcgtgagccactgtgccccgccaagagtcaacaacattttaataaaagagatagatgtttatagagagagatagttgactctctctctcttcatttctatctatgatttccttttttctttcaaaggtttaacaattaattctttaaagcattcgttcaattgtggcacaccgacctctcttgttggccagaaacttataggggtaagtctcaataaaactattgagtctaaaatcacaaaacagctgacaactttgtggcacatcacccaattcttggagacagtgccaacccttggacaggtctatattatcttgggcacgagactgcttgctaagttaaggttatatattgaagagaaatcagacatttttatttctagaattttctgtttcatgagggactgctggctatcttttatttgggccaatgcctaggcccaaaagaggtttaccagatgtgtgagaaaatgttatttctgctttatttggtgaatgataatgagtaaatgggatgaagggaaactttctagaatttctagaatcatatcttgtctgaacaagatatgaattgatcagttcacttgtcaaacaagaaagacatttgtatctatctacaaattttattcttcagttgaattcagaatatagtgatttttcataagaaacgacaaaatttaataagttatgcatttgttaaaaaaatactaacttgtctaacataatcctggaatctcaaacatattctgtagttgttttctgagtgaatgctaacactcactgtaaataaggcattgatacttccttgtataaaaatattttaaatttctaaaacctctcatcttaccatctccttttcaaacttcctccccaaatcttcagacaacttattctacttcatttgaagagaattaagtatggttttcattcattgcatttttctattatatttctacactctatgttctatttggcgatatagttagttgcctctatctccctggctagatcatgtgttccttgaaagcagaaactatgctttaatttatccctgcctctccactgtaactagtttagtactttacatgtagaagctctgtactcaagtcaacaatgtggaattgccttaagatgaaattggtgaataggtctgtagaaaaatgacttctccgtgggtcaccctgcccaccccacctgtccctccacatgcccccttaaaatgcaaaattgctggaagcttggggaagatgtatgcctctatatgtacgtacatatcatctcaaaaggaaaatttctgtaattttcatctaaaagatgcctatgagaacaaagccaaacaagtagctaaggcccgaagcactgaatgggatgaataaaatatctcgatatttacatggttcattttgaccgtacccacagggcagcaaacatctgcgtgaaaagtaaagaattcagcctgttagatgactggttgtgaagagccaaacattgggtatcatgtcatccacatgtctggttgattgaatatgaattgccccctttttatccagatagcttcagcaatagataaagcatggagatttttccacattttacatggtgcttggtgttgtagaattcagcctttgtgtgttcttttccccccgtcttgctattgcctggatctcattaggaaccattagtgatgtaatactaaacctatggaatcttaaacatgcttttaaaatcctgtggaataaagatgtctcctaccaaaccaaaaatgcagtgggaatagacaaagttacatttcttcaagaaaaaatgactcatttcatagttcccaaactgttttgactgaagcttctcaaaataaactttctggaatatggagcctttgatgtctgactttgaaaaaaatatatcatttctcaaacatacaattcaatccttttggggtgttcatgtatttctgcagattaacttacttttatttcaacaagtgaatgacacaatattaaatagccatctgacaaagaaagaaaagtatgtttgaagtggtcttaactcctacataaaccaaatataaagaacatgccatatgattttttaaattgccacaaaaatagaattttcagaacattaccagaagggggatttggtccattaagaataacaaaacagtttagatgtcatgaaagtagaagattaggagtgccattaagcttactaatgagatttttgattcatatgctatttcctaggctaggcaacatttttaatttttcacagtcttgaactttaatccttgaagggtaattcaagtttcagaacttacatactgcaatttgtttggggtggcaatttgccattgatttgcctctgggttcttttgttctctttcagctgggggactcaaaggtggtcatttattaagtccaggtctacacatgaccgctgaaacaactggttttcaatcaaatcttctaaataatccaaccatttttgtgcagttgatcagattgatttaagatatcaattgctctattcaaacaacagtgaatgaaataattgtatgactggacaatctttacttttctttcctcctcctccttcttctccttcttctccttctccttcttcttcttcttcctcttcttctttaataagagtttctctttggagtggtggaaggattggttaagatctgcattctagcttcaactcttccacctctatctgatgcttgaaaagtttctcttaacctttcaagcctcatttttcttttctataaatggagagaacaaacactgaccttgtgctatgtttgggacattaaatagatactgtggcatttgatacacaattggcctacaataaatgtaattttttcccagttccccctcaattgtacatacggagttttctgctttttttcattttctattgtgatgataacttctcaacagaagggttaaaagaatatttgacacccattatattacgctgttaaagaatattagaactagagatatacgtcacttggtcagatctgagctccagggcctgatgtctctgatgatggcaagaagagactgttgttggaatttgtgttattctctgagactttaagaatactacctttccttcagaggcttttaaatatctattatgcagtaacatctctaaactactcttgaacctatgcacatttttatcatggtaccagcattgaaagtaatagattccaagtgtttaatacttataatggaaagaggtttttctattatttgacctaaaatgatcacttcaaagctttaagatttagataaagtggggagaaagggggataggaaaaggagcatgggaaaaggggtaaggtaattaacatttataagatgatggccaagtttattagaaaacagatggagtcatacatttgggtagacctgaacttcacttccagctctgtctcattccagggcagagttgttaagagaatgtaatgtacccgcattaaaataaatttgctttgttaactataaatttaagtttggatttcctctttccaagcatttatttttataagtgattagggtaatttaaggtctttaaattgctataaaatatctaagcattaaagaggggtgagaaaaattagcattttaaaattctctatataaggataattttatactctaacttttggatttatagatatcttatgtatattttcccagaaaaaatgtgaagatttcccttttggtgaagtcatttagagttcattgttggttggtataatctgcaaaattatattcaattatgcaattaatgtaaaatattacatcacataataacccaaggtcattttatacttacaataaaaaattgttttgacccttcctgtagattaacctcccaaatgatttattggtcattaatagctcaatttttagacccaggggtcagagctcagggcattgcaactgagggtagatccctgtacagactgaccagaggagccctgggtatgccggggagaaatacatgcacatttctcaatgtctcaggctatgttttccttcagtttcaccaacaccatcttaattcaggtttcaagaatctccaaacttacctacacactctagtttagccctttcaagtatcattccatcctgtaaactgattttaaatcttcccaaactactgtttatataaaaaaaacttagtctcaaaatctccccaaactactgtttactttaaaaattttaaattaaagaggggtgaacaaaactagcatttttaaattctctatataaggataattttattattctattgtctgctccaaagaataaagtacaaaactgatatccaaggacccggtcaacattcctgctttctcccaccctcccaggcaggcttttgaatgtactcacccacgagcacagctgcccatgaccacaactgatgtatttctgttctgctgatgttgctccttcgtcatgtttgaaatattctcacacctcctttctagttatccaaatcttaactctttaagtgccaatcatcttcctgaagcatctcctaagtactccagcccacctaatcaacacacaccggagcttttctagtccattcttcaactttttacagtttaggagacccaatttgcagagtttgtgacttgcctgaggtcacaaagcaagttagtagtgtcaccatgacttaaaattgaggtcttttaccacgaacactgttgcctgaattccctaaactatcatgataacagacattttactgataatattggttttgtattgttggttcattgttcctaagtatgaaacctggatatgcccaaattgttcctggattattctttcatttcagatccaaataaaataattggggcctccatctcaatatttctgagaatccccaagaaagagataaggtggtgggatgccttatatttttgtcacctcctgctccaaattccagtcacccatttacctcctcagtccaacctctacctgcttaactctgagcatggaaaagttctttttttcttcattcccacaaagctgctgcatttaacagactttgatgaatggtttatggtgatagaagggcattaaaatgcagcccacactggatcacagctcaaaattaaatattttaatttgagaaaaaaattaactctttagctctttgccttaattctctcccatgtgattttggagtggacagggccattcaacttttacaaccacaaagcaaggtcaggatatttatgtaaacaaaatacaatagttatctaccctgggcttatgcccttagtaactctaagaagcaatagaagttttgacattagtttttctttaacttggcccaggctgaaatcttaggcagatctccctatctcagtggaccaggacaatgtcaggagccaatgggtattcatttgctacattcttagttgggaaaatgaatccagcactattttccagaatgtagtaagattaggaagagagtaaaaacagaaaatgggcattttttgccatttgctgagctttttctccataccaggttctatactgttatacacgttaccccatttccctctcacaacaaccatgcaaggtaggcattctccacttttcaatggagcaaataaacaatttgccaaagtcatccagtaagaaagtggcacaatccagaattcaaacccagatctgcctgactttaaaagcctttctggacttggccagatgacaacggcaatggcccaggcacaggaaagagtgaggaccatatcacatcacatgatattccaaatttatcagagtgctgagagtcagaataaacagaaatgtcagtcaaaggtgttatttggggaaggtgatggagggtccacgatggactgaggttcagatagagatgacttttttcattcattcttctgtttaaagctaccggatttaacacaaactcaggaccgtctacagaatctgaattggatatccccaggtcacttagtttttataacccaacaagggcaacatattcaatagactatcaccaagagcctttctgagcagcttgtatttattcatcttgcctgtgactgggcaaagggggcaggtgtctggcttttgttactgcatagaaatacaactttggtttcgttgatgtgaacagataagcactgcatgtgaactgaaatcacactatgtctaaacagaggactctgtggcacttttcttactaaaaagttgttaagtttggcaatcctcactctgttccagtcaaacattttcttaaccatattaggttatatggaaataagccaatatcgcggctggtgtatgagtaggtcctctgcaccaaggcagttttcttgagagcattttctcactggtttaaaagcaatagagacaaatgtggctcagagtatatttttaaatgtggctggaaagaaaaataaaaattcactgatccaaaaagaattcggaatcgcagctagaccaaagtcagatttttaagctggaagacttggagagatttgggtatttgcttgcttcttattgaaagactcaatcaattttttaaaagcccagccaaccttaacacagatataggagaggaaatcagaacaaaactgcatcatctgttccataattgtccaatgttgttctcgttgcttaatctcgtgggttagaaacccagcatttgagctctggattcactacattctgagtaatcctagacactgggcttaatttcattgtttgtcaaatgggggatgatatactacctatatcataggattcttaggaaaatccaatgagataatgcatgattcaactattaccaaaaaagcatattataagccttctgtttttcaaactacaacacttggagaaaagtagcagcagagaaaatagcttttaggtctgcccctggttgctctgatacagttatctgcttttcatttagatttatcatattctgctttgacagctaataattattcatctatatattcattcttttattcagaatattgagcacttagcaagtgccaagctcttaattaggagctcttattctcatctttgcaaatagatgataaatctataaagctccccccccatcttatcattagatactcttttgaaatatttttatttcaagatacatgttggccattcattcattccatgtatatttattgagtgactactaaatggcaggcaactgcaaagtgctgaggaatcattagtaaacacaataaatacatcctcatggagatttcagtctagtagaaaagacagatattaaatacataagtaaccaaacataaatatcattgcaaattgtgattgtacatgaagacaaagagcagagacttacaacagagaatgacgtggaagtaacatcttaaaactctatgtctaatgcaacaaattttaatttacaataccttggcaataaatggataggatacgtgaaaacgttatcatctgattgtactgtaacacaaaaattggtgttttcagggtgttgcaattatttagtactattccaactttgactttgtgggtttaagaaaggttaagaattatccaagtaagaagtatgcctttgtcattaggtaatggtgagggactcatttctggtctctgtggccagtaagctctagatccatgcaagaaattgaaagcaagcttgtgtgactggatcacaaaagagagaggcacaagaggaagctggagaggcaggctgagctagattatacacgacattgtaggccatgggaagagttggatctgtattctagatgcactatgaagctactgaaatgttttaagcatgggagtgacatgattagatttatgtttttaaaagggtaattgtttgcagatggctggaagatagaacagaaagaccagttgggaggaagagtccagatgagatgatggtggcttggatttgagtgacagcaacaataatgaagataaatgaaccattttaggcaaatatcctgaagggagaatcacctggatttagtaatttactgtagagggagtaacggtagatgaggaaggaggaagtgtatgaaatgattcccaagtccggagcttaagcaaccaggtaaatattggtgtcatttgctaagatgggaaaaacttgggaaacaaggactgtgttcaattctgtcctgtttgctgaggaaaaaaaaaaggggccagggagtagtggtggaactttttgtgagttatagagaggaaacaaaagtataaagcttaacacccatcttcagaatgcttgcaccctaagcattaaatccactgttgatatttccttaacaggctttctcaaaccaccagaggctctactatgatgtgtgttatctcactcgtagaatttattctttcttcacccttcctctgtgtgtgtccaaatataatgcagttgattttaataatttaatttgctacacctttgaattatctcatttatcaaggcatcagtcaatcttaaaaattagatctttattttttttttaatttttaagctcagggctacatgtgcaggatgtgcaggtttgttacacaggtaaatgtgtgtcacgggggtttgttatacagattatttcatcacccaggtattaagcctagtacccattagttatttttcctaatcctctctcccctcccaccctcaaccctccaataggccccagtgtgtgttgttcccctctatgtgtccatgtgttctcatcatttaactcccacttataagtgagaacaagcagtatttagttttctgttcctgcgttagtttgctaaggataatggccaccaactccatccatgtccctgagaaggatatgatctcaaaccagatttttaaaggcaatatattttttttggtgcttctataatcttggcagtgaataatgacaatagaagtctttaccattttgtcttcctgttatttactgtaactcaactacaaatattccaacttctccagtggtgtatgtggaaacaagaagagttcacagaaagaaaattatgatcagtttgattcccctgagagccgctgatagagtactaagctctacattacttagcaatgcaaaaacaaagtggtagagatttagtgatcaagatttatgtacaagaatgtccatcacagcactacttataatagcccaaacctgaaatactctcagtgtccagtgataagggaatgattacatataactgtaaagttatcatgttttaaaaattgtgtaaaaaatatgtataatataataagtgaaaaaattgagtgcataacatcacatttgtttttaaaatagaatcttacctttgttgaaaaaaaagactggaaggaaatatattgaaactttaaagtaatctcagggtgggaaggatgaaaagagactttagaattattttctgcataatttctttctttttttttgagacggagtcttcctctgttgcccgggttggagtgcagtggcgcgatctcggctcactgcaacctccgcctcctaggttcaagaaattctctgcctcagcctcccgagtagctgggattacaggtgcccaccacaacgcctggctaatttttttgtatttttagtagagatggggtttcaccatcttggccaggctggtcttgaactcctgacctcgtgatctgcccacctcggcctcccaaagtgttgggattacaggcatgagccaccgcacccggtctctgcataatttctgtattttctataataaaatgcatatttgtatactttctataataaaatgtatatctatatagcactcagagatggcataacttctagagatttgatgatttttgttagtggaagagatccgagttatctgcgagttaccggcggcgaatctgtaggggtccacagcaacttcagtccttgcctcctcagaagaaagaattcaactgaggggcgtgtaaagcagaaaaagagatagaggcaagtttcagagcaagagtggaagtttattttaaaaggctttagaacaggaaagaaaggcgcgcttggaagacatccaagcaggcacgtgagtgttaaagagagaaggtcgagtgtcccgtataaccgtgatcctaggacttttataagcccgtcttttccccatgcgtcttccgtagggtgggcatgcgcacagcccttcttacgcttgagaaatgcgcacgcgcagtgtatttagggagttatacacatgcccatctgaggctttcttccttcttccagcagagagtacccaggagatcttacttcgtcatttttgtctcttaatatgcatttccagaaagctgtttctctctggggtctgcactcagttaacacttttaaatgttaacaggtatggaccatcaggagattgtctctttctggctgctgtgaattatcatttttagagaggcaaagggataattgccaaaccatcacctgacatttctagtgggtggtgggagagccctctcctgctccctgctcatgactgactacctgtaacaatttgggacctttttcagtagagtgaaatagaaataaaagcagtctggaaaaccagcaatgaataattgtcaagtgctgcctgagatactgtggggtataaagttgtgtgaaaatgtgattgcttattcatggatcttatgatcaagttcccacactcctggatttcccttgtttgggttcaaacagcctaagaacataataagggcagttttgattttcatatctgagtttttcttttaagccacatcgggaaatgaaggaacacagacagacagcgggagaaatacactcgcaaaacaacctaagtatctgtgcagcctcaatatcatttaaattctggctaagtttaaggtttttcctttttttggtttcttccttcactcttcaagtgtattccacataatgtagttgtagctctgctcaaggttctggagtagcatttctatgcaagcttagttattttaagttattcacagttatttgttttttaaccctttaaaagtaatttgtcacaatcacatctttatgtgccagatatataagaattattgtcttgtctctggacagtatgttttagaacttttccttatgaagctgcaagacgtgttttacacttatcagctctatttagcctataactgtgtctgcataatgccagaattgccatttcaacagagaccaagaattccccaacagttatttggtggcaactgccaaaaatttttattgaattaatttatctttttcacttaattcaatccacttagctatgaatgttgaacccagtgaaacttctggttttggggggatttttttggcatatgaatggaagcattgctgtgtttaaaaatactatcctttggagataaacattatgggatgttcaatatgaaatatcttattaatgtggaaatgggtttcattaacccatctgtatctgcacgttatccttcatctggttaaaattccacattttaaaaaagatagcagcttgggtttaagtttgtggccacgtaagactgaagtttgatactgtccacgttaccatcaaccagctaatgtattaccaataaaaacagcagtactattcttcagtgagattctcattgtccaccttgtgtcagttttcagtgtagccctgggaagaagggcactggagaatgatgtttccatcaagatttagaagtggaaaaaattgagcttctggagacctcacttatttattcacttaacacacatttattgagaaactgctatgtgatcagagctatgctagacactggggatacagaagtgaatatgacataaataatttaatatttatttgcccactagagtgttagccctctgagagcagtgaccttgtctttctccatctctgctgtctccttagcaactcccatttaataactggaaatagaatcccaagcggggcctaactttttgtctcatgagataggaatagtagaagagcaaatctcaaacttttcccccatatgaggaatgacattcacagaaaagacccacttagaggaagacaaataggcctttttcttccacggaagaaagatgcctagaatccagttgaatgaatatcaagtttatatggatagctttgaatccttcctaatattttaaaaagtaaatcacatgaaacctcacatttctgatgatacgtcagagtagcaacaatactgtgatcagaactccacatagaaagctgctgtggtgggccaccatacctgatggaagatctattttgatgttcaaatgctttgagattaggacggttgcttgaagtatttatcgcttgttacactttctctgctgtgtgattactgcaaagacaggccagattgcaagggccacaaaggatcagttcttgagataattatatgaaaactgtttagcccatgatggcagttagaaatcgagcagtggattcttccaatatccaaaaacagatgtagtgattgatttgtcctaaaataaaaaataaccagctcctgctaaatggacttagttgttaactaatcaaacacaggcagaatggtgttctacaaaaagaacagatttggagacccagctcctcccatcactagctgagaagccttgggtaaaccatttaacctctctaggcctttctaggtcttatttataaaatgttgccaataatacttgtcttactgacctccagggtttctatgaaaatcatttaagaatagagatatgcaagccctgtttactgtaaaagggccatgtatttgtattcttaacccatttgtgatgtcactaggcacttggaaatcagcccacaaatggctgatctgattgatgatagaagcataattgccctgtgaccaacccacttcatccctaccaaacattccagacatttcagtgcaggaacaaggtctatgggaaaaagtcaaaaggagactgatcagaggaattccactggcccttcccagggccctgtgcacaaaatggtcccctgtgcattgttattttgctgtgtttgccgatgtccacagcttcctagacattaacagatggatatctgggtgatgatgaacagacagagtgagtgtgatattttaccagttttctagtgcaaaggcctctgtatctaatctatgggcttgcagccttcactagttactctttcagctgaatgtgcaaagagataaagtactgcctgcctttctttaaaatgctgaggaatgacatctagtgaattttttcaaggctacacatactgatggttttgcttttggttgcaagggtaggacaaggtgattctagatcctgacctgagccctgtgtcctgctgctgcccagattctctctgtcagtgtttcatgcttggcaccgactgagctcaaggctctggattaggtcttactgcacagctctgtggcagagaggagaggtgggcaatgccagttggttggaacgtgggaaagaggaacaggataattccacttagggtgttattttgctttgttttttgcttgctttaagcaactggccataaaggaaatatatggccctgtccttaggtagttaaatttcaatcagtagtcaaaactaacattagaaaaagttttaagcatactttaaacaaacaagaacatattataaataggaacatgaaatgaatttattacatcaataaagtgtgcctaaatttttcagagttgacttaattgcacaatagataatccgatcgtgatgacgtgtagcctgaactagaatttattgacttgagacactctttctttgtgaatatcgaaaatttctaagtacaacctttattgatgagattgtcaaaaattgagagtctaatagcattaaagaggttcaatttggccaaactggacattattaagtttatcctatatgctggaggctgtgctaaattctacagataaaagataaatgaggctaggcgaggtggctcacacctgtaatcccagaaatttgggaggccgagtcaggcggatcacctgagttaggagttcgagaccagcctggccaacatggtgaaaccccgtctctactaaaaatacaaacattagctaggtgtggcggtgggtgcctgtaatcccagctactcaggaagctgaagcaggagaatcacttgaacctgggaggcagaggttgcagtgagctgagatcgcgtcactgcactccggcctggtgacagagtgagacttcatctcaaaaaaaaaaaaaaaaaaaaaaagataaatgatatgactcttacccttgctcagatgtccatcctgtttcctcagctttgcctcctcaaccatgagggttctaatcttcatagttgcttctgtttgataagttctatttatttaggaagccatacacaggaacacaggcagaagagaaccagaagactgcatccattggaaaatttaatatacataaaaattaagtgcaccatttcttatcacttgctgaaacttaggtaacttaacatcatgccttacaaacaacagtcagtgctcgttgataatgatgacagtggtagtggcagtggtgatgattacgatgatgaaggcaagagaaacaactgccactaccttttcacaaactttggactttttattatctacactaggtctttcgtgatgagtggtagttatacccagctcaaacttcaggtacactatgactctgtgaagagaaagatacatttttctcagtgtctctcatgcctgtagccacgggaaacttatcaaacactgacgtcagctactttcccatgagaagttcagaaatttcataagaccgcaaacgactttctctttcctatttgcttcagacaagtacagaacttttcatgaagcttaaaaataaacatctgaccttcatggatacattctcattgcttctccaatcagaaatcatcttgcctgtgaaaatccaccctcattcttctattaacaattgaaacatcttggatgatgcaaatagcatcgcagattactcttcattcaatgattgtccaagagaaaggagaaaaggctgcaatgattaggcaccattttaagataccaaagcccatcttttgtactatcatagaacaggataagatctgtttttttttttcataattttaccatatgggcttctctgagaacatacatgtaagctatatcctttgcactccataaaattttaagaactcagcaaaatttccctgggtagcttgctagtcttgggacctgatggcttagaaataaactaagaattgagccattctactttctagatgcagaataacaaagaaggcagagaaagaagctgataatattaaacgagggtcaatggcatgctaagttcaatactaggtactttatatgttatctcaatcatcactcaacaacagacttttttctttcgttctcctttttttttttttcctgagatggaatcttgcactgtcgcccaagctggagtgcaatggcatgatctcggctcactgcaacctccatctcctgggttcatgcgattctcctgcctcagcctcctgagtagctggcatcacaggcgcacaccaccacactggctaatttttttaatttttatttttagtagagatgaggtttcactgtgctggccagactggtctcaaattcccgaccttgtgatctgcctgcctcggcctcccaaagtgctgggattacaggcgtgagccaatgcacccggccaacaacagacttttatgaagcatatgatatatgccagagaacatgctaaatgcttggtatggagtgattgataagaccatgcccttaccattgggaagcccatactcatgcaatgctaccatagaggcattaaccaagtacaatggaagaagaaaaaaacccttcagcgtagtaattactatcctcattttaaaattgaagtagctgatacctgttagttatctttgttaaagagcttctcttaggttattaagtgtagagttctatgtgacccatagtcagtcttacaattccatgctgttttaatgggaaagatctatgttcaatccaactgaatgatttaaagctttgtctgctatccaataaatctgtttgctacagaatgccacaaaaattctgactttcactgaataattgactttttctttaattataagaaaaatttccttaatttcccactttagcctgtttggtagctaaattcctaacatattatcatattaatacatcttgtccctcttatctactcatttatacaaatatctgtatacatttccatatgcataataattccttaataacacagaaaacatatcccataaaaatcaagagattctcatacagacataaacctatacactaaactacaagcatactatagatgaatttgttcaagatacatagggaaaatctgaaatggaaacatacaattttaaaaaataaagaggaaacattgttcaaggacttgatgcacaaaagagctacaagaaataatttggggaaggtgggtggttaaaagtgaggacaagaaacagtggatactaagcaaagggctggatggatggtgaaattgcatggcattcttaagatgataagtagtccctgtatttggattgccttggtatggaccacttgcaaaaacattcaatatttcacttctaagatatggtaagccaaaatacatatatggaaagttcactaagtcattggcaaataatccagtgttgacttttaatttagaaataactggccaaattgatcccagccttcccaactacaattctccccctgcagagtacattgatttgtattatcttattgttttctctcactgtttgtctttctttttattattttattttcctactggtacaatgtatgacaagagatagtgaactttcctgattttatatattttgagctcataaattccctggagttgtcatctttccagactaaagtttcatctttttctattcacatgttctaaaaataatctttttaatgatgtgtaacatatagagaagtgcacaatttataattgtacagagtgatggactttcacagaatgaacgcaactgagtagtcagcatccagatcacaaaacagaatactacttgcattcagaagcaccctaaatgtcccttcagagtcatgccttcccccacccagccactgcctcatgataaccattattctgatttctaacatgaagtattaattttgtctgggcttcggtttttatattaatgaaatcatatagtaatttttgttgtgttgtttacattatgattctgagattgattgcctgagcaaaacttagatcattctaattgctatatagggtttcattgtttgcctcccacaatttatccattttgctgttgatagacattgaggttatttccttttcatggctattattaatagtactgctatgaacattcaagttcatgtcttctggtgaatatatgcatggacttttgttgtatatatgcctgtaagtaagatttctgggtcacagggtatacaaatattcagctttagcacatgctgccaaatctttttcccaagtgattttgccaatttatattcccatagcagtgcatgagcatttcagttgctcaccaccattttgatttatgtcttttaaattttagctattctagtggtatgtagttttagttcatcataagtttcaatttgaatttttctaatgattaatgagattgagcactttttcatacacttgttgatctttttgtctttttgtttttgttttgagacaaggtctctctctgtccccaggctggagtgcagtgtcacgatcatggcttactgtggccttgacttccctggctcaagagatcctcccaccttagccccccatgtagctgagactacaggcatgcaccaccacacctggctgatttattttttagttgttggcaattttaaatatcctcttttgtgaaatgcctgttgaaatcattactcatttctctattagatcatccatctttttctttttgatgtgtggaaatttttatatattctggatacaagttctttgtcatccatattgctaatattttctcaatctatggctagcatctccactctttttatggtttttagttttaatgcaacacaagtttttttatttttatgtcccatttacaaaatctttgcctatcccaaaatcatggagattttctttttcctgaaagcgcaaatgtgtaagttttcacatttagatccacaatcaatctgaaagaatttgggggaatgatgctaaatagaggtcaagttttgattttcctttttccatatagatattcatttaggtgcgggatgatgttacttttctacagacaggggttgtcttaccttctggttgttttgatagagttgggaaagttctcttcagttaaatggggctgagctgatctacaactcatcttccattttgcaagactccttcaacctctggtttgctccttctccgtggctgaactctccaagtgtcctaatgcctccaaattaattttggttttgtggaatattatccagagtttctagttattctcaatgaaagcactggactgccacaagctattccatttaggcagatacctacgtcagtctagctacattccacaaactcatcaacaatctcctccaaaacatttaaagaaaaatgttgtgtagaactcaaaaaggtaaaagaaaatgtcagtgttggcagctatggctgctccatgtatcctgtcatggaaggagctttggaataaaacaaacctgggttttaattctaacttgtcatttattaactgtgtgacaatgaatcttacttccaagtggggataataaaaaacaactagtttcacagttttcttgtgaagattaaatgaaagaacagatatcaaatacctcgcaaatagtaggtattcaataaataatagatattattatgtaatatattataatttctcttagagttataaaatgcactcatctcttagaaataatagagaaggagtcgggataggtggacttgaaaagcaacactcttctctgagcaccctgttagatgctgaaaagggggaacttggttgaacttgttttattcaaaatgatatcaaggtcattcacatacacaatacatttttttcgtggaaagatggtagaaataaatcatctgaattgagtactgtggcaaatctattccaaatgcttcattttatagatgaagaaattgagtggttaaatgactcgtacaaggtcaattcacttgttagtatttatttaaatgacccaaattccctaagatcatatatttcttttcttctaacatactcctagctcccatgtttaactataaatgtaaagcagagacaattaataatgtgttattattactagctcattctaactaaaacccatcgatctatttttaaatattttattttaatttccatccccacaaattatgtgacttcctgccaactatgattgaaataggtacttgccattcctttcccattttaaggattatgtcctgtagcttttcatttttctgtctgttattaagaaatgatctgccttatcctctaatgtatgaaaggagctcgtgcaagcctgtagaacacagctctcttgaagtctacctagcaaaaaagggagtggggaacctccatccctctgggcactggatacaaaggtgatcatgtgcttctttggcactttcatctctgggcagggacagatcctcatgctttccagcaaaggcagccctgtggggatcgttttttggtaagaccctgtgtccagcacatctttcagcattgtgtactctacgaacagacatatgagcctgaatcccacatggactgagtaacttggaagtttcatgatcccagagcacacagccatctcataaaagcctcacaccaggcttctcaagggctctgcctggaacatgcttccttcagatctttacatgggggggcttcttcctagaaatgtgtttttagcctagatgtctccttttcagagagactatccctcaccatccaacctccagggaccctcagtggacctctttacatcctgctgttttttatttgctcactcactatcagaaatgtatggtgtctgaactccagcagagtataagctccatggaagcagagcccttgtacatcaccttgtgctgtgtcctgaagcagaggactcactcagtgaacaagcaagtgggctcctgtatccaccaaatacacccagcatggtgggtcaggccctggctttgaatactggcctcaccactagctgggtgaattcaggcaaatgacttcagccaagaaacttctcagtgcttatcctaagataagaatatgtattttacaaggttgttacagtcatcaaatgaaataatgtgtgcaatgtgcttagcacagggcctaccactgaaaaatacttaacaaacaatagttattattattatttccataatgaaagcaaatcatattatgaaaaagtcacagaggaattgttttataaaaatggtaatgttgaaatcagagaccctaattcaaccatgtaagataaaattttaaattaatgaaaatctgggtcttcttgttagttatttacaattatttatttttgtaaaggatccctaatttaacctttgcaatgattctctgttgaaataagttatcatctcaccctctgctcttagtatccatttggaaaatgccatctttctgagaatacttgcagtagaaattttaaattaggatattaaccatctcctgtaaatatatgctagcaatgtttttctatttgtttaatctagaaaggtgctagttacagtttttcatgctactgaatgactttagctagaggtttcctgggggttctaagaaaatcactattcttaggggactagaaatctgatcaagagggaagaaattacttctttctttttattacaccttggttctcctatagtaaatgttttcatataaaactcatttctccccatgcccgaggagatggttaaatcaaaggagcaataactagtgcctggctgtttgccactggctgcaatggggactcggggaggaagacaggctcatttgcctaacagggcccagctcccttcccgtcttccttcatcttgggccttttccttccttactacctccggtctagactcagctttccctgcagagacctttggcaactgcttctgagccagggcagccagcatctgtgtgtcgggcactgcattaaaagctatggcttaaagggctcaagggaggaatggttcacccgggcgtctatttgaagttgcgaggtaactgatgggagagaaagatcttaaacagggagtaagagctttagcaactctctggcccttagaccctaaatctgaaaatagaaaggaaagagattatctgaagacaaactccactgttagtgactctgccattcattttatgttttctcttgaaagcctttctgtctttgtctcactaacaaggtagttcatggacatacatagacactacagaccaaaaaagttttccacttataacattttcttccttcagtttccctttattcattctcaaattttgaaataaaattactgaggggattgggagcagtgaaaaagaaacttggcaattagatactatccctgggtttgtcttaactatacctccttctccagaataatttattcagaataaatggatggactttgcgataactgtattttccttaaaatgcaaatgcacaatagctatttctacccctgccttacttctccctttagattctaactaacaacagtacttgaggaagaaatgatatttgaaaatatatagtctgtattagctaaaattcattcaactgaattatgtttccatcctccttttattccaggtatcattggaacatttcaagatcatcaaatcaaattccacagggattggtgaccaaccagaaggctcagacatctgattgctgacctgtgagtaaagtttatgttttattaatactttgggctctgctcttaggaattacacagcctctgtgcctgatattctaaattcttacatctgaagatgcactgtgagaaaccagtttttctgctgtggccctcctactttacttgccagttaattaatcagttagaatctatcaagttttgaaggatctatcaagtcttttatcctgttttgtaatctgattttttttttttgctttatttttaaatgtttcctgcaatgtaatatctttcacaaaacagtcctggatcaatcatgaagtcttcacttcctgtgaaaaatgctagtgacttgaatcaataaagacaacatgagtcagccttccaaggtgaataagctcacctttgtgcaaacactggtgatctcaggagtgctaagtacccctcactttcaacaaatctctctcacctgggaggaaaacttctaccagaacaaggaccacctagggaggtgaaagaggggatttccactttagaggatggagaaaccaaagggcatttcactcattcacagttttgctgagcttggctccagtaggtagaaaagttcttcaggagttcagcacaccactcaggcaattgttgtttcaaaattctatctgttgcccccatgcaagttttctcaggctaccatagtgaaaatccacagactgggtggcttaaacaacagagatttcttttctcaccattctggagggtagaagtctgagatcaaagtgttggcatggtggatttctcgaggccctccttgcagatggccaccttctccctgtgtcttcacgtggtcctctctccgggcacacacctgtctggtgtctttctctctgtgcccaaatttcctcttcttgtaaaaacaccagtcatattggattaggcccaccctaaagacctcattttaacttaatcactctttgaagaactcatctccaaatgcggttacattctgagatcctgaaagttaggatttcaacgtatgaatttgggggaaataccattcagcccataatgctgccaccatcattttccctctctaatatgctgactttttgtttattgcacgtgggcttccctctgtttctcccctcctgaactcttttagcgattacattactctcagagcatctgcagttcttagagtgtattataatcatttgggtacagctctcatttccctatgacattctataaattctgaaatcagagagtgtgccttttacatctctcatagcactagaggaggttttgtatacagtagacattttgtaatatttattaaatgaatgaatgaatgaatggaaagaggattagatgcagcctctgaacctgcaatttatttgctttaagactgtctccaaatgatgagtattaaagatgctttctcctcacttcctgccccccaagacaggtagaaataagttaaggctgaggagaaaaattgaaagaaaggtgtgattgactaatagcaggagagttacctttctcccagaggtaggaaatagtaaatagcacaagcatgccccagttaaggtggcctttccacaagaaaactgttcggggatccaagagggacttactgagtttgaagcctgtgggacatgcaagggcatgtgtctagaaaacaatgcatatgcaggtctgaaggtcaggtgagaaccagagatgttcacagtcaccacctacaggcaggaagcagcagtgtgtcaatgaatgaggccaccaaggaagactgtgtagagggagaggagcagtggcttaaagattccatcagaaattgtgtatggaaatttttcctgctagataacaggagaaggacccgtccaagaggaagaacactgcacgatacttctaatgaagctgtgtgagaacatgtagatgagctaatgtgtgtgtctattttttctcccctagtgtttttggacctattttgttccttctctgtcctgtcttttgggggctatgccccaaaccattcctgtgagccttctcctacccacctttgctcccttctagctaactccacctatggtcattgtccaactcccctgctgcctgctcagggaatcttagacaaacttcctttgggcccattttcttcatcagccaatcagagctgatcagaatggacaggaggggaggccaggatgagaatccttaatgaccaaagagacagaggcaggtcgttttcagggtcaggtggctgtgacgctatggtcacagagcatcatcttgtttagtcagtaaaggccccagataggggtggagggctgtgcctcttttgccctgaactccctcctttgtccattgtcccctgctgattgtcccactccacctgttccccagaataagctttggcagtattttagggtttccctgccagaccagagagtggaggggccaggccatggcccctgacagtcattaccagcctcccctctctaggcctcaccatcaaatgtcatttctcacggagccatatttacccctgggctgaatttccctaatttgccctgctagcatgatgcaaataaaaggggtaaaggtatttattcatctctcttttattttccaaagtgttatttcttttcctttaagttctctccttgctttatgtttcttctctctcccttagttctccttccttagtagaaacccttgagcttcagggtgattttctgattatgagcagaagaggctatcagagatctggaagccacctcctgcatttctttattccccctcctcacccaattgttttaaatgtacattgagataccagctttcttcaagaacccacttccacactttcctctttgtgttcttggagtagccaggaaaaagatgcccattttctcgaaggtacccaaaatgtcagtgacacttgggtcagtgattttatgcaaattactaattatatcaaatgagaaatgttgaaagcaagaggaaaccctttgcaatccatgaatggtctagttggggtgttccaatgaatgatggccagtggccaacataggtgcctcccgactgtgtttcattaatttcagtcagctcgtgggcttggagagaaagatcattttcctatgagcacgtaaaagaagtgctttgagttgtaagcacttcgaaggctttgcccttgttttcgaatgggagattttataaccactgtgggccagtatttttgaagtcagtcgaagctccagatggagtggaaagagaagcttgggtttttattttcttcttcttttcttgagttttgcagaatgagcctccctggaaaccttgacaaagtccttagtctcctttggttcaggtgggcccaagctttttatagtaggatctgaagggatctttcttaaactaagattccttcctgtgggtttttagtagtggctgtagaactaggcttatatgggagaaggtctggaatccactcccttccctgggagtctcctctcaaggagaccactctcagggtccttgtcatgagatatgagaagaaaagtccacaatgagcctgggcatagtccagatttggttaaggattgaggggacacgaggtcacaggtcccatgggactcccagcgttctggaaacctccatagtaaagagggtagaggacattccaacaccaccacgtgcagctttagtaaccttgcccaaataaacgtgtttccccggccagggaattgcacctggtcttaagaggcacctccatgaaaacacacctttctgcctggcatgaccattgacagagaaagactgtgctgagaagggggatacagcagggagaaaaacacacaacggtgccaggagctcttgtctagaactcctttccaggctttttttccccataagcgcaagtgagtacacaagtaaagagaaaagaatgattgtgctatttagctttgaaccaaaaactatcaagcctttcctaaggttccaactggaatagcatttgtacagttacaggacacagactcaattgcttctgaactctgctttaggatgcctaacaggattaagttgtgaacatctcataccacgccgtgcaacagtactcaaataggacttaagcagaacaaacagtctggggaaaaaaaaaaagccctaagacattttccttcctactattctctgtatcccaggctcaacttaatgccaaattaaatctggatttttttttaatagacgtttcctagaggaaaaggcagagctgcattccctgaaacatattttagcccaaacttataacttggattttttctttcctcctccctttcgctaattcaaaacaaaatgtccatcacgcactctaacaccagcctctaagagctagagacaaatgaagtctgaatattcacgccaatgtggtacaaatgagctgtgatttcaggatgctggctgttttactgacaggggaaaagggcagttgactagtttaatatatttggctgaaaacactttgctaaagagcagtgaagaaggccaatgttaataatgaatcctgttctttaatgaccaaatatgatatatcatggaatggggcatcctgagtttgggggaaagcatttcaccatatccacaggatgcagacgagaatgaatgcaaacatactgcattcatgttgggccctaatgaagaagctcttctaggagtattttctccaagttcctcaaagaattcctcccataagtatatgataccatgattttgaatctgatttcacacagaattacaaaattataaatataaagacatttgttattatgagagactccgggaatctagctaactgtctcccattattggctaatggtttataaattttaaaatgcaattataagttggggttgatgagggaagcctgtgaccaccattagcaccttccttaaatatgcatattcagtcagtcgttaattcattcattctacagatatcactggattggaccttctccatctcacgtgccatattagttctgtgttacatttgcaattctagtattccttaccataaaatgggcttttttttaattaaatgcaatggaaaattttgtgaatccaatgacgtgttcagtgacgtaaattgtgatttctaatactgtatttatttttcattggcttcgtcttggcaaagggtcataatattttaaatttctctgccctctcatccacctatcacactttattatgcggtttataggcaaaacacaggcatgcactggctatatctgtaaatctacttttctgcaaatcacttgaagggtaatgcataattgccccctacattattgtttcctagattctaacttttgtatagaatgttgttaaaagcagattataatgtagttccaagtatgctgcttcctctgtatccataggggattggtttcaggactcccgaggataccaaaatatactgatgctcagttccctgatatacaatggcacagtatttgcacataatctatgcatatcctatcgtatactttaaatcatctctacctctaacacctaataaaatgtaaatgctatgtaaatcactgttatactgtatttcctattatattttttattgttgtatggtttttttaattgcgttggttttttttaaaaatatatttttctatccctggttgattgaatctatggatgcagaacccatggatatggagagctgatagtaattgaatttaaaagcaaaataagggtgctgtgatatttttatgaaatgctcatgagaatcaaagatgagagaccagaagccaatttaccgtgaagtcagtagagtttaagccgcagggcctctcatggggagaggtccctgcctcaacacccccatgcctaactttttacatttactattgtattctggttttccaagaaggcctctcaaataatcttcaggtcccacaaaacctggatctgccctgaaactgacacagatatactgagatgatttagcatcgtgtctaaagctaattaagtaagcaaagcaaagaaatggtcaaagtgtgaaatgtgatcatttatttttttaaggctttaagacaaattcagcttattttctaaagtgaaccccacttaagtgaaataataaatcagtttgccaaggcacaagtgaacataaacagaagattcatttttacttcattaataaacatcaaatatgaacggaacctaacatcaagcaggccaaggcctcctgctgacaggaaacagctcctagtaagagcatttgtagaagaacataaatccttccaggcaatcacgtgatcatttcatcattgaggtccttgctacagtctactatgtattatccatttacaggtcttgtgagatgtaacagagtgttgtgattaaaagcacacaatctggggctgagttgcctggatgtagaccccagctctaccacttactagctatgtgaccttgggccaatgactcaccttctctgggcctctgtcttttcatctgtaaaatggaaataataaggattgtcacaaggatttaaactgatattatcacagttcttagaactgtgcttggtacatagtaagtgctacataactgttgtcgaaagaaatcaacttatccatctagaatgaaagctatatgggattgcttgtgggttcactcttgcaactcctcacagtgcctaacatggcacatggtcagccatcagtgaaagacagcaacccagggcccatgctgccctgcaaatgtgcttcccttgtccacccttgatgtggtttggctttgtgtacccactcaaatctcaccttgagttgtaatattcctcatgtgtcatgggagggaccaggtgggaagtaattgaatcttgggagtgggtttttccctgtgttgttctcatgatagtgaataagtctcacaagatctgatggttttataaaggggatttcccccacacatgctctctctagcctgctgccatgtaagacgtccctttgctcctcattcaccttccaccatgattgtgaggcctccccagccacgtggaactgtgattcaattaaacatctttcctttataaattacccagtctcaggtatgtctttactagcagtgtgagaatagactaatacaagcatttttttcaaattttgagtctgaatgctcatagggatgcagggatgcatatgttctccattttcccataagctaccactccccaaatagttacctctttggtcctttaagctatttgagtttgtcatgcctgatataaatgaatgatcccataatacacgaacactgcaacagttagtggcagttttatggctcactggagtaaagagatgggcccataaggaagtgaaatatgagtcacttccactccctgatgctctacctgcaaacagtgttccggttaacctacctatccctgtttctaaactagaggtctcagaagggaaataggaaatcaggaatctgagcaagcacttgcttagaaacagagacgagtacaacctaatgtcagagctggccaagactctatcagtcatgacaagctaggttatgctggtgtcagaaacagccaaaatctcagcaacgtcaaaatgaacgtgtgtttatcactcatgctttgtcactaaccctggataggcaagggtttctagtccacatcactgtcatccatgcttagccacccctactgacaatgactgtctggaaatcttaccaaccatgatggagagaaaagagctctttggagggtctcctattggcaagtctaccccagaagtgacatgatacttctgctcaaaactcattggccagaattagccacttggccccagatgaccacaaggggcaagcacaatactataatgtgcccagaagaagtaaaacaagaatatggggcaaacagcacaaaggatcacagctgtgacattatttggaacttggagtctcaggccagaattcttaagcttttcaatgagttcaactcagcaaatatttccattcataaataactgcacagcaaagtactcagcactgtgaggggatgtcagaggagatgtaggccttgacactgagcagcttcagacttggtcaagagaaagtgatggtacaaaacatttgaacagcaaggccatatagtattgatcaccaagaacaaggccaataattgctgtagaagctgaaagggagggtggttctgggataaagataggacttgagctggactctagaaaaatataggggatttgcaggagtggagggcacttcaggttatgggcagcaagaagccagagacaaaggcccagaggcagaaatgagggtgaaattattgcaggattcaggagtttggcttggctgtaagttgtgtttgcatgggagggtagggtggggagaggaatcatgtgatggatagagtggagccatttcacagtgagtttctgggttctgcagagaaacaagatggtggtatgtgggaggaagatcatttttcctgaataactccattcaaaaccaaggaatttgcacctcccaatcaccagcctttcccagcacatttattccccaaaacaagagtcctgaatacccaacagcttcccagaccttctaggcagtcattgaatggagacagtagtaaaccctgggctgctcctgcctccagtttaaagcatctttgatcacttctgctgacaaagaatatccaagttcaagtgaaatagcctcttattgctggggtcagtgtagcctttttgctatgtaacatctgtttttaagattcggctgagagctgagaccttgacttaaatctgtttaacttaaaaagcagcaagagaacatcttgttttcatgaatgtccaggggctgtgtgtcaacaaataaaaggtctgcttgtggtactcaaagtggaaaagctggttgtgagatgttctgccactgggataaatttattatggactgtttgtctcttggaatcatgcaccagcatttgaaaataaatcagcatatttctgcttgatggcgtgttagaaccatgcttttattgtcggaagttcacagagctggatgggtctagaaagatgccctctttcatgcctcccaccttagctgcatgaagttaatgtcttaacgtggattccccgggtctgcatgaattctggcaacagtttctgatggatcattatttttatgtgacttatgtaggacctgaagtgggaaagaagtgggtgagactagttcaccatccctcaaatctgactagttgcttttctcctcacccacctatttaggagagagaagtggaaaggaattttatttatctgcacctaggggagcaaatgtctggcatgtactcgatgtcaatttaatttgttgaatgaatacaaactccagtcttataaatttatgttccccgtatgaattcatgtctctatatatattaatgtcattccttttggaaaaggtgattaccacccagatcttattctaacacataggaaaccattagatcgttcctgtagttctctctcatagtagcttctttttttcttctttttaggtttcttcctaacattaacctaatttgtattttatttgttgattgcccatctccaccatcagactacaagcaacttgaaggcagaatagctgcattcacatcttatatgctacactaagcaaggtagctagtacatgaatatttcataaacatttattgaattttttatttatttatttttattatactttaagttctggggtacatgtgcagaacgtgcagcttgttacataggtatacacatgccatggtggtttgctgcacccatcaacccatcacctacattaggtatttctcctaatgccatccctcccgtagccccccacccccaccccgacaggtcccagtgtgtgatgttcccctccctgtgcccatgtgttctcattgttcaacttccaattatgagtgagaacatgcggtgtttggttttctgttcttgtgttagtttgctgagaatgatggtttccagcttcatcaatgtccctgcagaggacatgaactcatcctttttatggttgcatagtattccatggtttatatgtgctacattttttttaatccagtctatcattgatggacatttgggttggttccaagtctttgctattgtgaatagtgctgcaataaacatacgtgtgcatgtgtctttatagtagaatgatttataatcctttgggtatatacccagtaatgggattgctgggtcaaatggtatttctagttctagatccttgaggaattgccacactgtcttccacaatggttgaactaacttacactcccaccaacagtgtaaaagcattcctgtttctccacatcctcaccagcatctgttgtttcctgactttttaatgatctgcattgaatatttttattaaagttctcattgggatgatggttgtagagtctcagccactcttgattgtatctgaatttaaatataatgcagaagacgacaggacttataatgcagctgaatatgtaggggccttttgtttaatgacacactcacattcatttggccatacacgctactgaaggtcacggcgggatgggctaaactaaccatctctattttctcaatttaaggtggtcagctacatctgtcatatagctggcccggattaatgtcatagcacagggccatagcttaggatttttttcccctcaaatgagtaactcattcctggtgggataaatctgtgactttagccttattagcaagaaattctggcccacgaagctatctggtaaaggcagtgtgatatggtttggatttgtgtccctgccaaatctcatgtcgaattgtgatccccattgttggaggaggggcctggtgggaggtgattggatcatggggaaggatttcccccttgctgttctcgtgatactgagtgagttctcacaagttatggctgtttaaaagtgtgcagcacctcccccactctttcttcctcctactcccgccatgtcaggcatgcctgcttcctgtttgccttccactatgattgaaagtctcctgaggcctccccagccatgttactcatacagcctgcagaatcatgatccaattaaagtcttttctttataaattacacagtctcagatggttctttatagcagtgcaagagcagactaatgcacagtgcaaggatctagggtcagaaaggtgttttggtgctcaacagacctatggcttaatgtccacgttcacttgtccagtggtcaatgcagatctttctggtgatcaagcacaatatgaatactctcacttgaggggtacgaaggtggattcatttgctccatttttctttggcttcctgtgtagatggaattgaaatgggaatgatatgtgcattccaaaggatctcaagagaaatgctcattcgtttacaagaggtgcaatcccacaatagtttcttgctttgtatacttgaaaacattcccaaagaaacaaagttggatgcagaaaagatattgggagaaaagaaaaataatactccaaattctgaacaattctactttaacatgttgatctgtctgccagctggccacagggttgactacttgtaatatatacttttggtaggccacatgtagttcttggaactgtttatattcggctgcagaaacttaattattctaaaattggcagagtgatctttggttacttaatacaaaattgcttagtcatctttaaacatagtgtggacagcttttgtttaagtgtgaaaaattaggaattgcaaatgtactccaaagagattttaggtcagggagaaaaacaagaaagtatcattctttcaagatatttagcccggtggttgccacatgttttaatttgacaagctaggtaactgtcgagttgaagtccttgattacaagtatttttccattttctttgtagatattgtcagaagtagaaagctgttgctgctgcttcttagatggtattctaatcctacactctgcaaagtataggtttttcagcaagagtgtgaggaactctaacatcagctgctggaacagctttcttgttctacgaagcgaacaaggatgccatttcaagctggttgtcacaaagatcctccttttgcctcttttggtttgaatcctcgaactgttgccttccacgtatagtacagagctatagtgctttagcgaggaaacaggcaggcagagtgagcttctgcattttttaaagtctaaagtggcaccggaagtttctagtttttccaggaatgcccatggcaacctcacacttttcctgtgatctgggctggggctcctaagagagatggtgagaaaagataaaagtcctgtagccaatgggtagccacgcgaggcctgggaagggtaggttcccaagcaaacctccagaacggtgccttatgtttctaattactgagcatggttagagagcaaaatcaggcaacagtttttttagactgatggaaacatttaattggctctgaatgtcagtgttttctaattatgatagaggggtagcaagaagtttccaaaggctgcggaaatttgaagtgtatcagctgaattctgattctcttcttttcttattcatcctgtcttctttttctttcaacatccaagaacaaacctattccctcagttaaatgcctaatactcctcttcctgaaatcgaaatgtctctctaagaccaagttcttttccactagagaaaaacaaccacaactacaaatcagaatataaaatagagttccatagtaaaccaccaccattcccaaggttactaagagctcagccagagaaacagccttttgataacgtcttagccaagttcatttgtttaacaactaagttcaacaaataaacactgccctggcatctgttccaactcaacaagtgtgagcctaatgcggagtataagaaaaacagtcagttaagaactttgagggatcacgaaagacagtaatcatttctaagagataacaaccttttacagaagacaaatatgtacttggtaattaaaatacaagctatagactaagtgctccaatagaaatacaacatgggtatcagtacaaactcaggctattgagtcagttgttcaaagatcctatggttttgcgctattctttttttttttttttttttttttttttggagacagagtctcgctctgtcacccaggctggagtgcagtggcgcgatctcggctcactgcaagctccgcctcccgggttcacgccattctcctgcctcagcctctccgagtagctgggactacagatgcccgccaccacgcccggctaattttttgtatttttagtagagacggggtttcaccgtggtcttgatctcccggcctcgtgatccgcccgcctcggcctcccaaagtgctgggattacaagcgtgagccaccgcgcccggccagttttgtgctattcttaagcaggccccaactgtgagccattccctacctgaggaaaagtccaggtatccccaaactaataaatgagtgaaactgctatctaaatgactcattactatctaaattactatctaaatataaagaaagaggaagcaatctaagtacttttcaacttattatttatctgtaaatatatatgcttaaattatatgtctgttacatccaagggacatagcagataacatcctttagttgggtttcaaacctttccaccttggattataaacttctagaaggtagtttttaacctgctttgcagttccagaatacagtaaacacacttgatgatcatgatgaatagaagtcaaataattcactagagaataattagtccctgatcagtaacagcttgtccttcacatacaaaaatactgctattaacaaagcacctctagaacacacctttgaattgttttcagcactataaatggatttgcatcctgccatctaagctatcctactttatattagcaagatagctggccaaggctctgtatcactaaactggaagtgttagttgaacaaaccagtcacaaaaagcaggcacatgagttgctgacttttttttttttttagctgagtagttcagcaagtccagaaggccatgcacaagttaaactacttttatgtaaaatatggtgatctctgcagcatgtttacaactgggaaaggcccatggcttctgaactttcattccatgtgaaccactcttgggccttgttacttaacttgaagtgtgatctttcttcagccagtgtctcagcttcttttgtatttgccaagcatttcactttctcagttgcaagtgcccagtcacagctagattgcccccatccaaaaagcctccataggaaaatggagagagtaccaatgagggaattatgagagcacagccatgctttgagatgctgacccatacaacaccccacaacttaccacatcttttctatgagattgtaaggtctttgaagacagaaaccatatctaacataccttcatgtctctgaagtgcatagcattacttcactcagtacaatcatttcatattaggagttgaaagatctcttttttttttgagacagtcttgttatgtcaccaggctggagtgcggtggcatgatctcggctcactgcaacctccacctcccaggttcaagcgattctcctgcctcagccccttgagtagctgggactacaggtgtgcgccaccacacccagctaatttttgtaattttagtagagacagggtttcaccatgttggccaggatggtctcaatcccctgaccttgtgatccacctgcctcggcctcccaaagtgctgggatcacaggtgtgagccaccacgcccagccaggagttggaagatcttatagtagagctgtccagtagaactttctgcagtgatgaaaacattctctgcaccgtcttatatgggggccactaaacacataatggctactgagctcttgaaatgggactggtgaagctgaggaactgaattttaaattttatttattttcaatttaaatgacctcgtggctggtggctaccatattggacagcatagccttagaatcttaaaaaatatattttcgccataaccctaaatagatggccacttcttctccctggctttttcagggataggggtctaccctttccatgcacccccatttttgggtagttgcgctggagccagccctccctgtatctgaattatgtgtgataatattgtgaatgcctctgttagtcaggcatacatttagaaagcatctttacatatttgttgcaagtctacgcattttttctcacatggacacaaggtagtggagaatttccaccttgccttagggtttacgcttgtgtcatttgttcttctctagtggccaatagagcagcatgcctattctgatttagcattaaactctgtctttcagcctaattctccttgagttcatcaaggaaaagtatttaaatgcttgaaaagaaaacagaagaagtcgtgtcccaaattttcacttctcttcattcttctaagaaactttcaagttggtttagaaattagtctaaatgccaatcctggttttccactgatttgtagtggttaaggagctaatgtcaaagctttatatgtctcagtctcctttcttcaaatggggttgaattgattcttcttacttgggaggatcaaataatgataaccataaagttttgaaaaatataaagtgctccaaattaaggtggtgatatttgtgataacacttgaagatgcaacctaaagtccctaaacatggtgtcttcctaagtgttgaagttagtatatacaaaaaccatcatttcacaaatctaaactactcaaactgtctgctactcagaaggtgaaagaaagggcataaagacattggctttaataatgttaaatctgccaggtcttctgtttgctagtggagaagtacaaatagagaaatggtaatgctaagagattgtgcggggaaggcaagggaaaaacaggtcataacctgttaacctgcccttagtatgttggattccattgattagagaaaagaaacaccttgagaagacaaagtgcctcaggttgattgtattcactcttatttctatgctgctgttcttgacagacctgccttggtaaatgcatgtatttttttaaagtagcacagatttttggaacaagatggtgaaggttgagctaaagttaagtgcaaactgtacattataatccatttgtttatttggtttttcaatcccaaatgaaccattgagctcagaaaagagcaaagtgggttgacaaattgattttttttgaaaagaacaaaagttcatttggtacagtcggaaagaaagtgctgccagatttactgtgtaactactgcaaatgtgggtttatataatttttgagattcatacatagtcaattaccaaggtctttgattcactttgtaaacactgatcagtcaataaagtacagagagatgaattggcttgagttacattttccatactcagaatggtaaaatctagaatagaaatccagtggctcaaattggctacaatttctgagtgcctactctgtctcaattgtggaaaaatttttttaaagactatatcttttcataagtggccttaagaacaaaagcatatggaaagtaaaatactaatacaaatatttaaagactagctaaagagaacaattgatgagctgtagctgacagtgtgttattgattatcaacatgaattatagatattcaaggagggaattgtcgcttttaagctagggttctcaggaaagggtatcatgagggaagtaaaatttgagcatgaaattcatgattgaataaaaatatggatagtgaagatgtagattaaaaagaatgagtaaaaatgtagaggtagaaagttgtaagacatatttgagaggtgataaaatatttttatgtaggatgctgtggtatgatcagcttgaaaggaaggttaatggtttctagatcaaaaaattaaatgagaacagacttagatactcaacacatttatgtctgggaaggaggaagaagcatggatatgtcatgtgtgatacctccagctttgctggctcaagcaggtatacagccatagtattattatgtggcgtaagatgaaactttgaatattatctctccaaccagctcactttatagagaaacaaagctcatagagcttcagtctcagtctcctaggtctcattccaggtcactatttgccaagggtttgtgaaggaaaacagttaaagggtcaaggtaagcgatgatcattgcagatcagaggtaggaaatctgctggagtatgttgtacccagaaatcacccaatacctgtaggatgaagagaaacatcactgagttgcagcgatggcccaactgaaatgaatgcaaatctttaggatatacacgacatgctccctttctcccacaaagcactgaatctcaagaacacaaaacagaaagcaggtgataggtgtgattcaaggttgaagatgggtgtgacaagcctggtggaactttaaagaagcaagaaagtctaaactatcaattccaggaaggcaaagaccttttctgtcttgttcactgttataccccagtgtcgagaacagtacctggcacatagtagctgtgcggtaaatatttattgtatattgattgtataaatgtttttgtgaggcctcactgaagtagctgaatcatgaaatttacagtgggtgcaaaatgatggctagtcagagaggacctgtctaataatggttttgagtgttccaagactagagttccttgcgagagcagagaaatgatgatgttgtgaatgaggatacagtgggttagaggaggaagatgtgtaatgaagaaggtacaatataagagaagaaactaagatattgaagaaaagtatgcaatgatgctgtcgaggatacagccatcctgagttacgaattttacaaagcactaacaataaattaacagagatgaaataagcatttggaaggctaattcaattgagatcttttgtgacttgataattctatgatttaaaccaaacaggttgtaaaccgaaggcataggtaatttttaggattatttcttacctaaggttatatgatccaatgaatcaatgtggcaatcactgataatagtcctctcagaacttctttggggcactcttgtttgttccctgaaatgggaaacaaatcctagagagaaatagtggattagtcctattatagtggttaagtgtatgcactttgaaattccataaaatggggattatactagctacctcacagatctgttacccagataaagtaaaattacttatattttaatggcccagcagagctatcagccatgaaaagacttgaaggaaacttaaatgtgtgttgttaagtggaataagccaatcagaaaaggctacagacatactgtatgattccaactatatgatattctggaaaactcaaagctgtagagacataaaaacatcagtgattgccagggttttggagtaaggagagggaagggataaatgagtggagcaggtggggtttttagggcagtgaagctattctgtatgatgctactatggtgaatacatgacattcggtatttggtgaaacctatgaaactgtgcaacaaagagtgaaccttaatgtaaactatgaactttagttaatcataatgcatgaatactggtttgtcaattggaacaaatgtaccacactactgcaagatgttcctaagtttcctagggctgccataacaaagtaccacacactagttggtctataataacagtaatttcttgtcccactgttacggagagttgaagtttgaaatggaggtgtcagcatggccaggctccctctgaaggcactggggaagggtttgtcccatttctctttctcagctttctggtggccttaggtcttccttgtctccattttctcatggcatctcaccatgtcttcacattatctcccctctgtgtttgtctgtctctgtgccaaatttccccttttcataaggacaccatcatattggataagggaccaccctaatcacctcatcttgactacatctgcaaagactctatctccaaatgcaggagaaaatgtgggcaggagttggggaggggggaatatatggaaactctgtactctctattcgctttttttctgctctaagaaataagtctattcattaaaaatgttaaaggcttaaaaaacagcctgccacatagtacatattcaataaatgttagttccttttggatgctgcattaacttattcagtgcccctgacacaacagattttattcttcttgcattccaagatcaatactggcactgcccaaaaagtagataagacttagcttcttccacatggccttgtccctaagtgttgagtgctgggttagccacctgctcacaaacatctcctgccttgactgcatttacacacgtgctcatgcacaggtgacacaggtgagcatacccacacacacctaaaatggcttatctgccaccaacactgacccaaacaaaagcagaaacttactagttccccttataaaggcatcacaggaaatatctatagtgagggctacatgcccatagagggaaaaagaaaaacagcaaaaaagaatataaaacataatacatttcttggttgaaagatgcacatcagctattgaactaaatttttaaaggaaacgagccataaattgattttaataaatataaatatactttcatttccgacacagggtgggagacagagaagaaaaaaaagtcacaaagaaagagaaaattttttttaatgtcagaagaaataccactcaatattctgcctttgaaaagaggcagagaaaaaaaagcaaggaggaaggaaaggaaagagaggaaagtcccggaagccctggcgtggtggtaagatgcaggacacgcctctcgtcacatcatgccaatcccctgggccgcaggctcgtggctttgttcaaaaagaagggcaggctgggtgcggtggctcatgcctgtaatcccagcactttgggaggccgaggggaggatcacctgaggtcaggagttagagaccagcctggccaacacggtgaaaccccgtctctactaaaaataaaaattagccgggtgtggcggtatacacctgtaatcccaggtactcaggaggctgaagcaggagaatttctcgaacctgggaggcaaaggctgcagtgagccgagatcgcgccattgcactccagcctgggtgacaagagtgaaactccatctcaaaaaaaaaaaaaaggaagggcagtgtgtttggtgatttgaaatcttttttctttccttttttttttttgagatggagtctcgctctgtcgctcagactggagtgaagcggctcaatctcagctcactgcaacctccacctcacgagttcaagtgattctcctgcctcagcctcctgagtagctaggattataggcacctgccatcacacccagctaattttttgtgtgtttagtaaagatggggtttcaccgtgttggccaggctggtctcgaactcctgacctcaagtgatccacccaccttggcctcccaaagtgctgggattacaggcatgagccactgcatctggcctgaaacctttaacactgacttatttcttaatcatggcagtttaggcatgccctgttttaaaagaaaatcctatctatgagaatccatattgaaaacacagacatatccataggtaatgacatctgcctctgttaaggtttttgtttttcccctctttacaaaagaagtcacctcagtaaatttttcaatagcatgaccacagtccctcctccagcacaaaaatttagattttcataaaactctccgagaacgcatcatctgtcactaacatcaatacttagctctttcacactactctatttgtgacacccagagcctcacgactgatggaatcaccctgtcttgacttttcatcccttcattggttgagagtttgtttcctaaccaatgttgctgaaaagaattcagcactgagtaggggtagggcaggaaatgagggattactgcctggggactggggacgtagaagagaaaaagaaaatcacttaccattctacctagacatgtctcctcttacaaaggaaagatgctagagaagggctgaaaagctctgtgatataagggtgcagggatgaaggaggatctccagccccatcctgggttgataccgagagccattttcataaacacatacagcttctctcccccacacaagacacacacaccaccgagagtcataccacatggtacacagatgtggttttgtgctttcctctaagctacacccactcgtgtgcacaaagcctcacctagaaaagcactggtctgtaggaaatggcacacgctctctctctccctctgggtgcccccacatgtatactcagcagcattcaaatggcaggtagtttttctatggctgggaaagaaaaagtgctcaagtaagcaagagaaggtgaggagtgggagaagagaatgggtaggagaaaaagaatttgcgtgggttaagagccagtgaggatggtcagccaaactgacctcacgatgttagtttcacttcccttttaagtattccaagacactgcccggctctgcagaccatgtgcatctccagcctgcttggagatattcatttcactgctcattagcacctctaccagaggtataggctgagaaccactgttgctgacaaacagccagaatgactacttaaatttgatgaggtaggagcaaaaaccagacagaggcttagaggatgctcttcaagctacttggataaattttaaaaggtaaaattgtttgcttatagacggacctctttttcccatgtctgtttgctattgctatagttattcaagaggcactttatatgcaacaaaagaccacatggaaggaagagaagagtctaccctcccactgcacctggcattcgagtccaggagtttagaccctactgcccacagggctgtcctcacacactcctgccctgtggtcagaacaggagcctaccccagggagaagggccctgggatgccctcttagggaactctcaaatcactttttctttttccattcagataattacagactagattggaaagtgtagaaaaatttctttatggtcgatgaaataataagaaggaaaatgggttgtttccttcataactagcaaagcctagggaagtactcttggtaagagtaagatagataaacatcaaaaatttaaaaccccaaataaacaccaagatttgaatttctaaagatttataagcagcattaataataccctagaggataaaaaaggggaaaaattcaaacattgtatagttttgcttttgttggctgaacttttatttttgtttttgtggggtttttttagaggggaaaaaacctttgaaaataaaataattggacaatttatttaagaaggtttctgaacttggcttcaaaatctaagttttgttttttgctccttcaaacaaagatgccttcaggtgtgatggctttaggttttgtacagctccttattttttcacacagggcaaatggctcgtctcatgtgcacataaagggctggaaaatatttctgtgattcgagcgcagcagagagtctaggattccagaggaagtggaggcctcccattccgcacaggaaacaatcttcaagcaggccttaaatgccagattccaggctgagtttaactaaccactgacagctctgtaaacaaagcaaggacaaaaagagcccgcttccccctttctggtagtcattttgggtttgggggctgcaggggaattctggaatacttgactccatggcacagaaacgcaggggaaacgggctcctcatttaaagagctggaaggggaaggtctttccggaattaaaaccatcacagaggaggtaggaaagggtaaaatggttgggttacatctgtagaaaagcagtgattttagagcttggaaaacagcttgatcaccacttaactgcttttaaaaatgttgcttcatgatgtttattcatgatgttactgctgcagtctttattaaaatcctgatgcttctttgagaatatgcacattatatgcctagacactgtattattttatttctcgctttcacttttctcctagttcctacaaatacctcttcttgccacttttcttttctgtttgtcattcctgttttcctcctcctttgttcactttttcataactttggtctggggttcagaaagttacaaagagcaaaatcattcattagaatttcaagtgattctaccaatatttcaagtcttcaaaacctctctgtctccggaggtcttttttaaagaataaataatcttgggatcttacttatttgtctctaggagattcatgaatgagactgaatttaactcggctcaggagtcagaaattgatcactggctaccttatcagctttctaagagtaaagaaaaatcaggagaatgacaaatgggaaagagggcccatagtaactcaggagaagtaacacactgagttatcaatgatattgactctacctcctctctttcaggtccagacatcatctggtctccctgaacctgaaatcacaccatggatgattttgagcgtcgcagagaacttagaaggcaaaagagggaggagatgcgactcgaagcagaaaggtaaggatctagggtgaaaaatacttgtattcccttattaacaaccttggtttcaggcctcaaagaccatccttttgagaggccaaatgtggtcatatcgcacaccaaactgttcgcaaaagtagttatggaaaatttttctgctaagactctaaattaagcatttaaaaaaggaaaacaaacaagaatcaagaaaaagagagatttgagaggaatcaattgataactgcatattgataattgcatttaatcaatacctttcacattggaatgttttaaatgacaaaagtaatgtgtgaatgaaggtttaaaaagcttatataataagaaatgacaaaaaaatgtcaagtattgaatattggaaccacttaggacatgagagtcttcaatctaaaaaatataaaggcaaaaagccctggatgaatcttgtgaaaaattttcattcttattagaaaagtatccaactctagggatctgcatagtacaggttaataacgggctatgttaccgaggagattctgggtgtaactggaagctgttaatgtcgtgtgaggcctctacagtggtggctatgaggtcaaattggggagataaagcattggcatataaaacctggggcataaatacatattttaacattttaggcctcagaacaaaggacagtgtggtatttgatgcgacttaaatcagatgttcttttgagaaagcaggttaggcattcacagagagaaaaatgttaaacaatgaccttaaaatcaaatcgatttttttcccagtaactccaatgctcagatgaaaaatgacactttaacgataccacagcacaaaactggaaacttacacctataatgaaaagtattgttcttatgttctacttatttgcatggagaatgcaaaagcaaaagataaaataactgcctatgatgaactgggccagagtcagctggcattcatgaactgactaaacatgtccacaaggcactatggatggtacctgcattctgttggttcaaatcctagctctgccatttgcaagctgtgtggccctgagcaaatgatttctctttaagccatagttgccttatatataaaacaggcataatatctacatagcctgtgtgattgttgggaagattattgagcttcataaatagcctagtcaggtacctagcacatagtagtttttcataaatgatagtttttcataaatgatagctattattattattaaccattatcactagccaaacaagaaatagcatagcagcatagccagagctaaacaatcatgccaagagaaggaaaggtagtcattatcctgcaatggaactagtcagagaaagtttcttggtggaggtgagccatggaggaggtaatgatggcaatgaagagggaaacggagcctgtctaggtgaaggaatgacaccggcaaaagtgcagaagtggaaataagaatcctggtgcaagaaacctgttgagtgtttaagggaaaatggattggactggtatatcttggctgttcctatttgccatacaaggaatagacagagacttaacaagggagttatgtgcgatgacactatgctggagaaacttatctacagtggactagaatatggggataccagcactggaagagatagtatggtaatgagggcctgaatcaggtcagtgagtatggaaatgaagaaagatcaaatatgagagtctttacagagggagaattagcaaaccttttaggagagcaaagaacttatagacggttccaaagaatatacatctgaggagctggaaggaaagtctctgctttgtcctaaatggaggatttccttcttgaatcgtcagagaggagcagtgtttaatttcaggtagaaaccacatccaaaaggggatttcctgcaggcatgtggagataggaaatttcactctttgttcaaaaagggagagaaattattattagagtaataaatttgggcagacacagtatggtggtgctagtacaaaagctgaggggatattcccaaaaaagcaagtgtagaaaaagtgagcggtcatcaaggtataatggaagccatcaaagaagacaacgtaccagggagatgggggagaaccagggagagtatgaggcccaatgttgagtggacatggtggacatggaagtcttgcgggcagtggccgggctcagtgaaccacacctcttattccttccaatgctgtgttatttcacctcaggttctcatgatagtctacaaaatatcttcatccaacaactatttattaagcactaaccaggtttaagtgtgccaggatgggaaaaataatggtggtaaagaagtagacatggttcttgcctttatatacctcacagcatgctaggaaaccaaagtgtaacagaatcaggaagcagacaggccagggtgtaggggcagacctgatagagttgtggctagagaggctcaggactgaggatgtagacactgggcatcaggctagattgccattgtcagcttctttcctttccacgtgaacagggggtcagggaatcattgacagaggtgtgacagaactaaagtgctgtggttagagccatactgtcattagagtgaataaacccagtttcttcaggttcaggactttgcttaagaattgaccgcacggctacgtggttcgttcctttgacttttttgttttgtgtggaagaatttctcttcttttaatgtcagatgtaaaaggaatgtacacagtaagtcttagttatgtaccctgaataacctaaaataaacttacacaaattaatcctaaccttgtttaatttatatttctgtctgtattacttcttttgggatattatattgttttcttttctgttttttatttcttctttccttcctttctttcttgcttccattcatttccttccttcctctctctctctctctctcgctctttctttcttcttaagagtagtacttacataattccttatacttgtactaagtttacctttccatgtttcaaggtgagccttctagttctgctattctgagatttggtaagcccatgaccacccttcaggattttgtaaaatctgatcatttatgggaatagtgaaagtcaggcttcatggttcagccagctctggtgggaaagtgcagggtgtgtgcaggaaacaggtggccagaagctgaaatcaaggccatctaaaatcatggttttgatctgaagacaaagagcacatgagaccctgagcaagtccctcttcctttagctccagaccttggcttcctcctctaaaataagactagccattttctctggggtattggtggtcactttaatttttttctcgcttttggtattattgatttttctttactacgatcatatgttactttatttaaagccaaataaaaatgaaggcaattttctgttttgaaaaaaaataattctatggccctatgcagtatacctgagcccagatgggagaagacttaacttctctttgaatttagggaactaaaagaaagatttcatccctgatctggagggcagttaccaactactggaaatagagtggctccaaggctcagagctgcagattcatttacttactctcaacacatttttactgggcatctattccactacaagctctattttgggtactgagaatagacccacagagtaacagtgttgggaagtgtgtgcttagtgctttacaacctatctaaaatgaaaaaaagatcaagaaattatacttttgtatcctcaaacataacatgtaccccgtatgggttcatacttattagagatgacccacagcctttgtacacctgacccctgcagacagtgtgggggatggggtatactacagagaagagaaagtccattgactttccttacccataaaagcttttcaaataaaaataccctgttatttttatttaattagtattgagtctgattgccagatgcagttttactttgaaatgataaataatttaaaacttgtacttttacccggtgttataaccacagattaaaataaagcgaatttttacacattttattcttcagaaacagaccttttcaaagactattttgcaagctaattgaaggctttgtgccatgctggcttgcatgtgcttaggactggcatttattcactgcatccgagctgtcctgagactctgtcgtccacatatctccttctaagggttttagcccagttcatttcaaataacctcgactgcaaacgtagtgcatcaaaaacgttcttccagctgggcgcagtggctcacgcctgtaatcccagcactctgggaggctgaggtgggtggtcaggagttcgagaccaccctggccaacatggagaaaccccgtctgtactaaaaatacaaaaagtagctaggcatggtggtgggtgcctgtaatcccagctactctggaggctgaggtaaggagaatcgcttgaacctgggaggcagagggtgcagtgagccgagattacgccactgcaccccagcctaagtgacggagtgagactcggtctcaaaaaaaaaaaaaaaaaaaaaaaaacttccttctttgtcttgccccttagcctgtgcaacttttatgccattacctcgtccttccttgtcttccatttggctttctcactctgagttcttgagataaggtctttagatttggcaaaaaggaaggaagtacttcattttgtcataaaaagaaatacagatgctgaatacctacaaaatgcaagatactataccgaaccataggaatcagtggtcaccagtagggacagtatcccagtagtcactaagctcctattctaagggtattagtaactttagagcaatcgtgaccaaaagagggagaaaaaaaattcagtaggcagaatggaatgagcagtaatcagtgaaaatccttaatgcattgtttctaagcaaaaggcactatttgctcacatctcaaattaaactgtattttaaaagcaattactcatttgaacaaacagataaaaatttagttttgctgtttattattctccaccaatctcaggggagtaaaaagttaaatagatacattctggccggatgcaatggctcactcccgtaatcccagcattttgggaggccaaggcaggcagatcacttgaggccaggagttcgaaaccagcctggccaacatggtgaaaccctgtctctactaaaaatacaaaaaaaaattcgctgggcatagtggctggtgcctgtaatcccagctactcgggaagctgaggcaggagaatcacttgaacctgggaggcagaggttgcagtgagccacgatcatgccactgcactacaagctgggcgacagagcaaaaacaaacaaacaaacaaacaaacaaaacaaaaaaaacccaaaaaacaaaaaaaaacactatattctgcttccctttctgtttcttttatttcaatccctctcctctgccttcatctctgttttccttggtgcaccttcatgtgcctcttccccggtccacgtgcatcttcatcaacacttgatttgtttgtttctgtgtctcttcccatctgcactcctaatctgtctgctctgaattatgtgtggatgtgctgttgcatcaccaggaaatacatacttctggccaggaaagagggagagagaaacccagttctcttcctgttcagcaagtataaaaaagtgctagacattttatgtgtgtctagtaaagacggaccgccgccggccccagaattagctatgtctgaatggaacatttttgctctatatgaatgaggcaaccccaagacacataatgatggcaggcagtacagttggcagttaagggcatgagctttagcactgggcagctatagtgtcaaatcccagctctgccacttactaactatgggatctaccaaattattcaatctttcaaatattttgtatcctcccttacaaaatgggggtagtaaaagtatccacctcactgggtttttgtggggatgtaaaaaggtaagacatgaaagtattaacacagtgttattcatctaataaacattcaataaactcattattaattattattatttaatttgattctctacaacatggaaataaaaaaataaaaatatgaaaggcttgtggattgttttgcacatcatagatggtacaagaaccataggcaagatgaaaggcaggaatgcgtgactgactgaagagctttgagtgactgtgatcggtaacagtttttgaggaaggactgtgttgtctcagctggaagaattagcaccagtttaagttatttttaaaaatttggccgaaagaatgttgagctgtggtgtattttctttttttctttttttctttttttttgttttcatttttgtttttttgagaaggagtctcactttgtcggccaggctggagtgcagtggtaccatctcggctcactgcaatctctgcctcccaggttcaagcgattctcctgcctcagcctctcgagtaggcacacgccaccacacccagctagtttttgtattaattagagaggaggtttcaccatgttggccaggctggtctcaaactcctggcctcaagtgctccaccggcctcagcctcccaaagtactgggattacaggcatgaggagctgtgatgtattttctgagaaaccagcagtgatgcttttatccatgagaaaatctccagcagacatacttggccgacaccgggcttggttccccaacaaatggctctctcactttccaagatgtgctcattacgttcacagcatctgctttctgcacccaacatgagttcctctcactgatcagaagaaaggcccctattgtagagttacgttatcagattcagaagcttacagacataaataaagggaatgaaaacacttgctgttgtcatcattcatacatttttatgggcttctgaaatggcttgatgattagacatttgaaagtaaatatttttactacactataaaaagaagcaattttttaaaatccatggggtctctaaagtcccctctcagaactgtatcactgagacttttttacatgatttaatagaaacagccaatgaatgattatacaacacacaacccctcacacacgcaaacccaacacttattcaaaatgcttagcatcaggaccttgacatttttaaataaaatcttttaaaatgaaattactgttattttatcatcagaacattattttccattaagaagttaaatacgatattcctttgaaactatctaaattatcaaagtagctagatttgctcaaaatttcccttcagttctctcagaaaactgatcactccaggggacaaaagaaagttagaatctgccatctagttttctacttttattttttattttttgtagagatgtggtctcgccatgttgcgcagtccagtctcaaactcctggactcaagcaatcctcccacctgggcctcccaaagttctgaggttataggcgtgagtcaccacatactttcaaattaaaagatctgtcactgggcgcggtggctcacgcctgtaatcccaacactttgcgaggctgagccaggtggatcacctgaggtcaggagttcgagaccagcctggccaacatggtgaaaccccatctctactaaaaattcaaaaaataagctgggcgtggcagtgggcgcctgcaatcccagctactcaggaagctgagacaggagaattgcttgaacccgggaggtggaggttgcagtgagccgagatcacgccattgcactccagcctgggcaacaagagcgaatgctttgctcaccccttaaaccatctgtgagcccagattttcgtcaccgtgggacagacaagaaccctgtctttagctgaactaaggaaagtcctgcaacagcaatagactaaacaaagactattgtgcctagttgaactattttttatgcttcttcaggtaaattgcttatatgtgtaggcaaagtcattgttttgtttgccctcagaaaatctcctgtgttattcccatttagcagaaaaatagaaacagagaagatcgagtttccctgcttaaggcaaagaaggctgttgatatgactattcttgacttttcactggacttttttcaacaagactgtacatcattaggacagggacttagtcacatcatcactcttaaaaacttaaggctgtctctgaccttatgaatcatcttccgcaggggaacattatgtattcagttttggaccacacactatttttgaggcactgatgaaagctctggaccctcctccaagaaaaatgcacatatgcacccaccaaacttggcacttacattcagtggcatcatgaacctccgtccgcagacctcctgggggccgatgccttctggccaagaatccctgatctaatgaattttaaaactgcctgttaaatattaagaaactcaagcctaggagacatatccccttaagatcacccagttaagctgtttgcatagtgtgggcccctggacaaacaaagccatcctgatcttgctatatgtaaaaaagtctatggctattgattaggaaaataaagcatattttggaaaagagtgtattctacaatgtactgcatgtagagtgctttctaaaacttaaaaaccgtttatggataatgtttctaaataaaggagattcggtcagattacagtgaataaagtgaaaaataaagaaagatgagtggataggcagaatgataccagttaatagtcaggaactgggaatcaaagtttggcgtctttgtcaacaaggacaaaaaaactttggtgatttactacaatcccattttctatcaattttggaagtcttttatttggtatatgttgtgttagcatgattccttcaaacaaagcttaattttgaaactaagttatgtaggatttctccattcttaccagtttttagaaaattcatcaaatgacttttctctctaaatatgaaaaagataagaactgatttgattcctaacagagaaacttatattttacatttatcactactatctttggggaggatgggacagatttggagtgggacaggtgcctttcagagagtaggatctagagtcatgaagacttagattcaaatcccagaatcccagctggattcaaaatggttgttctactccgcctctctcagcccatttcatcaagtggaaaatggccatcgaaacagttcttccttataaggtttaatgcagattataaagcacttagtagtccctaaaacatgactagtgctcattctgttacctcttgttgctgtttttctgctggctgaaggacatggtaagaaaggcgctctcagaaaagccctctctggggtcacctcagaaactcagccttttggcagctaccatctggggtatcactgaacaaggtacaactccatgtgtcagatggctcagtgtctaatcttttctctgtttcagatctgttttagcagctaccttgaaagtgatgggagaattatggatataaatgtctccctgtaaaaagaaaattacctttttattattaagagttcttttccattttccctacttgtttgaaatcaagacaaaagcatgcaatagtctggtacatatcaaggtctttgtcacaatgatatatacatatgtgtatgtatgtatataatttaattaatcatgtatggtcagctctccatacctgaggattcaaccaacccagatcaaaaatgtagttaggcctacaatggttgcatctgtgctaaacatgtacatacttttttccttgtcatcatttctgaacaatacagtataacaactatgtacatagcatttatattcccctgctgatactgagggatgactatatttaaaatactctttttgccttgtgaaattatcatttctcttttcatattgcataatctatggtttcattaccattaaagcatcaaccagaagcttctcaatgccaacattatatataaatattgtaataataacataaggaaaatcatatgcctaattgttacaaaatgattttgaaaaaatgtatcccaaattactaatttattcattttaattatgaaaaaactgatgcatacaaagtaatcctatgtaatatatatggaagttctaactcatcctaatgcgtatcctataaactcaccatacagcctaagacctagaacatttccaatgccccaggcccctctccaatcccttcccttcacctccccacccacagaggtaaccagtgtcctgaataattcatttattttaaaataaaatttgaaatgagatcatacgaatttaggtactagcttctccagggccctgggatccaggcattccaaagattctctccagactctcaggtaaaggtgtcagtgagagcccacttccctgagagggcaagaagtttgtctttctaaacacacaggacaggctgggcatggtggctcctgcgtgtaatgtcagcactttgggaggctgaggcgggcaaatcacttgaagtcaggagttttagactagcttggccaacatggtgaaacctcttctctactaaaaatacaaaaattagccgggcatagtagtgggcgcctgtaattccagctactggagaggctgaggcaggagaatcacttgaaaccaggaggcagaggttgcagtgagccgagatcgcaccactgcattccagcctgggtgatagagcgagaccctgcctcaagaaaaaataaaaataaacacacaagataaacgttcttatgctgtctaaagctgcaagaagtatacagtgtgaacaaagaattctcatcaaaataaaataaaaatacagaccaggtgcagtggctcactcctttgggatcccaacactttgggaggctgaggtgggagaatcacttgagcccagaagtttgagaccagcctgagcaacataggaagacctcatctctacaaataataataataaaaaaaatagctggatgtggtagtgtgtgcctgtagtaccagctactctggaggctgaggtgggaggattacttgagcctgggagttcaaggctgcagtcagctgtgagccatgattgcactactgcactccagcctggacaacagagggagaccttgtctcaaaaaaaaaaagatgtaatgaaagctatccaatacttatattgaacctctctcttttgccctatggttttctcattggccagcaggagtgacagatctgcatttgcagctgtcatttggtcaggtggaactggcagacagaaatgatgacttcagttgctttcaagtcttccaaggaagttcttgacctttattatcccaaaggtccctaaatggtgctgcaagaaagtaccacagggcatgaaacatgagcatgttggaccaatgtggtggctgtgtaagtgggctgtgtaagtggattctcattcatctgtgaatcaggttaaagaggaatcatgtgcatattttgtgaataaaatcagttctttccactagtttgctatctaatgagcactattcatcagcagtggaaaatcagtttttagcctatcctaaacctgcattaacgcagactgtttttgaatttttaatcatttattcaggaacattagtaaagtacaactttgaattatttataaataaagtctttggttaacatgttaaatatgtaagctacattccatggcttagtttttaagtactggagagtacaacttttttttaaaccttttaaataactttaaaaacattcactgacattgaacagcttaatttgttaattataaatcatttgtatgtattcaccatttgaataagcttctaatgttttgccagcatgatggaagttaccaggtaggtagacttaaacatttttcaaaattaaatttcttttaaggtattttataatttttactgggcttacttctagttgatctattttagtgagacctgacattgcatttgagatgtgtaccaatgactaggttagaatgtgagggcttattttccattttaataactccctacatcacatacagttcctttgttgggataaaaatctcagtaaagtacacatcggtcactataaatagcagctacaagcctgtacattcaggagagtctccagagtgtattttaaaccccacattgtttagaataggaaattcttccaatgttcatattttccattgtgggtgacatggactactatcccatgtcacatcttcactggcttctgttttcctgtaccatttaggaactcaactgacggtttccagcagattgttcaatatgtgctttttatttttctaagggtagcctgggtctttttgtccagtgggaattttgcatgcttcatggggctctccaaataaaagctagataactcagagccggcaccagcactaggtaatgaaagagtcctttatttctggagctagtagcactactgtgcccgcttagaataacagcagtcaacccattttttattcccacagaaaactttacactgttggaaggttttctggaggtggggggagactcaagagactaatatgaaaaataactgagcaagaagtgagcaaataaacaagcaggatgagatgatgggttatcaggctgattcaaagacaagaagcatcatcaggtctaatcacactgcatctttcccaaggcacaattggcagctacagtacatgtatatctctgcccacttcttccttgaacaattcttctgtttctctcatcaaaactgttgtgtagatcttgatctttttttagtggagtttcatttgggggatctaacattccctcactatttgtcctttgatgaagaagatgagaaaggacctattattaaggggcctcgcgcaaaagttgtgatgtagaaagaactgatatctgacacctgtctttcctgctactaccttttaagatcctttaactcttcctatctaagcaggagagtgtattttccctgagccagcatcttcatagcatatcctggctacctagggattatcattgctacagatgctcagcggcttttgaactgaacagaatgaagttttttttaaactctaggttgaggctggagagaaattcccaaatcctttagtccctaagtgcctcatgtcatataaatgatgtctcattgtggcattgtcagagctatggtagagctgaaatcagagacatatgcgcttcagaaaggtgtcagttttccatgagaactctgcctgaagtgcagaattacttctagaagacagattctggtgtccagttgggttatgtcatcagaaattaacatacactctctttcctacgttctctgaaagggggttggaagcccaaatcattggacccaggcttgtagagcaacatgtccaagagcacacagtcagtggcagggtcaaatctggaaaccttgtcattttctccaactctggcactttttttctttgcatcgtgtgaggccccactctcaatttattatcacattagagctaaatgtcctctaactcctgctgaagagactggcttttaaatcaaggataaaagaaaagacactggataaaagttcagcagatcagggcttccttatctataagagagaactaacacttctcagggtggctgagaaaattaagcaagatacagaaaaaatgtcatcgaaagtataaagggtaatgcgcatgacgtacgtttatcatgttgaagtgcctgggtgattacactggattcacttctatattaactatatgtagagttgcaggtttcatgctggtcatgtgctgtgtttcaaaggaattttcacacttctaaccctgctgccttatgctagctgactggctgtcaggtattctagtctttcagaaatcagatgctgagaaaacacaatgaaataaaatgtcacctgtcaccctccctagagcccgtcacctctggagagggcttaggacctcaattgcagattagaagaaccaaagccattttattttcccttttcctctagttgtgaattgaggagaaaatgcagacgatttaaaatcctggctttatcccaatcagaaggaaactgtgctgtgcttacgaggagaaccctactcccaccttgggtcttacgtcgcactttttacatatgttaattattatcctctattttatgtttatttgttctcgtatctgttttctccaccaaattgaaagcaaccgtagatcagaaactacatcttactcacttttatttccccaagaccagcatacaatgttgaatgaacactaacacttgtgtatcaaggcacaactgtgacaaatgtgctaagctacttgtgagggaggcagaaatgttagtgacactcgttgtgtcttctaaacactgacaccatcaatgcctctcctggggtttcatcacttctctgctgagccttcaagccattgcaatttcaactccatatcttttctccagagaaatgaagagatttatctcatgtatttttttgattattaaggataattggacctttacaacatagaattttgaccacttatgcttatttagttgcattgtggaggcaaatgatattaatatggtaagagtccatttccttttgttggcctatttactccggtactcaagcccttggtatatttgcaattagtatctgcattataaatcagataatcatcaaattacagggtttatgccaaacgtacaggagtccaacagtgaacaaactgtataatcaaaaatttctctaatgaaggatcaagcttgtggtcaggaggagtaaagtatccagttaatcccagaagaatgggcagaagtaggataagggtagggccaatctctggcatgtatttatcaacattctttctgataatagaatgtttagcatacaatagaatggagtgtttaacatacaagttgagttcaaagtttagatttcaaatggtaaatggttttccaatattgggatgtaatgatggaccaaaaaagaaaaagaagaaagtaatacattagagcccaatactttttaatcaagatatgaggacttaattatttttttccagtaaagtcgagcatttttataaatggtttatgctccttgagtggtactatttggaagaaggaggaggagtatttataaatggattttcttcatcataaaatataccctttggttaatttgttaacataaaatttgtaattaaaataaagttagtgaactggaacactcaaagtacgtaaacccagaagcacaatcgaatagcctcagaactgtatttcttaggtaagaaattttaatttttgattcttagatctactgggaaagagtcagaaggaaaggtaatttgaagttatcctagaaagactctgaattctaaaatacttaggagaatctcagattacttcagccctctctactttgcaacatattttagaaagctggattcatatttcacatcattggctttcaaatttgaagtgactgtcggctattttttttaagtatcatctattttatcttttgttgttgttgtcttcataatgtgttaacattaaaaagctttccagatggcttctggcttttaaatgagaaaattggatatttttactaaatattttcccttaaaaacctgccaggctggtggttattctataaattagtgagattaaaaaaaaggccccatttgcttttcctgttttaatcttaataagagcttgatttcactactcaataatgtcaaagtaaaatagcatcttaaaatggaaaagctttcttctcctactctatttctaatctcctgccttaggctaccatcataaagatacctaagattctacagaagagcatttctgataaatacaattcataagggtcaaactgcattaggtctcccagatttgaacaagtggagtccaactgtaatccacgatattagtgagtgtaaagaaagaatggccagtagaagctggccgcggtggctcacgcctgtaatcccagcactttgggaggccgaggcgggtggatcacctgaggtcaggagtttgagaccagcctgaccaacacggtgaggtctctaataaaaatacaaaattagccgggcatggtggcacatgcctgtaatcccagctacctgggaggctgaggcaggagaattgcttgaacctaggaagcggaggttgcagtgagccaagatcacaccattgcactccagcctgggcaacaagagtgaaactctgtctcaaaaaagaaaaaaaaaaaggaatggccagtagaagaagcctgcatgtctgccaagttcaagacctggtttggccctggggatctaggaatatccaaatgagacagaccttgaatctcagggttggttgagtttcagggtggtgacatgagatttatggcttgaatctcacagagttgtgacatgaaaagtattctctccacttggagaagtgtttcctcatgtctcccactggcttgggtaaaatattacctgtgatgatttcaccccgctttgctctgacttcacactcatgaagaagtcgctattgactacgcagcttcctaacatcctggcttggggaatgggaggtgccctggttgggaatgagagttctccaggcactgaagatggagagcatttattctatcttaattggcactagagaaggcatcagtctcttgtgcatctgtgagttcatcaatcttcctgatacctgtcgattctggacctcccaagatccaatttctggtgcagaactgttatgaatactccaaaaaaaaaaaaaggccaatctttagaaacctttggaaaaacaagccaactgaccttggtgcagcgtctctactccatcgttgtccctcttcactccagagaaaaaatgacaagtacttattggccatctgctatataactaacaccctcctaggctgtatcaggtgcaaaagtggtggtaggaaataccccttccagcaaaaatgttacactgtaacttatttggtaaaaacaagtatatacacaggaacaatgaacaaataagactgtgtatttgtatttatccatattttctttctttcttttatttatttatttttttgagacagagtctcattctgtcacccaggctagagtacactggtgtgatctcggctcactgcagcctccacctcccaggttcaagcgattctcatgcctcagcctctggaggggttacaggcgcacaccaccatgccaggctaacttttgtacttttaacagagacggggtttcactatgttggccagtctggtctgtaactcctgacctcaggtgatcctcctgcctctgcctcccaaagtgctgggattacaggtgtgagccccgacacccggcaccatacgtttatttctatctgtagatcataatcaagtgctgatcccagtcagaggttattacaaaatataacagaacctaataaagtgttattatataatgtaaataataagcacaacacctaaagtatctgaaacacataatggattatttctctagcaataggagcaatatgctttcatccaggtctgaccaccccccaaaaagaaggaaatcaatattttttaagactttatatggtatcactggaaaaaaatctggatttcattccagctataaaagccatgtgtaaatttaatatccagatgcaaaaggtggacacccacaaataaatttatgattgtggaaatatttagacactttgaacaagagtggtacacactgagaattctgtggcttaggaactaatatgcttcctttgaagatttgaccttttcttctgcactagaattatctcctgagtccttataataatttccttcacaacctgtacctatgaacaacaaatctacattctaaaatatatcactatggcctagattcagtttcttatgggtagaaatcacattcttcatgtacacacttctttcctagaattatataaagcaggtattattattatcgttttcaccgagaccagaaccagaattttgtagatgtgcaccagccaccattcattcaagaaattgttagagccctgctatttccaagcaccgtttattgttttaaagatatgtttcaagttggagggcagaaaggagttagaggcatgatccttttcagatagaaacttttcaggaaaagaaaatagtccagttgtttaaaaaaccctggattttaaaaagagcttagagagtcggcctaagtaattggtgcaagacagtttaaacagaaacagggagtctcacagcaagttggctggaggagctgactcatacattgcaacataattatttcccaaataacatgcaaacaagagtgggctcaagctttctggtctctctctccctaacaagataaattagaaagaaataaagtcaaatccaggaagacttcatagaggtaaggcctggaactggttcttaaagaaccactagaattcagagaagcaaaaggagtaagagtgggcataggacttacaaagcaattcatttggagaagaaaaaagaaaaagcaaaaaccctggatatagcacaaaactgaatgaatgatctctctaagagatgctattatcaatgtgaaaatgatgttaggatgtgttaacaggaacgtggcaggaagcactgggacttcagccaggccttggtcagcttttattatgtccaattttggtttcccgtttgaagagttgttatagtcaggctgatattaaaaggatggaaaataggcattggcgtctagcctagaaaagacgagactaaaggatgacttaatacctgtggccctcctagagataagtaggtttctatttcagcaacaggaaatctagttcgataacaggataaattgagcgtgagagtgattaaacactgggaccttgatcacaggatgtcacctactgaagtatagttctttagctctactgctttcagagtactgttcactttctgtcttataatagaatttttgtatacatgtcttatctccctttaggactgcccttcttatctttgcatcccccacagcacttagtgcaatgacttgcttgtagtaaacattccaatagtgctacgcgaagcaaagcaaaaaggaatgtgctgggacaaaataaaactacatgctcaccattataagggcaataagacagtgtcacaacccaagcccctattacaggcctagagacagatgaggcaaagaataattaagaaacgtgtatcagcacaggccatgaagacgctggtgaagaaccactggaagactaggatgaggagtaaactgtgatttttccacagcagctcctgcattcaagatcacaggacatgacagagcaatatagtttaagtgaacacgttcaacgccatggcaggggcaggggatgggagatgccgtcgtctatgaggggaaaactatgagaggccaacagaaaggaggaaagagatgctgcctttgaatatgtaaactcctttacctacattcctgttcaccttggggtgggggaacagctgtctaggcaagattttttgcctagttctaagagtacagagcctatgaatttcttcataagaaaatttatctccaacagccttttcaaacgtcccctttgtactactcgaactgttgcctccctagtggtagatttcccttaggtttatgtgtttccatagtaagtgaatggctctgtgcatgttatgtgtgtgcatgtgtgcgtatgcatgcatgcgtgtatatgtgtgtgcctgtgtgtacatgcatgtctgtatgtgtgtgcatgtgtgcgtatgcatgcatgtgtgtgtatgtgtatgtgcatgtgtgcatatgcatgcatgcgtatatgtgtttgcctgtgtgtgcatgtgtgtctctatgtgcctgcgtgtgtatgtgtgtgcatgtgtatgtgtgcgcatgtgtatgtgtgtgcatgtgtgcatatgcatgcattcgtgtatgtgtgtgtgcctgtgtgtgcatgtgtgtctgtatgtgtgtgtatgtgtgtgcatgtgtgtcataagcgcattagggcatatgcacagcacttcccacatacctctcttccctagggaattgtttcaaggtagaagctgttcttaaacaactgctgcagactctaaagtctggaacagatcttgtggtccggtctcccacctccatgaagtaaagttatttttaaaaaatcatattttcttaataaaggaccaccctgtggtgggagctgttcctttctattacagtctgacctccctcaaaccttcccagcccagaatctctttgatgaaaaattaaacaataaagtgtccagaaacaaaggatactatgagtaatctcagaatggcccagactttcatttttcctagtaagagtcctgaagcatcatcaaattcatgatacctattatcttgctgaaggatgactggcccacttgttcatggtgccaatgaatagtcattagttcacttctcagagacaccagttctggcagctggacactgggtaccattctctgctatgcagtgaaagcacacaggcctgtaggtctctgcaggaccagaacactgtgcacaaataacctttagattgttatttctcaatcctcttaccttgcctctccagccccaggcaccaggtctcagaggactcttggaagcacttgcctagcccagccctgctctcagctcatgattcacttgttatctctatgcgtcttcccgcgttgcctgtctttcattggcctttgtgttcttcctcttcccagagagtgtctgaaccaggtccaagactcacttctctcttcactcttcccatgtcagtaccctaccaggtagcatgagctataacaccactgggttttactatcacaaactgaagacagacagctgcttcccaaatgcatgcccctaataacaaaggagggtgcgcgctgtttccctttccctcttttggcaattagggaaatagcctggtggacatcctgtgtacagctggcaattagcacactttctgtacatggattctgcacatgagtggaagactactaaattcttgctctcctccatggagaatactggccagaaagaaccacaatttttttttctaggtttttccattttatgaacctattctgaatatgccaaaaccatacctgtcacctcagaattggcgtggggggctggggaggagggaatcaggaggtgatagctttctcgcatggctgcgacaaataactagaaacttggtggctttaaacgacacaacttattctgtacagttctataggttagatgtctggcacaggtctcactgggctaacatcaaggtgtcagcagggctgtattccttcctggaggctccaggggagaatccatttccttgccttttccagcttctagaggaagtcacattcccaggctcttggaccccctctccatcttcaaagccatcaccagtctgtctgcccaccctgacagataagctcctctaaccacagctggaaaggggtctctgattttaaagagccatgtgattcattccagcacacctggataatccaggatgctctccccatctctatgcctttaatttcatcatatcgacaaggtcccttttgccacgcaaattaacatgttctcaggttctggagatttgcgggaaacgttattccacctaccatagaaaaccaccgacttttgtaagtaattgaagggaaaaaattaattgggcaaaattcggtagaaagagaagcagcagaatgcctcgatacatgtttctgtctcagttctagagcgagaaactcaggacaagtcagtgtatatttaagtcctcttgtgtgaaggcagatgtatctctacttttatgggtgtcttatgtgctactttcatcaatatatgttcggtgatcatatgtgtaatcagagatatttaaatgcatatatacataatgatatatagagataattaactttaagtttattaaactgtatttactctataaactatgacttcattttttgttttgttttgttttttgttttttgagatggagtctcactctgtcgctcaggttggagtgcagtggcgccatctcagctcactgcaacctccgcctcctgggttcaagcaattctcctgccgcagcctcccaagtagctgggactacaggcacctgccaccaagcccgggtaatttttgtatttttagtagagacggggtttcaccatgttggccaggctggtctcaaactcctgaccttgatccacctgcctcagcctccccgagtgctgggattacaggcatgagccacctcgcctggcctataaactacgactctgatgaccgcatagtatttaagcaagaaaacaaccaaaatgttctagctaaagtggagaccacttaacctaacccaattaaactttaagttgaacacaagagtagtagatgcagttcagctccatgacattgggtgagttgtctaaatgctctgtgctttggtgtccttgtctgcgtgtgacatgaagccgcagatctcaaagatctctttcattccgtgaaagcgctctcaatgtgtgaagttgactgcttctcctgctgtttaccaagagaataatcttaactctacattgtggagatcggatttgttctcacttgacagaaagccagtcccacgagcagcttggtacccaaataccagtctgtttagtgctcattagagatgaagaaccatattcataagtcaagctgagacggagtgtcatctccagacagaatcaacaccaccccctcctcaggaactgggatttggctgctttccaagccgctgctgaccaggttccattgcccagcttggctgatgagatcactggcagagtaccatgggtgcagacggggcctgctgtttcaacatgttctcaggagggctcttgcccacatttcttggagaggtgtgagcaccaaacatgctgaaccatccagcccatcactgagcagggccatctctcttcatcccttttcatttggtttgcatttttatgtcatgctccttccctggataaaagggataagaggagtttctcagatttgatttctcagtgggaactgtttgctttggaagccacctacaccaatgctaattgagaacagagctcagaatgggagcctgagaactgcacccggatgaactttttggtgggctgatttctgttgatcttgtcagaattaggttgtatatgcatgtaataccatgatcaactattttccaaaaggctgagcaaatgcatcagtgtctttttcctttgaccagttacttaccttggaaaaattatttgtagttaagcatataaagtcttcatcaggaaaactactggagatcctggccctgactacccagcaataacatttctggaactcccgaagcaatcagtgctctctgatcgctaaacatgatgggcttctattagagagattacagtaaaaaataacaatcagctctctgatgatcctgtgaggagggaacgggttgggaggagtagatttggctgaggacaagcccagactttcgtcacagggacagaccaacgtgttaacacaaagggagaacacgggagcatcctgcaccgtgcatttcagccacagatcacatggcccctccgcgggcccagcccacgccctgaccgcccggcctggccaggtctccgtatctctctgccccgccgccccttcccaactgcggacatgctgggtggatccggatcgcatggaagacgcagcctggccgcgctctcccagtgagtcctcatttcgtctctttggttttttcctttcttttttttttttataaaaaacaaacgaattgttgtaaaaaaaaaaaaaaaaaaaaaaatgtgggagtgggaggggagaggaggagacaccaggcaggaaaggaatgcagtgagtgtgtgagtttcagacctgtctgaaactttctggtttccacttcatggttgctctgattcgctggcttttctcgtttccattttaatggtggtttgtggaccatttgccaggagtttatacctaggcacgggtttctccgtttcaaataccaatccataaagcattgtgtttctaaaggtctgctgttaatttagaccttagccctccgttcagaatgatccatttgcagggctcagagattttggctaaagcacacattgcccaatccttagagtaaacagccaaagccctcaatatactgaccatctgactaagacagaacaagacccagagcatatgctattgatcagggaattgttcagataacggactccaagggtttaggatcatgaaatcctggaatgttaaagccagaagggaggcctttagactctttggtgcaatgctgtctttcaataggcagggaaacagaaaccagaggggcaactcaacttaccccaaagcagacaacagtcggtagcaaagccatgtctttgtactctcatgcaaagggccgttttcacactggtgtttatgaggtttgaaaaacttactgggtcttgggaaaaggtaccgcacaagaattagaacaccaaatggcctttcagtaaatcttttccatttttgagagttttggcaccgattcagcatgacaattgttgttccagttgttccagcgtttgtgcaacagttaatcaaataaacagagaaactcatcagggtcctaaaaacaagacccatgtccattacattagcagatctcttggagagctagtttccgtaagtgtggttggttattcacgtgggagagctcaaagggactttagacgttatctgtatagtccagtgcttatcaaactttttaaaaaatcaaatttaatcttaaggggaacgctattgtataaaggagatgttctggttaaagaaaaggtttgggatctagagctcctcatcctcgctctactctgcagtcatagcccactgcacaattctacccctctcctcatccctcttctaccccacctccccaccctcttcatcaaaacttccttggaatcctaggtctccatggaatagttcagaaaccactgatctcattgaaagccttcatttcagatgaggaaactgaggcacaggaagggcttgcccagggtcacacagctgatcagcaatagagcgtgggatgctaggaaaagagcccagtctggctggctgtctctctctcaactcatggtcctgaggcttgtttccactccttcatgcctatgattctatcagtctcctttctctgtgtctctcttctctgtttactctgccatttcctggatttcaacagctattacctctcaccgggatggttgtcattgcctgccatctggtcctcggcctctgtctctctcccctttctgatccagccccctacagcccccacctatgaagataaagtccattctccttactacagcattcaaatttctccacaacatgccttcactatttcttcccattctgacttccgccagggagaatgttaaaaacattgtggggaaataaataaatgatgggcataattttaccagattctgcagaaatgacaaaagaaatgcacacagggatgtcgagatttgtaaaaactataggagtacctgatccggtgaaataagatcactcacagctccccaaactcagcatatacaagccaccactgtttcttgactcattctattccctacacagggaataccctcaccctcctgtttctgacctcctttctgttctgcaaggccctgatcaaatgctcccttcctctgtaaaccttcctcattcctcacttctctcactctaataacctttgcccatccttctattactagctttgtaccgtcaatcgaggaaaatgacgaggcaagtctcaatcattttaggaggtttacttgccaaagttaaggatgtgcctgggagataggtctatgcctttatctgaagatgattttgagggctccagatttaaaggggaaagggtggggatattgagaagtacacaattttcatctaagtgaatctgtgttttgtacataagatcacataaacaaagggggcagaggaaaaatgcggggaatctgcattttacgtatgataacagacaaaatggggtagggcgacactcagatatgcatttgtgtctggtgggccagggtgactgcacctataaagataagctgtccatttgcattgccatggtgaagttttaacagctctctaggaatgtccttgtggacaaaatatgggggaggcttgtgtagcttttcaccttgtagccatcttatttaggaactaaaaggggaaggctttgagtgacccagttcccggcttgacttttccgtttgtctaaatgcgttcggggtaccaaaatttaatttcctttcaataaagttattgttgaacatagctatcttccctcccaataaatggcaattcacttgagggcaggaatgattttgaatctttgaagcttcagcatccagaacagtgctgatgctccagaaatattctttaagtttcctattattgagtaaatcaaactcaattccccttagtttacctttttcatttgaaccgtttgaacacacaaagccttcactccttttgctttgctagacgtactaggttaaatgctaaaacaggtgctcaacaaaatgaattctaagttcctttgcatttccatcagataatttatctctgtttcatcacctgtagagcaagattggctgtgattttttaatgagacatgttaaaattcctgaatgccaagacctacacaagggccatgttattttcaggagcagtcgtgaatggttgttcagttatttagatttcaaggcatgtttaatttgttcctaccaagatcactgagagattctgtcacttgcggtttaatattttcactggtacttttatcattttcccaaagcctaaggaagtttacttgcaacaagatttggggtttcctgtaaatatttgttttagtccataaagggttatttttcttatagagaagtgtgcttttatatatcttgcagctgaaagttaaaagttttttgtgtgtgttacattttgtaacaaacatggaagggtatgtaaattgtaaaatcatggagtcaaggaaacgtaggaaattatttagttcatcccactgttttctgagggaactgaatccaaaacagtgctgggaaataaataaataaataaataaataaataaataaataaataaataattggcacaatttttaaagattctgcagaaatgacaaaggaaataaacataagaatattgagatttgtcaaaagtttaggaatgcctggcttattcaatgttatcaggaaatgtagcattataattatccaggatgctaaatttggttttatatatgtatgtgtgtgtgtgtgtgtgtgtgtgtgtgtgtgtgtgtgtgtgtgtatgtatttagtggaaactctttgccttcattaaagcagatattacaacacatttaaaacattttcaaattgctaggagctgtccttatgaacatagttttttaatcatgctgtaaaacagtgatacctcaggggataagactcccatccaaaaatgggtccagttattatgtgatgtcttccatcacataatattgatgcttttaaatctcttctaatacctattaatgcatctgcctgtcatggtcccgctccctgttctgctgtagccaagagtaacaggacacccatttgttagaattacgttcaaagtaaaaatcaacaatctggtgagagaggccttctctcctacaaagtaatgggcacttacattttgtgactattggtttgtaggccaaagtgttaaatatagtgaacttccagtttctcttcaaagaatcagtatgtcagtatgttcagctttcttattttttaattcttgatttcaaagtttaacttcctggttctctctgcccacttgcttctagtttcagtaaacaactttcccaccagtcctattcagtaggttcacatctgttcccctggtcacctgctctgtcctgtctcatcctggtcacgtgctttgacctgaatcacccctggtcacctgctctgacctaagtcacctttggttacctgtttctaaccatccttcccgccaaactactcaccctgccactctggctcatatccctgccctctttaaaatagccagtcggaactggcttagactgtgtggtccaaccctagccaatagggaacaacacagcagtaggggccgcctgcatcaggaataagaactcctgcccctcccctgtccaggtgtgctctcgccattgttccatcttcgaggggcaccctttctgcagaaagtaaattttgcctttctgagaaaattgcatttatgttccagtgctatttctttgtggcactgggaaacaagcattttgcatttctaacactgaccaatttgtctactttttggttcaaagaaaggtttcaaatgatctggaccctttatctggttatggataaaattgctactgctgtttatagattaaaaataaaaaagaatggcagagaaataggtcactgtgctttgcatgtattgggtactcttctatacaagatattgcagcactgcacgagcagtggtgattatggaggtggtcttgaccttctgtatatgtgtcttctctacaaatggccagcccacccacactcacactggttcaatacctggtggccacaagcctttcaaacctattgaacagcaatttgcattgctgtctgcgtttttccctctccttacctttgatctattgatccttgaaatgagccctgcctatgctgcttctcacattcctctcagcccatcaaaatcactttatagagacaggcctaacagtggcaagaggaatgagaaatggggaagaggtcctctgtcctctggaggcgaacttacccctggcatttttaatcagactagtgaggatccgtttccctatagaaacacagcttcgtttctccataccagcttcagacacaccttgggtttaaaaaggtggttgtaggctggtctgagagcccgactaccatgtgtcatgctgttgaaagtttcaaaagccaatttacaatgaaggtcttggaaacaacctcttcataaatgtagtgctgcctggatctatttccaagcctaattgaatttttaagaggagtccttagaaaatctgtaaacctcattcatttccagtcattcattcagcaaatactcattgagggtttcgcattctagtgaatactgctgtactgactgagcattaagaacatcaaaaaggacaaagctcaggctctggcctcaagggttctgttgtcttctgacctcccacccagcttagcattatctacatcagtgttctcagttttcattttttttttcctgtgaccttctgaaataaatgcattttattttgtaaccccagtacctatatacaatatatatatataaatatatatatatatatttgaagcaaatatttcacaaaacggtgctcacacttgctgtgtacaaagtcatctgatattttctatacgattctatttcattttaaaacgctggtcatccactaaatagatttcagaagctgcagatgggtcacaaaccgaagtttgaaaaccactgaacatatcacatgaccttggtatctctggtccctgccttcagggcagcttaggaagctatgttggctggtgacaacccaggctgccagctacaagggtcagcatggaggttttttgttttgttttgttttttgttttttttaatctaactaattttgttttttcaagggaaggtctctggtcactcagtctggagtgcagtggcacaaccttggctcactgcagcctcaacctcctgggcttaagcgatcctcctgcctcagcctcccaagtagctggggctacagatgtgtgccaccatgccctgataagtttttgtatttttttgtagagatggggtctcgctgtattgcccatgctggtctcaaactcctgggctcaagcagtcctcccacctcggcctcccaaaagtgataagcctccactatctcggctcactgcaacctctgcctcccaggttcaagcaattattctgcctcatcctcccgagaagctgggattacaggcgcccgccaccatgcctggctagcctgggggtttaagaaaagtttttttggatgggagtcagagggtctggattctggtctaactccttcagtaatcagtactgtgatctgcagcaagtcgcttcaacttgctgcgacacagctatgaagtggagatgctgatgcctgttctgtgtaattcacagggtgagcaagaacatccagtataataatgtgcattaaagtgtgcagaaaaatattaagtacagagcaaatccaagttattattaaacagtcttacttttacaattaaaatttaatatcagaggaacaacttggagggaccatttgttctttgtagatctgggaaaggattcttgaacaaggctataatatgatgcaacttcataaatggaaatctcagggtaactttttttgtgatattttaagtagatttgaattgaagaaactcagccaagttatcctggtccctcttcccttaaatacttttttttttggttttattttttatttttatttttttgagatggagcctcactctattgcccaggctggagtgcagtggcatggtctcggctcactgcaacctccacctcctgggttcaagcacttctccagcctcagcctcccgagtagctgggattgcaggcgtgatttttgtatttttgtagagatggagttttgccatgttggccaggctggtctcgaactcctgaactcaggtgatccgccaacctcagcctcccaaagtgccggcattataggcgtgagccactgcgcctggccatttttctggttttaaaatcaaggaagcaactaggtggttgttgggtttttaagtcatgaacctatttgtaaaggagcgtgctttgcctgatattatctactctaacccagtagatttataaacactaatttctactgttttaagaccactttttattaaaagcaactaacagtaaataaaaccaaccactaaaagagataattttatcaagaagggtttaaaacaataaacttttagatcaaatatagtactttcctcatttatctttcacttttccttttgtaactatcctagacctcatttcacacatctcacacagacattggttagaacaaatgcttctttctttttcttttttttttttttttgagatagagtttcactcttgttgaggctggagtgcaatggcacgatctcggctcactacaacctctgcctctcaggttcaagcgattctcctgcctcagcctcctgagtagctgggattacaggcgcccaccaccacacctggctaattttccatttttagtagagacggggtttcaccatgttggccacgctggtgttgaactcctgacctcaggtgatccgcccgcctggccctcacagagtgctgggatttcaggtatgagtcaccgcgcccagccagaatgcttcattcaaggcctgctgaattcctattcggagcctaacccaccctagagctgtgccttacaggctagctctgcctgctgcattagctccctgtgtctttccatgtctgtttattgatctttcttttttgtttttgtttttgtttttgttttgagacagggtcttgctctgtctcccaggctagagtgcagtggcactatctcagctcactgcagcctcaacctcctgggctcaagcaatcttcccacctcagcttcctgagtagctaggactacagatgcttgccaccactcctagttaatttaaaaatttttttttgtagagacgaggtctcactatgctgcccaggctgctctcaaactcctggactcaagagatcctcctgcctcgggatcccaaagtgtagagattacagacatgagtcaccacacccagtctgtttgctgatctgttttaaaggaatgtctacattcaccttttctaggagtcagttctccaaatcactctacctttcactttgtaagtaacggtggggaagaataaaataacaataaaataaaataaaaacaaaactatattcactccaaagagaagaaaataattcccttttgtcctttaaagagtgaaaatattcattacacaaatcagcaatgtccaccaaaggccactgctcatcagcacttagtgtagtttccagagaaaacatctaaaatgcataaaagttaagcagtttttgtatacctagcttttagctgatttcatgactgctgtatagcttctttgtagatagtttctgcagctgtttcatgaatgttatggtatgcctgcgaattgaattgaaaaagactgagttcacacggcttttgaatcagtaagctgaagcccagaggggttaggtacattggactggaagcagaagggatggttttaaagagcagctggttgttcatcttcactaactggcaggcagcctttctggggtgtagctgcgctgcaggttgcacaaaagagtctcaacgcccctcctgctacccaggcctagccctcgcagcactaaatgggtacattcttgacaaataagaaactggggcccgatatgctgattcccacatctgtatttagatcccactcatgacacagtgtatgaccacaagcaggtcacttaatttcactggcctaagtttctccatctgttaaagacatctgttgtctgtcttataggtgaaaatgaaaggaactagctatgcaaagtatataaaccacagtgggtgcctgatcagtgtgacatttccatcttttccctttccctctgaacattcccctccccaaagacccccgaagagaaatggcatgatatcttctgccaacaaactgatagacgccagggtgaaatcagcggaattcaacttgtgattggcatgcatttattaaaacatccttctgctttcaggaaaatcagagctctttatttcagatggagttatctcgttggcttactatttaaaataagaatttgtaccactatacgttggctaactctgatgttaaaggaaacttgctgaaaactgatttttgttttggcaaaatatagaattactacttttcctggtgggcctaagccagattcagtgccaagagggaggtagggagaagtagggttttttttttttttgccagcagatgccatcaatcttgaagtattctggacaagtgaggagagcataaattaagactattgacgtcaaaatccagataaacttgaatccaaatcctagtctcatcattttatcaactatgtgcccttgagcgaattactgaatctctctgagtttctcagctgattgatctacaaaaagaggaatatacatgtaaagtggctagcacagtgcctggtgcttactcagtgctcaaggggtgggaatgggggaacgtaggtgtttcacaataattattgccatgaactgggtatgtaggagatgaatctgggggagcttctgggtaatcacaaaagcatgagtgactgtgatgagttgtattagcttctgagggctgctttgcttgtaaagtacaaagtactatgagccgggtgtcttagaacaacagacacttattgtctcacagttgtggaggctagaagtctagaatcagggtgtcagcagggccatgctccctctgaaacctgtaggggaggatccttccttgcctcctgtagcttctggtagccccagatattccttggcttaggccatcgtaactccagtgcttccataatttcatacggcattctccctatgtctcttcacagaggcttccctctgtgtgtgtctgtgtttgtgtccaaagggcaccagccacactggattagggctcatcctaatgacctcatcttgattacatctgcaaatattctgtttccaaatcaggtcacatcctgaggtactgggggttaagactttaacatatatttggaggtggagtatacaatttgacccatcatctgagtatacatacttctagattaaatgcaacgagcctgggcattacctccacattctaaaattgggcacaatctccacacattgggcacatttcttgcaacctagagaggcctattgtgaaaaatgatattgtgatattggttagctttctaagtgaatattttctcgtcacaaaagagcaaaagttccctagactcaagcgtaggcagggactttctttttaaccccactgagtgaaaggcaaccaggaagtgtgtgcatgtccattcaccccaaaggaaacagccttgcatcatagacagagccatcccaggtctacataagttcataccatggagaatatttttcctacttgctttccctttcctgtatatatgttcaaatgtctgacattaatgaaacattcagtgtgatccagggaagtatcatgagtctgtttttcctgaatctgaaggttttggggctgggagggagatcatgtaaaccaccccctactcccaggaaatggagtggctctgtgatccagctacccctgggagcctaggaaggcttaggtttcatgagcccacctcggagctacagggaaatctccatccaagatccccagataccagaggacaaaaggaacacagcaaagggaaaaactgaacatccaagagaataaatttacaacctacaacagaaggcatctgaaaaagtcaggtggactgccgcttcagtgtaatgaaccactcacctgaataaacagtacaaggtgctggaaattgtggaaacatgattattaacaaagtagaatccttcaatccttaaactgactactgtattactttcctagggctaccttaacaaagtatcatgtactctgtggcttaaaataacaggttgtccttcaataggtgaatggataaatgacttcagtggatgagtggataaataaactgtggtgcacccagacaatagaatattactcagaaccaaaaacaaatgagctcttaagccatgaaaagacatgcaggaaacgtaagtgcatattactaagtgaaagaagccagtctgaaaaggctgcatactgtaggattccaactatgtgacattctgaaataggcaacactatggagacagtaaaaagatgagtggtttctaggcactagggcaagaagagagggatgaataggcagagcacaggggatttttagggcagtgaaaatagttggtatgacactacatttgtccaagcccattgaatgtacaatggcaagagtgaaccctaatgtaaactatggactttgggtgatactgatgtgtcactgcaggttcatcagttgtaacaaatgtactacacttgtgagggatgtttataatgggagaggttatgtgtgtgtgagacggaatatatgggacatttctgtatcttcctctcaattttgccatgaatgtaaaactcctctacaaaaataaaatctttaaaaataaataaatcacaagcagggttggttccttctgagaaccgtgaggaagaatctgttccatgcctctgtcctcacttctggtggtttggcagcaagctttggcatttcttggcttgtagatgcgtcactccaatctctgccttcacatggccaagattgtctccctgtgtctcttcttagcgtctgccctctgtgcaggtctgtctgtgtctgaagccaaatgtccccttttgataaggacatcagtcatattggattagaacccaccctgataacttcatcttcactcagttagctcggtcaagtccctgtttccaaataaggccacattctagggtactgggagttaggtcgtccacatatcattttttggaggacacaactgaacacatgacaaatactgaaagatttaaaaattgtaatgtgcagtttcataatttaatccataagcaataagtgggataggctaggcatggggcctcacacctgtaatcctagcactttgggagtctgaggcaggcggatcacctgagatcaggagtttgagaccagcctggtcaacatggcgaaaccccgtctctactaaaaatacaaaaattaaccagatgtggtggtgcatgcctgtaatcccagctactcgggaggctgaggcaagagaatcactttaacccaggaggcagaggttgcagtgagccaagatcatgtcatcgcactccagcctggggtacagagcaagacaccgtctcaaaataagtaaataaataaataaataaataaaagcaataagtgggataattattgaatacatttaaaatgccagctggccatgcatggtggctcacacctgtaatcccaacactttgagaggtcgaggtgggaggattgcttgatcccaggagtttgagactagcctgggcaacatggtgaaatctcgtctctacgaaaactaaaaaaattagctgggcatggtggcacacacctgcagtcccagctactcaagaggctgcggtgggaggattgcttgagctgggaggtcgttgttctcaccactgcactctggcctgggtgacacagtgagatggtgtcttaaaataaaaataataaaaatcaataaatgaaatgccagctggctgaagtttgttggggcagggaggacagctgggtccttccctcacaggtaaaaaacctgtataaaaccattgggtctagggagcttttgcctctttgtgatcaggaagtattcgcttcttagaaagctaactaatctccctgcatcgagctctgatccatcaattctccgtgaagtctgggtattaaaccagccccaaagaagaacagaaaaggggattatcctcttccactaggacacatgccttttctggcatgggaagataaagctctctgatgataaatttccaagtacattttaatgagaaatgacatggattaagaaagagatagagaaaataagagatgaaaggcattctatttgttggacatttttagccacagttctccttgtacacccctcaaaaaagaaagagaaaagtaatcaacagggaggaacaagggaacacaaagaggagataagaattttcttctacatgtattctgcgtttctcagccttctgtggtgttactatcatcaatgaaaaggcatttaagatccttaagttagaaaaatcttttctgcccaattccccacttcttgtttggaaacaagaacatgctctgcaagacctgtaagcacagatttaatttccatcatgatgatgatgataaaattttaaaaatggtgaacattcatatagtactaactatatgccaagcactgttctaagtaccgtgcaactattagttcatttaatccttacaactccactatgacttccgtggttagctaataatgtgttacctccatttgcagatgaggaaaatgaggccagaggggttcactcacttgcccacttcctccctgcttggacgtgtgtaagactggtgcctggtttttggctccaggctggctcctggtggctcccctgctctctccagcttagcatttatgaaagttattccctgtgttttcagagttctaaccgctagtctttgagtgggtgaatctggcagcagctgtgttattacatcagatcctgcttgatgagcaaacttctcctcctggaggagcagggctggagggctggagaggaaggatctagcaagagactttgagttctataactctttcccttaaatatctagcccaggggtctaaatactgctttacaggccctaaaaagaagtcatgagtgtacctctttccccagcaggagacatggacttccgtataactagccaatcctctaactccattgttattaatctcacatgactttgtatgccaattcaaggaaaagaaactcggcataattttggacctctctatatcttttttttttttttttttttttttgagacagagttttgctcttgtctcccattctggagtgcagtggtgcgatcttggctcactgcaacctccttttcctgggttcaagtgattctcctgcctcaacctcccaagtagctgggattacaggcacccaccaccatgcctggctaatttttgtattgttagtagagacagggtttcacaatgttggccaggctggtctctaactcctgacctcaggtgatccacccacctgagactcccaaagtgctgggattacaggcatgagccaccatgcctggccggacttctctatatcttaagttctaacccctgtcctgtcaaagccagagaactgagacctggaaagaaatgaatgggctttgctgtcgtgtaaagagcccccactttggggttggccgggtgatggctaaaatgctgtgtgtataatcctgggcaagtgatttgacttctctgtgccaggtttgcacatctagattgtaaaatagagcaatcatgtctattcaatgttgttctaaggatgagatgagatgcatctgcctggcaccttgtaagtcctgcacaaatgcaaattatcactgttaagtaagcttcaccatcctgtaaaacaatctgtttgactcacttattccaagtaagattggctggacctgtacattcttctttatttaaaactatcaatgttactgttcatttttaaatagacagtggctatgatttttagtttttttagccttacaaatgagaaacctagaacttcaacaagcagtaaaattgagcaggttaggtattcctcactagcagcataaacccagcagggtgaggtgattcctagggcctcctatagtctcctagcagccctgataccctttgtttacgggtccctgggggaagttgaggacttaaagtctctctagtaggcttcagagctccttatttgagcagaactgtgacatcttggagaaagaagagaacaccaccagtcagaaaagcccacaattgtagtggtgtcccggttctgaatacaagttacctaacgcctctgagccaatttcctcaactatgaaatagaaataatagtgcccgtctcacagatactataactacgaagatcaaattagatcgcatatacatgatgaaagtgttctgtaaaaagttgccatctgtctttgcttggatggacctgagttcctgagttggctctgaaaacagcttaccacgaaacaggataggattagtgggacagccttgctgacacagatcataacagggagatgtctcattttgacttggaagttgcactgatatcatagaaaataaaaaaaccaggtttaactgttggttggtaccttgtgagaagaggaagaaggtgataagaactaagatcagagcatagtagagaaagtagccctgtaaacagaggagaagcagaaagagagaagggaggacagagcttttattttgctccaggttaaaaagaaaaaaaaaaagcacattacaactctatgttcaggtgtctgtcccaggtcctagaactggaatagaccaaccaagcccaacccttcttaaaagtaagactaggtgcttcctgattatatattcaactgcctggaagcatgcaagtaaaatttccttgatggcatttctaagtttcaaacatattcttcctaaaaatgcatttacaaaaaatattaggattgtgtttttttggtttggactttaaaaaaaaattgttttcaaaaccataattgtggcctaccccaaatggattctcctccctacagtgaggatttcatttttccagtccccccccgccttttcatttttgatgaactgcacatgttgtgggagccactcgtgggccctcagacacgagcaatccttctggccgctgccagtgtcctaataagggaatgaacaagcgcctattggtgagggaaggggagtcaggcggtggatgatatttttgctgattaaagaggataaggtgtggtttggcaggtatctcattggtttggctggctccagacctaggttttttctcttttttcagtttgaattctgtagaacagactgctaagaattgttttttcacagatctctaactgagctttaggaatatcatgctgacacagtttatctatgttgaaaaaagataggaatttggggttacatgatgttttcattaaaagaggttgaggatataggttaaaatcttctcggtcaccaggcgatgaaggtgatactggacttgatcaaatttagtcatggagagaacaagggatataccattggatatatttaacacatgtttaaaaagttttaaacatttatctatgcaacaatattaagtaacacctacttttgcttgtaaatatttatattctccaattttaaaataataaaagaaacaaaaagagcctggcacttaggatcatagtgatgagttgctcatctatttcctgtctgatcactaaatacctgccagtgactcctctctccactctattttctgaatgactcgacactgccttttaacttaactgcatctggtccacagtgttcttaagtcactcattatacgtcagtgtttctcacatgagctgcaggctggaatcatttggggagctttcaaaagttctaatgtctagatcagacctcgagcaggattctggtttaattgatttggggcatggcctgggcatcaggattcttaggcacttctccaggcaattctaatgtgcagctgaggttgaggacctcgagaagcaactgctactctgaaatgcatcctctattggatcatctggccccgtaaagggccaggcagtttttcttcctgacattttgaaacctctcaagaaaatactatatatatatatatatgaaacaagttagacaggtttcctcccaagttggtagattcagttcggttgtttaaaactcaacagtagagaattgtgctttcaaccaaaatcaacttctagacacatgggtattgtttaaactttattttccatgcatataaggagtgaagtactctgccaggtagttgaaaacagtatccatttcaaagtcataagtaatgagatgagattttttatattttctctgtgtccctgcaagttattcatcccttgatatttaatttagttaatacatgcctcttattttactttttcttataatattaagccaacttcacatcctggaattgtgaaattgctgtagcaaggataggatgatatgatcgagaagtttaaaaaaaattttcagattatcaatttttaaaagtaagaggatatggaagtgcagtgcctgcatggagagaagttttgaattttgaaagaattttggattaatcaggtgtctagaattactcattactctcagcttccttactggatatttcattaccaaggaagaaggccatttagaaattcaggagtgcaaaggctgggcgtggtggctcacgcctgtaatcctagcattttgggaggccaaggtggatggatcacctgaggtcaggagttcgagaccagcctggccaacacagtgaaaccctgtctctactaaaaatacaaaaattagctgggcatggtggcaggcacctgtaatcccacctacttgggaggctgaggcaggagaattgcctgaaccggtgaggtggaaattgcagtgagccaagatcacgccattgcactccagcctgggagcctgggtgacaagagcaaaacgcagtctcaaaaaaaaaggaacttcgtttggaagtgcagactgagctgggaatataaattagagaatcctcaccttaaaactgacagacaagttataaacatagatgatattatccaaggagcatatgttggataggagaagaaaggagttgaggaagaaacccaataaaaggtacaaaagaaactacaaaataaatttaaaaacagagaatctcaaaaagggagatgtggtcaacagtgtcagagctctctgtgggatcaagtaagattgagagcacaaagggacattggacaatttgtctcaaaggacagcttagaaagcacaagcccataacacaatgtcattttggagttagggctactaatacctggatcaaaaatattgaatatagtcaatatagtgttccgatatatttaataatgaaactgaactgttcttttgatattttgatcaactggtcaagtgattaagatgtctggaactaaaaatcactagccccgtagagatccatctcaagatgattttaggtcaactaccaagtaggttaaactaactgataaacctaactccaaaattgaatgtaaactgacaagacagcccgtgatagggtggatttaactattttgggctattaatgacttatccattgaatttcagaaccagttttggctacagcacatgaaaatatttccaaaggactgctaaatcaaacatgctcagtttacctagttgtactgagttctttttgcttcccacagacattgcaaaaggccaaaactaacactaggcttgatagtgaaaagagaaagaatataagaaatttgcaagggaagatggtgcaggaggagttatggaggtaaaaaggcatgtgctggagttgcaggaaaatatagaactgctctattcatgagccaagccaaggccaatcacatgacaataaaaaagactgatggcacatgcacacacgtacacacacacacacacacgctcttgaagcaggccaaagtccacagtctcactggaaaacaccagttgactccgtttgactttagcacctgatcattgactaggttcaaaagtcaaatacttttcctgtccataatcacttggtcttcttagtaagtaaaatatccattttccagctctgaactcaaggggattttctgcatatagttgcaacataatgccatctccagagaaagtaacatgggaatgagaagcaaagaaatgcattaaaacatttgcattctggaccaatgagcaaaatgcaccaagaacctacctaagcaaacactggcaagaaagtttgtggctagtaattgcttctgactattggcaggaaggaattgaaagaagtgcaaagtgttgggggttccatctcctgtatttttttctaaaaattcttctgtctccaagcctagcttttagtaggctgccgccgccactcctcggttggtttaatatggttttgtcatgatgatgaaactgaaacctgagaggtcatttcctttttcttttttttttttttttttttggtgaatgatcaggcttcaccttctggaactgatggtcagaaagcgagccctgcagcccatagcaacatggcagcaggtgtagccaggtattcctggttcatatccatgagccagtatgaagtgtctgcttttaaagccactcacaaaacttccaacagagtgtatgtgtgctctgtgtgtgtgcacatgctttggttttggggatgaccttctcccgcctctgttactgagagaagataaagctgtaataactttaaacaccatttttgcagtaaatactcataagcctagcatagaattgtcagcctttccctacacatggactggagtcatatttcattgatctgccttttaaggaagcactgttgttctgtatatgacactaaaacttttaagtcttggagtatttggcctttccatgttctgatttagatgaatccacatgagcttaggcagttcacctcttattcaggtataggttagcctcatgatggctattgctttgtgttttaatgccatatgcctttcttgactgcagttaactaaaaatacttattaaatccctgctttatgcaaggcactttgagaagggtgctaaaaatgtataaaacttgacttgctttcaagaaacacatgccataatatgggagataatacacaaataacagcaatagagcaatatgtgataaataactggaacaaccacagagatttcagaggcattaaagagctccttctagttgacttccatgatggaagaatgtagcatttgagctgacattgatggacagataagcggggtctcggtaaaaatggagagaaggaaagaaccacttaagtgtaatcaaagagagcaagagagtataaaatgaagttgaaagaaaaagaaagaaagctttactgatgttcgttatgctttctggcacgagcacctcccctcaatttccgaccccatgtgactggtcctgagagcatcacacaaaaatagtgccctggaaaaatggaacatgagtcccctgcacccccagaggggagaacagtggggccttcgcttggccctgtcttttcagcattctgtgactcaaggcagtttacttgactgggtaaatggatttaccagtggtaaaccttatctagtttaaacttcatgaaatagacctgtactgagaaggatttctgcagaagcttcaagcagaggtaacactaataatgcaaacccaaggcaacgctgacacttacacacggagaggacactaatgcttgtgaacgcagaccagtgcgtcctcagctcacactttacctgttcctttcagcaaggtgagtttacagcagagagggggaatctcactgcttttcagaagtaactcatgagagaacagatcttttggaaaatggcagcatttttttgtgattttgctggtgaaaaagatgtaaacatgtaacctatcaagactatcatatcttcatactccaccttggaaacattttctaatgtatttaaaaatctccccagtgaagaatttcagtaggttttgaaactatttatttaaaatgtaaaattgaaacaccttgggattactttgaactggaacaactgattgacatcaggacagacaatttttgatacaattttctaggcaaattgtatcaaaaaattgtgcatggttagtggggcagatttaagatattagtactgtgcttccacctgtcaagccaattatgtgtttctttgtatatctttggggattaaaaaaattaagcggggctgagcgtggtggctcacatctgtaatcccagcactttgggaggctgaggcgggtggatcacctgaggttgggagttcaagaccagcctgaccaacatggagaaaccccgtctctactaaaaaaatacaaaattagctgggtgtggtggcacatgcctgtaatcccagctacttgggaggctaaggcaggagaattgcttgaaccagggacgtggaggttgcagtgagccgagattatgccattgcactccagcctaggcaacaagagtgaatctccatctcaaaaaagaaaaaaaaaattaggctatgactgtcatttaaaactaaatgcctaaataaactgaacttagaaccagaccttcacattatcgattacaatgcattcagccaagatgtttcaaaaataattaaagttttatgaacattaatagattaaatttaacattactttaaatgtatctttgttttattgtcattctgtccttttaaatttctgttcattgtgttttgtaatgtctacaaacatttaaataacactacatgtaatttataaatgactatacatatacgtataaatgtatatgcatacataaatgtatatatcagtgttattggtgcatgcttaatttttaaaattgattgtagtatagtatgaaaagtcatttagaaaccattggcttagatcatggatcaccaaacttttttgtaaatggtcagatagtatatattttcaaatttgtgagccatacagtttctgtcataataattgagctctggcactgaagtgcaaaacagccatagatgatagaggtgtggttgtattcctataaaactttatttgcaaaaacagagtgggctggctttggcctgcaggtcatagtttgccaatccctggctcagatgactgaagctctttgttagtctccagggcaccctaagaaagcttcctattgtagaaagaaaacaggtataggaacttgaagacctgggtcaatcctgattttgtaattacttttatgagtcatttcacctcttagatcccaggttaccaagtataaaatataaagcttgaattcgaaataatgtcaaaattccttctagtttcattaatctatcatcttagatgctcactaccttgccacaagcagtggatttcagctgggctctgaatggaagcagaataagtgaaaatccaatttaatacgaggtgggcaaagtgagttcaaaacagtggagaaggtgacaagaataaaaaaggacagaaattccattctgaaaaatgtaaagtcacagcttatggctcttgaggggtcctccatggtgctgctgttctaaatgattgtaggacttgctcaactgaagtctcctcttgcagctaagatggatgggatccttgatatggggtagctggccctaatttcttttatttcttggggaaagctgcagagtgaaatgaaacacctggagtggagattgaaactagaaaatgtgtgctgcccttccgggactcccttccacagggccatagcctttggaaagagccttatacttcgttaaatgattggtctgctcttctcagttcttcgaagccatctttctgtatgtaccaagcacgattggcgcctcactaatgcccttcatgccttccaagccctagccagatggaattgtgtgcttttccataaccatatttcccgattctgcaaccttgctatttgagctttctgtacatggaaaggtcctctttcattcccccagctcccaatgctagccatcccaaaagagccagcttgaataccactttctttatgaagcctcctctgatcccttagctggaattgccttcttcctcctctaaactttaaatcactttaagtcttctgtaatatttaccacattctacctattatcacatccttaacaggtcttaacttccctacagattatgaactcctttcaggggttgaatttatcttggtttctgccctcactggcttgaatggagtaaatgttcaataaatatctgttgaatggatgtgctaattccagccacctgtgtgtccatttccaggttatagcagcaagcattacctaccagcatcccacaaccgcaagttcagactccaccttggtatctggcagatggttctgaacaatggtttgccacctcctcctcagaacctaggcccccatgcctcctcctcggaacctaggccttcatgcagcccccttgctgcccagagctcaccactctgatgacagttctgaattgaactgtccttgcctccaagtctaggttccacgtggatcagtcagggagaggaatgtataccagattagcaacccataagtcagtgccagtgctgtcactttgtaattcagaaatatgaactttttttttaagtcaagtcagtgatcttcaccactgaagcagttcctcctgtattaggtaacaagtttaaggaattaatgattacattggtgatctagtcagaagacagcataagccttattggttagtaaactaatctaaccaatgaattaggatggaattgccttgttgggatagaaatctgttccaggagagacaggaaccctcaagtcatttaagtgctgtagaatgtctctaatgctcatgctccctctctcagagtcctgattccctgagtcttaagctgttggtgattctaactcaatttgcacacacaaatgtgggtgcttagttatttaatattattctatctgttaaaacattcacatttttataggggtcttctattaactcaaagggagtctttaagcatagaagattctacttggtttggtttggtcaggctggctttttaccaaatcacaacaaatgggtgtttgcttttctccctccacattgagcaggccctgtgttaagcaaggtttccactgatttaggaagatgatctatcaagagcagagaagactccttgacttcttttctcaacagtagggagatgggacccatgagcagtggttgactgccaagtcccctgcaagaataaatattctcttcaatgggcaaagcatccatgatttggcccttcatttcccatttcctgtctccactcaaggtttgtctttttactttctgccacttgtacacaaagctctccaatgctagcacatggagtgggggtatgagccaactggatgttagataggtgtgtgcaggacctctggagtcaggcaggtagggttcaccccattcttgttagaatggcagtgacttcttccctagcagagctagcaacaatgccccagtgtcagatctatcatatattacagtttcctgtctgaagaagagatgaggggtacaagagggaggaacaagatgggaggcaatgccactcgagtggaaaggagccctgggaaggaggaaatgaatagtaaatctttttccaattaagaaaaatgagagtggaagcagaaaagctccagagggcacttttaggggagggaaagatcataaaaggcctgttatgaaaatctattacccataaatttccccacattaagcagagcctgtctagagaggatgctgagaattcactcagctgacacaagatatgtgacttgatttagtggcatccacatgctgtgtaccgtttccattggcatgtctgcaataccactttcccttgcagggatcccctttaattactcgcaggcttataatctccatttaaggacatcttgcttccattttccaatcgctttatgtcttttgtcagatgtttaccgatgtgatagtggtaccataatttgaagctcaaccacatgagattatggactttagtattgcatcacatgaacatttcagatttagggatgagtcgaacttctagatcactctaaatataagacttatctaaaaggagttcatattttttacatttgaagacgacagtggaaatttctctttctaggtgattgtcttcagatacgaaaataatgtgcttgtttatatacctgtggtcaaatgtcattgcatccaacttagccagtagaaatgtgagaatatccctacatcctgctctggagcaggtgtgattcagttgcatatccagatctagacctctatgcaagagaaagagctggaaaaatatagtgctgccagccatcgacacctgggtctgaactgtttcctaatgttttactttttttaaacgactaagcccaaggtttattgtccacatctacgatgcacattaaagcaaaattgtcctttaatagataatagcagtcaaagaacagctccaactcagattttacttttgattgacaacattttttaaaagcctaagttcactgaggatcatatttatttaaaaaaaatttttatttttttgagacggagttttgttcttgttgcccaggccggagtgcaatggcgtggtctcagcttactacaacctccatttcctgggttcaagagattctcctgcctcagccacttgagtacctgggattacaggtgcgcaccaccacgcccagctaactttttgtatttttagtagagacggagtttcaccatgttggccaggctggtctcgaactcctgacctcagatgatccacccaccttggcatcccaaagtgctgggattacaggcatgagccagcacaccaggcctatttaaaattcttactcattatttaagactgttataaacaaagaattctaggttggggatgaagaaaaggtaaagttcatgaaaacccaggtagtaactgggcttatcttttttagccacatttataccagttgaatcttaaataatgatggaaagagaggaaggagtttggttattttattttaattatcttcctggccacttaagcattcataactccttttcattcatttcagctaaagtttaattcaagtaactaagtcaggagcaatagatatcttctccaccatcaaccctgtctttccttacatattctttgtaaacatttataaattaaaaagtgaatgtttgtatctgagcaagcttattgatttaatagggtggggtagatggggtggtgcaaattctgtccctgtttgtggcaagatgaatagattttagtttatcttaggaaactgtcatggacttatccttccaaaatccatatttactggggttggcagatgcactatttcttttaaaaataaatgtgagaaaaatagcaactcaataaaagataaatccagtttctattcattttatttgtactgaatatcacaaaccatttctggatgttttaaaagaaaatggcaccaattgaaaaagaagttaaacatctatcccatacaaattataatctcaagaaatgtttggaaaagcttgtgcctcatctgttgttataaactacagctattgatataaacatagatgaatctcaaaaacatcatgtcaaataaaagaatcacagaatgcatgcagtattgttatgcatagtttatttaaggcaacactgaaaaatatgctgtttagggatgcataccatgctggtaatactacaaagaaaagcaagagaataattcagagatcttaaaattcaggctggtgcttatttggaggcatataaaaagagatagggatgcgattgaagaggagcacataaggatccctaacaactggtgctgtttacattgggtagtaggcacatggttgtgtgtctgattgttctttaaagtagtcatgtacatggctaggcgtagtggctcacgcctgtaacccagaactttgggaggccaaggcaggcagattgcttgagctcaggagtttgagaccagcctgggcaacatggggagaccctgtctctgcaaaaaatacaaaaattagccagatgtggtggtgcacacctgtagtcccagctactcagggggctgaggtgggtggatcacatgaatgaacccaggaggtcgaggctgcagtgagccaagattgtatgagtgcacaccagctgggttacagaggagaacttgtctcaataagtaaataaattaataatagtaataaaacaaagtagtcatgtaccatacattcatttgtaggtacaatataagtcatgataaaagtctttttagcttgaaataataaacccaaacaattagaatccatcattttaaaatgtcctgtgaatatgtgcatggattcagaaatgagcctgtacgcttggggatccgcctgccctggagcaggatcattctaaaaactgtccttttataactcagagtcagaatcagaactctcagtactccctgggtgccttctaaccatacaggacccaccagacctgatctatttgttggacaggatgttccagtcataatgatgctaagaaccagactgctatggtatgtgtagacacaagaagaggattttatgtcaccatgtactctgttctgcagcatatttcccctgttagggtctgtaattatagaaactcatccaattatgggatgtcaccattgtataaagcaaatgttgggctggtggtgacaacttgtgagtacatacataagaacactaaagcttccaagtacacagtgttttattattgagagcccaagtatggttggtatgcaaactttagtgactctcaaatatgtctatgtatggggagatggggtgggagaatggggaataaatgaagtgggaaatgctttgcttccttagtaactttcttccaagtaatatatccccttgcatgctctcaccccaggaaaaggcacaacactgatacagcaatgaaccccacaatgaaataatacagcacttttccatgaaaattttttttcttctaaaccaagagggctttctttcactctatcctgtattaataacagaccaattcactacagactacttactaataaatgtctaaacatattctgatatgaaaaatatttttattttcttgattttttttcctccataatttttaatgcttgccttttaaggaatccaaggaaaaaaattcagagttggattttatgtgaattaaatgaaaccacaacattttgcagacaccacatataaacaaaatcatatttaagagcctggaatgtttctataaacttcttttaactttcaaacatacagtaaatctgcaaggcaaatatgactcatttcagtagctcaggattttccctcctgatcacagtatggtctgagattttgctaagaatgtttgagcaatttatagagctatttggatatgtttggagaatgtgcttgtatttcatgctatgaaataaaatccctgggggttttggtacatgaaaaagaataatgaaagtatgtgtgagtcattttgcctccaaatagttgataagcatgtttctaacctacatgaggtttttaactttttaagttggatcccaaattaagacccaggttcagacaatgccattagcagaaccaataatgatgggaatcaaataaaagtaattgactaagaagtcatccttttttgaggctgtgagccccaggcattcttctttggggtgtggccttcatggggagtgtattgctgcagaaagctggggacagaatagtgttctggattgagtatctcagttaccagcctgaaatctccatcgaccaacactgccttctctcaaatgacttcttatatgaaagtggacagacagtggaatgcagaaattttagagctgatcttggggaccggtcaactgtctactggccagtaagttactatgaattcaaaaatggtgaacttcaatagcattcattctgtcagatagtgagtttatttgatctgttggaattttaggtgcagagttctttttcaaaatataggaatgtgcagaaacaattaaggaaaacagacttggaaactttgatctgaatggagtcctctttaagtcttttataactgggcttcactacaataccttgagccttttgttttctctgaggctttttctcacttaacctgtgtgtctgcatctgtgtctgcatttgtgtgtgtgcttatcaagcacagggaatattgaagaacacaaaaaagtttgaaggtgacaattcaaagtctatccactggcaatcttgtaatctctttcaatacagcaattgttctctagcggtgaagattttgaaagagattcccaaattcatgtccacaccaagtattttctgtagtctgatgaacagttgtctcatgtatgaaagactgtttttcaaataagcttatatgcactggtttataatatacagattcctttttatgcactattgaatttatagatattttataaaacactttatcaacaaataacaaaagtataagcaattgtcatgagatcttaattttttcataatgttttaaaaggatcctcattcttaagatgttagaaaccattgcaatacaagatctagaagattacatcttttctctaatcttaccagttagcagtggctatcttagtgtgtgttgatccaacttggctatttgaaatgacaaagcatgggaatgtaaattaaaacaactgctgtggtccggcatggtggtttacgcctgtaatcccagcactttgggaggccgaggcgggcggatcacctgaggtcaggagttcgagaccagtctggccaacatggtgaaactctctctttactaaaaatacaaaaattaattgggcgtggtggcaggagcctgtaatcccagctactcgggaggctgagacacaagaattacttgaaccaggaggtggaggttgcagtgagccgagattgggccactgcactccagtgagattctgtctcaaaaaacaaaacaaaacaaaacaaaacaaaactgatcttttaaattttaaatttaagtgaacacatactatttcacttctcaatatctaccctaaagaaatacttgcatcgtgcaataggggaaaaaatgaaagaacccaaaatgtctttctatagaatggttaaactgtgctatcctattacataaatgatgaaaataaaggtatgccctagtgaactgattttggcaagtcctcaaacacattattaaattttttacatggcaaaataactatattatatatcccatgtatgtaaaaaatacagcattgcaagatgcaaatccaaacttgattaactatttggttatctaggtaattactcagagtaatactgtgattatcaacataaaataagtaaatatttgtactctctatagacttaaactgttctttttcattctctctgagtctttaatgctcctaaacatgtaataaaatcagcaccctccccataaaaatgtctattatttttccctgatttaatttttaaacatggcttcctcataagagatcttgtcttgttaataaaatactattgccacaattttacttgaacctttaaggatgatgtcctatagtctcaaaccagaagataccaaaatggagaaaagacaaaatgaagggaataagagcaacattctttaaactacggggaacacggagtaaaaaaatcaaacaagacgacctatactatagttgagatgaaaataagaattttgccagtgttgcagaagttttgagaaatatttgctagggaagctggggtcgggggacactggggcaagaggaaaactcgttccttgctccagtgtcttgctacggaagcttctgcaagttcttctggctctcgtctggcatatatttagaccctggcccttccaaatgtaataacatctcattggtctcctcatttgccatgtctgcaagactttaattcatttgaactttctatctgaaaggcacaaactaaaacatggttatcttgttacttaaatacactgaggcagcaaggcctggtgttaaagacctaaaatatcttcagtgtaaaagccacagcattagaagagagctttcccattgcatatatatttttttcttatcttgtaacaccagggcccttaagcaatggttccaggaatggaagaaaagccaatcctctctactttttcatgctactcgtacaatcaaataacatcatgtggttattatggacttttaaaattcgttgcatttattcgtcagtgtgaacacacacacacaagattatttctctttctccaaaatatccaatgagccatgttgctgtcagctgacctttgctgcagaaaggtacctttctccaagtgtttgtgccaacagatgagctaaaagcagttaccaagtaacaaagtggaatactccacaataaaccctcttccaaccagcataggtgggaagttcatggattctggtcaaacaaacattttatttcatagagaagtactttatagatcatttgtggattgccagtttttttaaaaaatagatccacaataaaatgcatttgatttaaactctattaaacaaaattcaataattctcagatgattcagataaacttcaggatcccacactccttctgaatcatctgggaacatcacttggctttgttctgtagcatatggcaaacaggttaatactggcatctgctgaattttcacagaaggaacaaatggattattatgcttttattacaatccagtggttggttaggtatgatttttactagtcagcagcatttcaaatacatttaaatctggcgtgtggaaaatcagaaatgtcaacattttgtctttcactgaagcatgaagcagaccctgtgctatcgtttgatataataaggatcctgtgtacttgtctttttggacaaattctgctttgtggtgaaattagctttcatgcattactggtattaaattgacaatttgtcgatgattatcaaaagcctttaaaatgagcatactcttaaactcggaaattaaactcagaaattctaacttctgagaagttttcctaagtaaataattgaacaagtgattaaagtgagtctgtaataatgtccttagcagcattgtttataagaagatataaagttgaaaacaatcttaaatgtgcctcagtagaaaattggttagtcataatagatccatgtaatcattatgtatgtgtatacctaagtggtaatactgtgttgctattgaaattatatattgctaacatgttaaaaatagtcataaacaaggtaaattaaagaaatggtttgtgaaatgatatgtatgacataaccctattttattaaaaacaaaaatgtctgtgcatgcacaggaaaatggtagaatatatcacatactcatcatgttcaaatctgggtttgcatgattctcgggagtggcttttactttctcctttatatattttgaattgtttggttttaaaaaaaatttatgtgtgcgttgcttttaaaatccaaaagaatgaacaattcagggtacttttttttcaatttcggaagaaaaaataataaacctgtggtgttagtaggatgggaagctcaccatgagggagaggcctaaaagctaagaaatgactgtttgctttgcttgcctaacgctaatgtagggagcctcagagttgaagaattttcacccctatcaagtcatttggcatggacacaattttacctataaagtcaactgatatgttcttgaaccagcaactggacatgttatgattgaaaatgccatgaaaccattttagctctttttttgttcttaactttgtaaataattttaatatgtttctttattagtagtcataaaaagatccatagatattttgccccgtgatatcgttaggctttgtgtccctacccaaatctcatcttgaattgtactccccgtaatctccatgtgtcaagagagagaccaggtggaggtaactgaatcatgggtgcagtttcccccgtgctattctcatgacagtgagttctcacgagatctgatggttttataagggggggctcttcctccttcacttggcgcttcttcctgccacctagtgaagaaggtgccttgcttccccttcaccttctgccataattgtaagtttcctgaggcctcaccagccatgctgaactgtgaatcaattaaacctctttcctttataagttacccagtctcgggcagttctttatagcagtgtgaaacggactaatacactctagtagctgtgtatcctagaaaatgggctcccaatggagaatgattgcctataaactttaagctgtaccaagcaagaagaggtagaagagatagtggagatgatcggttgttcaggttgctccactgagaaatcaaagatgaagagaggttacatgtgatgtggcctacgtggcaaatctagttcatgtcagagctaacagccagcaatatccagccatgaagcccagtgggtaggtgaaaagagaaagatggtaagttctgaaaatagtgggaaattaaggacttaaggttatattccattaaggggacggaggagttttgcttttaggataggtgtataagttcgttcttgcactgccgtaaagaactgcccaagatgggtaatttataaagaaaagaggtttaactgactcactcatagctggggaggcctcaggaaacttacaatcatggaggaaggggaagcaggcaccttctttacaaagcagcagaagagagaagagtgagcgaaggaggaacttgccaaacacttataaaaaccttgagagaattcactcactgtcacgagcacagcatgagggaaccacccccatgatccagtcagctcccaccacattccttcctcaacacctgacacgggggattacaatgcaagatgagatttgggtggggacacaaagcctaaccctatcaatagggatgtcccatacggagttttatgcctcttgcttgtcttggaagaagaaggccccaagtaacagtcatgacctcatggctgatccagagatgtagaaaagcaaattgagacttcctgtttgattagtttaggaagcagttattaaggattgattctccctgttgcggttaaagctgtctaccaagaaataagccaaaggaacattaggccaagaatctgaagggtgaagccaaaccactgggaagggctttctacttcaactacaatgtgattgaattagaaaggaacattcgaatcctgtcatgtcacctcaaattcaacaagtctaaaattgaactcatttttcctcacgaagcggctccttaactgaactttcctaataacaggaagacactgcagtgtagaatgctttgccacaacatatctatctattatttcatttgattgtcacacacaagaaaatttaactctaaaatttaactttaaatttaactttaaaaggttaatcaaagggctgcaaattagtaagagaccaattctaaaacccaagttttctgaatcctaatctagtcatccattatcaactatatcacattgcccccccatatttgtgaaataaaccagcccattttatagaattactaagtgacattttatttgtattggcttttgaggattgcacatgagcagattttagtaaatatgaagtcagattttctcaagtagcaaagaagaaaccaaccaaccttcggaatcattaatcctgttttttatgagatacctcagtgaaaaaacattcatagcattcttattattgaagtcaaaagatgacacagatgaaataaagtactgactctaagcctaaaaatgcctaacttacaactctaacatgagcaaaccatcatcagttatattaggttaatatatggtataagtagtatggttctactgttttgttttaatttgcaaattattttggctttgcaatgatataagaattataagcctgttctagagaagtaccatgcaacattgtacctatagttaacaatatggttaacaattttaacaatttaaagtgtattgtacactttaaaatatgccaacagggtggatttcatgttaagtgttcttaccacagttttaaaaagaattattagcatgaaatgtttacatatctgggtttctattttgtagatatgtaagtaacattgtaataaaaacactgtaactctccaatacaaaaagcagcttcctacacaatgcagccccatacccatacccaacccattgacccatcaagccagcacccatcctttcttggcactctgtatctcagtacacattctaccttcaaaaacagctaagtcaaacgtgtcaaaatagctatttcctcttgagtttgagcatctgcagttgcccagccccaattctttatttggaaataagtattaggagaaacatatctagcatagtgatattgatttgtaatttcctcaaatagacattcactttagatgactacaaaagctaaatagagctcaggagctcgagaccatcctgggcaacataatgaaacaccatctcttaaaaaaaaaaatacaaaagttagctgggtgtggtggtgtgcacccatagtcccagctactcaggaggctgaggtgggacaattgcttgagcctgggaggtcaaggctgcagtgagctgtgatcacaccactgcattctggcctgggtgacagagttagactgtgtctcaaaaaaaaaaaaaaaaaaaaaaaaagctaaataatatatacacatgtgaagtcctctgtgtctcttctgccttcttcagctcatagacatctatctaaatacacacctgtgggccattgtgatgtgcccagcatgtgggtggtatgatactaaggcacattttagagcaaaagaggggggccttaaagggagctgccaccccttcaaaatgcactgactctgaagcatcctaccaattgtcagtaacaccttctctcgccagggaaaaggaactggagggaaaaacaaaatccaagcaaagaagatatcctactcccaattttaataatatttattatttaatataatatttaattttaataatatgtattatttaataatatttattataatataatatttattataattattaaataattttaataattttggcttattagcaccaaagtcccggttggtagtgtaacttgattcttttctgatcttcgtgacagtgtctacacaaataactcatgcaacatgctgtatcttttgaagtaagcattttgtttatttttggttcaatactttgggtcccttcttctaaatcttacaaggccaggcccggtggctcacgcctgtaatcccagcactttgggaggccgaggcgggcggatcatgaggtcaggagttggagaccagcctggccagcttggcaaaaccccatctctactaaaatacaaaaattagctgggcatggtggcatgtgcctgtaatcccagctgctcgggaggctgaggtaggagaatcacttgatcccaggaggtggaggtggcagtgagccgagattgtgctgctgcactccagcccgggtgacagtgcaagactgggtctcaaaaaaaaaaaaaaaaaaaaaaaaaaaactaacccacagtttccaaaggcaacttgcttttgtgcagaatgttttagtttaagttgttatttggtcattgtaaattatcttctgtagctattggattcatgtttttcaaatagttaaaagtttgaaagctagctgactaggtcgctaaacttaaggaactgaaccatccttttagacgtatgtggttcattaagcagtgaagttcagaaaagggctcagggctgttcctgccaagaggttggtgaagacacgtggcaagtggcacgctcaagaggttgtctttgtaatgttgcagaatcgcctaccagaggaatgacgatgatgaagaggaggcagcccgggaacggcgccgccgagcccgacaggaacggctgcggcagaagcaggaggaagaatccttgggacaggtgaccgaccaggtggaggtgaatgcccagaacaggtactgtcctctttgggacggggagtttctaacttgcgtcttagcctgtccgttgaatggaatttgttgagcagagcattcctttctcagcccaactcaaccctttttcaatctaactggtttaattattttgcagtcattttaggcaactaatctgattagacaggcaatctgatttagacactaggacacactattctatttctctccaccccgttcccatctcataaacataccccagttgaaggcttttatttcatttcacaatctagcatttgtttaatttaataagtatggtgtgctatatcttaaaaataagtatggtctattttttctgtttaattctttctttaaatttcaatagttttgggggaacaggtggggttttggttacacagataagttctttaatggtgatttctgatattttggtgcactcgtcacccgagcagtacacaccacgcccaatgcgcagtattttccccctcacaccctcctacctttctccccgagtccccagtgtccattatatcacttttctacctttgcatcctcatagcttagctcccacttgtaagtgagaacatttgatatttggttttccattcctgagttacttcacttcaaataatggtctccaactccatccaggttgcggtgaattccattattgtgttcctttttatggctgaatagtattccatggtgtgtgtatatatacgtgtgtgtgtgtgtgtgtgtgtgtgtatatatatatatatatatatatacaccacattttctttacccactgcttggttgatgggcatttaagctgcttccatatttttgcaattgcaaattgtgcttctataaacatgcgtgtaccagtatattttgcatataatgacttcttttcccctgggtagatacccagtagtgggactgctggatcaaatgttagttctacttttagttctttaaggaatctatactgttttctggtaggttatatctttaaataaggaaaagtatttacatttattctgtagggtgttgctatctgttttgaactgaagatatgttagtttagtagagtcctccatggctaccattaataggtaacacgtgaatttttaaagtgggcatgaattgcagatgtcttcttttttctaatatacagcctgaatcaatagtctctgatcattataatattcaacaagatacagaattccgcttaatttaatgtgattattcaaacacacttaatgagtttgctattacgtattttctcactcgggccctggttgaaatcagggaacttgagaatgcctaataggttcaacttcttcaaagagggcttttgcagcagaaataaggtcacatggttcattatgctaatggttagtatatgtcatttatattgtcatttatgtgccccaaggtctaaaaaagatgaggatatttgaggaggaaaatggagaaaataattttaatttaaaaccatggactgattataatggttacactatataagatctcacatgtggttttggttttagtttgttttgtttaattcagtctatttagaaaattctaaagggaatgggtcctggcctccttaacccaagtttgagaggctgtattagaaggtttcagaaagcagtcttgaaaatgttggccggtagcacaatattgtttaccctttccctcaataagtagcttctaattggggagtaggtatagcaaaggggaaataggtataatttctagggttcactaattgactttgactcccaatttgacctttcactaactgtatttcttcagttaaatggaaataaaaattatacctttctccaaaaaatgctgctaaacttaaactatgtaacaatacatgtaaaatgcagtgtcttacacatagtaagcactcaataaattttcactgttaccagattcttaacacgggagggcaacgtagtcattcactgccttttccattttcaagctgagagagaaataatagaaagagttttaaaaatggcattttgatgcctttcctgaatcttgttattaatgagtggtcaacaggagctttaaaaattactggtgatctgtagttttcttgcttttaaaatcttgcttttccttgtgcttctcttcggatatttggctgttattcattatttcatgctattaattgaaatcaaattctttttttttttagaaaatcatattgaggtctgagaatgtgtgatttatctctgacatattagttagccacaagaagaataagtcttcttggggctaaacaactctaactggcatttgatatctactgataattgtggtcatgatttataaataggcaaagaaatgttcaatacagtttgttggtttcttagcataagagtactttaatctggctagcactttggaattttggtgccttttaaaaattattagaattcaattgatccaaatggcccctctatagacttccccttaaattataaattttttgcatttgtagggacatttaatccttatatgtctaatttcatggaggcaatatcctgaagcaaaagtaaaggccaagaaagttttaaagctagtttttactctgccattttcattgttaaatatgaaatgtgttttttccaaaattaagtgaatttgaacgttgaaagggccaagtttggtctgaactatgaaatttgatggagtttctaaacattgcaagacaaattcttccaactctggtcacagttctggtatcacatgactggttgtttcctgcaaatagaaaccaacaccctggcttggacagtgtccagcatcctgcagtagtgagggaggtgatggacaacagtttaacttttggagattttctttcctttttaaaataaatgtcaaatttaactgccctttttccactgtagaaaagatggacaagaaaccctttattcatggaaatcttgacaaagaaggtagattgtgtatacattagttagggtaacgctggctgctataacgattagtgcccccaaattttaagtttagtgcagtaacacttaccattatgcatatttctgtctagttggtagaaccagccacctgtcttcttttctcttgtgactctcaatccctagggcttggtgctccctgatctaccaacagacagagatagagaagacagggagtgcacctctgtttgttcattgccttggttggacacttctgtttacatttcattggcagttattggtcacatggcccgcctaggtgcaaagaagggagagggtgcaaatttaatccttgagtggtgatcactccccccaactatggaaggaggagcaggaattgtaagggacacttagatgtctcttccattggggtcactggcgtgagtgtggaatctcaacactgtaatgtacattttcttcctctcaaagtaccttgggagcctccaatccagatcaggaattctagatgacttgatgacatgggagaatactacatgacatggaaggaattcacttattatttcagtttgatccttaagtttgaattccccaagaagcaagtccagaaacaacgatttgactgcaagtcgtttatttgtaaggtgatgctaggaaacactggtggaggtgtgggaaggtaagacagaaaagggaaggccaccaaataaacgttgcatgaccaagcacatcaccactgtgggtatctggagcttcactccactgggaaactctgagatccagtgtggaatacacacctcggagttatcccactcaaaaagtgaggggtgctgaggtatctaaacactcaggctatcaatttttgtttgaaaactgctcccaggggacattaataccgaaagcacttctggcatgttgagtagactccagtccccagagaaaggcttgcaaatgctgtcagctgaaagccaggcaggcgtgtactaaaatggtaacgtactggggatatgggcaagcttggcactactggcatctgctgtagtcctgggtagcacaggctgtatgaatgctgctgactgatgaatgagcaagctgtctttggtgttgttctttctgttgtacagtgtgcctgacgaggaggccaagacaaccaccacaaacactcaagtggaaggggatgatgaggccgcattcctggagcgcctggctcggcgtgaggaaagacgccaaaaacgccttcaggaggctctggagcggcagaaggagttcgacccaacaataacagatgcaagtctgtcgctcccaagcagaagaatgcaaaatgacacagcagaaaatgaaactaccgagaaggaagaaaaaagtgaaagtcgccaagaaagatacgagatagaggaaacagaaacagtcaccaagtcctaccagaagaatgattggagggatgctgaagaaaacaagaaagaagacaaggaaaaggaggaggaggaagaggagaagccaaagcgagggagcattggagaaaatcaggtagaggtgatggtggaagagaaaacaactgaaagccaggaggaaacagtggtaatgtcattaaaaaatgggcagatcagttcagaagagcctaaacaagaggaggagagggaacaaggttcagatgagatttcccatcatgaaaagatggaagaggaagacaaggaaagagctgaggcagagagggcaaggttggaagcagaagaaagagaaagaattaaagccgagcaagacaaaaagatagcagatgaacgagcaagaattgaagcagaagaaaaagcagctgcccaagaaagagaaaggagagaggcagaagagagggaaaggatgagggaggaagagaaaagggcagcagaggagaggcagaggataaaggaggaagagaaaagggcagcagaggagaggcagaggataaaggaggaagagaaaagggcagcagaggagaggcagaggataaaagaggaagagaaaagggcagcagaggagaggcaaagggccagggcagaggaggaagagaaggctaaggtagaagagcagaaacgtaacaagcagctagaagagaaaaaacatgccatgcaagagacaaagataaaaggggaaaaggtagaacagaaaatagaagggaaatgggtaaatgaaaagaaagcacaagaagataaacttcagacagctgtcctaaagaaacaggtacagtaaacattttgcaccaaatgtgtgatgcctgtgacttgtgagaaatgtaatgcacatctgatttgggactgaggccacatgcatatagctcacatgcttgatcatttggcaagctgttcattttttcaggccatagcgatacacaagcatgcagcaattgattgatggctgaatattcaatcaaccaaatttactgggacagccagtaaatttggctgtccagaagacagagagaaattaattgctctgtgcttgattgttatgaatacccaaaaaaagaattaatccaaagatgataaatgtggtggtggtgtgttggcttctgattctgtgcttgcatctaaactcgttcttttaattatctttcctctatccataggtctgcatgaggcaagaggcccataactccttacctcactcatgggtttgacgttgaattaaaaaaatgataaaagctggggtgggaaagagacatgaagaataatggtcagacatttcatcttaagaaggcaaaaacaggctgggtacagtggctcacacctgtaatcccagcactttgggaggctgaggtgggtggatcacaaggtcaggagatcgagaccatcctggccaacatggtgaaaccccatctctactaaaaatacaaaattagctgggtgtaccggcacatgtctgtaatcccagctactcaggaggctgaggcaggagaatcacttgaacctgggaggcagaggttgcaatgagctgagattgtgccactgcactccactgggcaacagggagagactccatctcaacaacaaaaacaacaacaacaacaaaaaggcaaaaacaaacccctggaaattaactggtaataaagagggggaaaggaactggttggaaactttccttaaaaaaaaaagtcaaaaccctgatttgccaacatgtagacctcagcttaatgtagacttgcagaaagccattaatttagggtagtattgatttatatttgactggtaattaagagcatacatgctgcttctttattatctgggtgacacaaattcatgtggcctgaggaagggtggaaatagtaggggggaaatgtttgtaagctttgagaaagattttttttctgtctgcaagactgcattgaaagcactgtacctaatcaccaccacaccaccaccaccactcctaaaaaaagaaaaaaagagatgctttcacattcacctttccagagcaaattctctgtcactaagcctgcattgcactgaaggtatctttaactcctgcttctgtacaagaggctcatgaacacagctaaaattgagaccatgagcaaagtgcaccaaaccacacacgaggtttgtaaacacacgaggagtgccacatcatgctagatttcagtgagcgcaatggcaggcacacgagaagatgttggggtgggaagaaaatatcccaccttgctgtttagaaccactgtgctgtgagcgctgagacggcagaagagaagccatcccacgcagcacttgcaaggcgatccgagcaccctgtcactcttgtaaactagaaagggcttcttttacttgtgtgaccttaccattcttgaaaataaaaagggagaagagaagggaactaaagtgcaagctaaaagagaaaagctccaagaagacaagcctaccttcaaaaaagaagaggtaaatatgattgaaaagtaatgatcgtaaagcaacagaaaaagcagtcagtgttccaagatatctcaggtctgatgatctcaaaattgtaacctcatatccagtgtatttcaagccatgactcacagtccactgaatagtgagatcagcttagagtgtctcaaaattaattaaatgtatcagtcagcattttttaaaaaatgaaatggatagaagccatcagagggcattgtaggtagtaagtattgcattgtcaggtaaattgtctttttttctgtgggacgtcatcaaaaaggcttgaaaaacactgctggaatcaatttatcctgttttctattcttctgaatgctaattttttttccttgagccattctactttcatttcaatcatgaaatatttccaactggccttgattaatgctttaacttttcaaaggaaaaacacccacacacatctcagtagaaaatatggtgaactgaagatgatatttggttttcaaaagaaaagtttggccaaatgttctgcattgcatttctgaggcacacacaggagcgggtgccagggtatttgactgtaggtaagtgaacaaggagctatacagatagaatggcacggggtttgacagtaatcagaacaccacatcagaacacttgattgcacttcaactctcatgctgtgtttgccccaaataatcttaaaaattgtgactatatcgaataagttcacaatacttattaggatgtggtgaaactgaattatttgaagtaggaagacccgaagttcttcgcctatgagactggtgaagtgatttgtagccaacatgctccaacccatctattaagaaaactatggcatctattaagaaaattcaaaatcttaaacagagaaatccatatttagaaaacatggccagattaaatagggggtgggttattttcttaaatacgttttgtcaatttcacgtgaaaaatgaaaacccctagttcatgttacatattacatttctgttaagatgtatgttcctctgtttctaatagaagttgtggtggtttggaagtgaaaattgaatgtgagcacaggccatgtaaaggaaggagaaagtgtaaatgttaataacaggaaaactgaatttagctctcatgaggcagtcaaggaaatcattcattgaacatgttgggaaatacttttcatttggtgaccaaatacctacaaattcatttacaaaaaagaaaaatgaaagttacctcagaactaaactcagaaatatgtcccacatgggttcttgtaatgtttcttggtgaatgtctttatagaaagaagtgggcatgaaatgatgactcagtaattaaacacatgggggaagggaggctgtagaaaacactggattctatatttaaaatttcattcagttcactaatttgtttttactgaccaaagctttctatacctatgtagagtgtctgagaactagaagggcccatcagttgccactcggatgatccttttgtctcttttcagataaggccccagttcaacagcgtcctctgtgtcaatcagatactcccaggaatgagtgagccctgccgttttcccaagttgcccctcagcacattccagccagttccaaaacttttggcttgtttttgacacaaggccagataagctactcaaactggtttttttaaaaaaagaaaacaaccccaatctatattccttttttaatactgtgtacataacctgctgctcgaaagactaggttttcccctttccagctagttgtgttgtttctttatgtagacagctttaaatcatgtttacatgattcagccattttaaacaacctcttcctatttttttttcctttttgtacaaaaaaaaaaaaaagaagaagaaagaaagcaactaactaaaacctttcctttcaaggatttatgcagcataggatagggcaaccacaagtaaacacaaacatcacgtgagccttcttaaagaaaacatttccagaaatcactccaatgtcttaaaaaacacacaaaataaaacctttctccactgcagtttaactgtggcaatgagttgcagacgatcaccaacactgaaacttaatttagcttttttctctcctctccaatcataaaaagtctctttttggttcttcatgcaggagctattttctttcttttctggcctctaacaggaaaacagagtttctagccgagctgctcctgaggtattaaaagtgatgttcgtgtcatgcggatcaatcctgcccaaacattagtgtgcatgcaaatcacctggcagtcttattaaatgcagaatctgattccatgaggtccatgttgtccgtggaccaaacttgcagtagtagcgaggagtctagaagacgtccatgttatagaaattgaacccaggaaaggatttggggcttatgaagctaacaaaagcacgtaaaacccagcctgagaaacagtagctacacccagctcttgttgctattctggaaccaaataatgcaaaatatgctcgagacacatctcagttcttgcttgcttgactttctgagtgtctctctggcacaagggcctgtcatttgaattcccatcccccacctcatccccatgtattattccactggatatcccaaatatctagagtttcaaaacccaaatgatcccatttggccagagccttttttatgagtatgctaatgttatctgtgtatgaagcacacaaactttttcaggatacccggctatctattaatccttcagcacggacgttctccatggtaacagtctgacctataagatctaatgcctttcccagggggctcagaatcccatgagtttgggttaaatctgccataacatctaaaaaaaaatgtaaaggctctacggaattactttatttattcatttcccagaaagagaaaataattttcagttgaactcaaatcgtcattattacattgacaaggtttctaaggttttccaaaaagaatataagcctgccatccactatagcctttgccaataaaggcagagcttgaaaaaaggggggattttttttctgttagacatgtatcatcttacaaatctattttaaacacttttgggaccagtaaatcagatataatacatttggggagaatggaaatttttctgactgcaacataggataaatgagttaaagggaatgtctccatgcgtagtgctccacagaccgtgagctcctactcggaatttatttcatggttatccctaaaatgggtttccctcacatttggagccacagatgcttcttaactagaacataaactccagtccatggtttctggggctaagtctaacaacaataggccaaaatgagaatatattttgtttcctccttcctgtccagtgaatactgatatattcttgggcaaggacagccatcagggagccacagtgaagctgtcattcaggctatgagcttgctccttttttctgtagcctctcatgacccatgaggacccaagagggaaatgacaggatgaaaaattcggaaggaatcatctggtccaaccgcattttttcacgtacttgggaccagcatcccagagcagtcaagtgatttgtccaagtaacacaactagtttgttgtcagcactggagccaaaagtcaggtttcctgatttacagacaaagctcttgcagagaatggcaaagtacagcccccattttcagtgtgtccgagggacatcctaggtatataccccatggtgaaagattgaagtcttaactaattagggcagcatagaagtgaatccctagtaattaatcagataatacccaaagaagacaatcaaatgacttaaaacttatcaataaagagcaaaaaactgtgctctgctttgtaaaacatgcactttaggccaggtgcagtggctcacacctgtaatcccagcactttgggaggccgaggtgggcagatcacttgaggtcaggagtttgagaccagcctggccaacaaggtgaaacccattctctactaaaaaatacaaaaattatctgggtgtggtgttgcatgcctgtaatcccagctactcaggatgctaaggcgggagaatcccttgaacccgggaggtggaagctgcagtgagctgagatcgcaccactgcactccagcctgggcaacagagcaagactctgtctcttaaaaaaaaaaatgcactttaggagtaaatcttcacagagtatctgaagaataggtgagaagaggtgagtgatcaggtcaggatagaacctcctaggccacaacacctaaagtcctgagttcttatggcctacctttcctctggatttctttagaatgctcatggtttgtaactgtcttgaaaagaaccatcgtgaatgcacctcacctgttttcacactcatcttttaagaatggatgagatgatataagtgaagtgatttgaattcctttaccccctcccccacaaaaagctatgtaaattcagtatacttttaaataatctgtctcacttactgaaagaaacacaaaacgcacaaaatatgaaagctaacacctgccctccatatatcatcttcctatgtctcccaccacaaccacaaaactacttccagagaactaaatttttattgacaatggaaatcaaggtaaaccctggaatttttcctattccattctaactttaatggtttagatgactacagacatgttctcacagaccccacatatctttggatcctcctactaaaggtagggttagtaaatgtcccatccttgggacataatttactcagttgattaaaatactggtcttcgccagagttggtttggcagatctagctaaactgataggtttccttttctttctttcccatttgtgtctctctcacagattctctcaccatccaggaagaaacctgtctaagcaacgtggtcattcttccatcaaagccatcctaataattgctcttcccagtgggaactgcaaacagctacttttacatgaagttcccagaacttagtggtttccaaacaatagtactaccactgctcttgaaaataaaaacctcagtgagatcagggatgatcttaccttcttaaaattgtggtaaaggtgtttgttcacaggctaaaggaccatagctcattctctaagaatttcacctgattccaactctaccacatctgagtggtttctttctgagttttctgccttcctaacaattttgggtcttacttgatgataccaaccaaaacctaataagatttttcttgttctgtttcttcctgatatgtactgttggttagatcaaagatgaaaagattaaaaaggacaaagaacccaaagaagaagttaagagcttcatggatcgaaagaagggatttacagaagttaagtcgcagaatggagaattcatgacccacaaacttaaacatactgagaatactttcaggtaagaagtagcaactagttaatagaaactgtgttcacatgcaaagaaaaaaaaaaaaaagtcagtcttcccatcctgtgcttccagacagaaacgtgctaagcaggcagcatgcttttgttgtgaggtcattagccattgtcttagagatactcagtcagcaggtccagttcttatatcactaacagaagaccagcagtcatcgctcagacagggcttagtctgcttttcccattattttgaaaggcagatcatgcttggcatccatgtttttgttcactgaccttttgtgagattagtgtattagaaaacattataactgggattcatgtcattcaatgattctctatatggtctgaccaccttcctaagagacctttctcagtaccattttcaagaatgcattttctaaaggttgtaaataaatattgcataagactaagattgttttgtggcgaaatacttgggaaacactggattaagctaaattcctcagatttctttaccacatgactttgagagcccttcatgttcattttcattggaagtctctaagagggagtgagaggtatggacctactgctctattttatacagtttggaaaaactctcttgtatagcttgagctttcccctcaacataatcccttaccccatcaaactgaaaatctgggcaactgattatcagacagacgagaccagtatattcaggtaaatcctcatttctaaatacagtcgaatcctgagagctctctaccaattttgtagaagaacttgaggtgcagacactgggctggctacgtgattcctgtgctccttccccacaaaacactctctccaaccactggggccaaattccaacctctgttttgtcactggttgctgtgccagatgtgccggagaggagtcttgggtccctgcaatgtggatttccccgggcttgttccttggctgcaggcttgcctagtgaccctgtttttctgaacacttcaaataagaaagtcatcaagcaggtttgagggagaaatctgacatgctcctcacaccaaagcctttgtaatattcaaaagcaggcggagctactagggatggatatttcagtctcatccaagaggctaagatggataaatacggttgccccaaaacaatttttttgtacgtaaatttaagcagaaacctattcatatttatccaaaggagaacctaaagctcacagaagaaaaggtgtacataaaagatctaaataaaatgatgaaggtgtaagaaaggtagaatctatagatattacttgggattgccaagagaatagatgtgaaaattaagtttattgaacattcatagaaaatctacaaagcgagttgattcaggttggtaagttgagtctaaaacttgctgaagtgtctgtagtttaatgttttaaagccctagaatagtgttaggttcatgaaaagtgttcaatgaatattacctaatattactattttttaatagtttaaaagatgtcttgtaaacataaggttcttttaaggtataagttttttgttaagagaaataacgtttaagaaaatctgtcagtagaaaaaagtctgtttaacaattagcaaacttgccaacaagcttcaaagctcaaattaataattaacatgcctattgtgtagaaatccaaaaagctgggtaattcgaagaaaggaatagtcacaagagatggtgacaagttaagtgctaagaacacttacgtgtgactctggccttaatttttctattttgggcaggaaaaaaaaatacaggaacaagctgctaccatattatttatttttgtttagccaccaacgtatgtgagttttagtttcaattagaagttcacgctgattgaagtagagaagtatagttttgctccatatacatataaaatgaggagagaggaagagagtatccgcctagcctctatttaggtaagtttagtacctaccagcttcactgaaaacaagctgtgttcttaatggtcaaaggcctgatactcatcttgacttacacctaaggaagccaaggacgggggtagggtggtgggggtggggtgcggggagaaagaactttatggaacgatttccacattaagtggcaccctaatgctgaggtcatgcacataggcagaggtggtgtgaacaaaacttttgctcctgttttgagcatagctgcttatgtgtgatttaattactgttccctttgatatctgcattttcttgtaactcgttttctctaaaacatgacataaaaatctcaattcaatgagcaagatatagcgatgcaaattataccaagggttttatagaaagtgcaaaatggttttttgattttttatttttgaaggtagaaattaaaagattttttccgattatagaaaaaaatactcattataaaaacgctcagaaaatagaagaataaaaataagcacccaccacccaaagataactagcagtaacactttttccagatatttatctatgtatataatattcaagataaatgcacacacgtgtgtatatttatatgtagtatatacgtgtgtgagtatacttataattttacattgattcttgcactgtgcataagaatgtgtcatagcttgctttctatgccaataaatataagcctataattaatgatattagattctactggatggatgtattaggacttatttagccagtccctaatgacggacattttgattgtccaaaatgaagactgagtgacacctagtggaatccatagatgtttctataggcatgtgttttgccggtccagttcctgtacagtaatatgatgaacacaaagagagagcaaactcatttttggaaggaaagaccctaaattgactgagagaggagtcacaggcctgtgaacctagaagaccctgaaagagcctttgacagcaaggttttgagggaccctttaaccttgtttgagttcaaaataaaagtttacctgtaactggcatgagcctagaccaatagttctaaattttttaacctaagcccttagtaagaaataaattttacataatgacccagtacacacctgtatatatttttataactgaaacaagtgtgtcaagaaatggtactttgttttgctctatgcagtgcactctgatattttctgttttttttttttttaaatgttgattacaatctactaaattgattttctggtctgcagcttgaaaattattgttctggaggacacaggatattcagaactacttcagtgtttaaaaagcatgatatataatatacatatatatattataaaatcaatattgcacagtgtatttcttgagcccatttcttgttttattcttcctcttgtttcacagctagaaacactgtaccattctttacatgtagtaaatgatgttagggtgtgataattcctttgttccttagacaaaagtgtcaggaataggatatctacgttgacatctagttaagaatgaccttactacttgctaataagtatttaaatggcaaagctgtatctctgtctcttaaagactacttataacaagggcttcaagcctaaattaagccactaaattctgcttagtgaagtcccaggcaaatccaacttaggtgaactctgtgttagtgaaaactctgcattctactgaagttctactttgagtatcgacatgttttaaaattatcagtgttctaactgtatcatacagtaaatttattaaagaaactcaggggtcacagtaggtgctaatgatatgtcttcatctttttatagttgtgtaaaatactaaaaataccagttccaaaataaaattttaccataaggactcttgggatagcattctgtctgaagtcttaatatgttcccaattctgcaatgaaatccctgtgtatcctccttaatcacaaaagaaaattcaacataatttcaattttagttcttacttacataaaaacgtacccatttcttcctgttttataagctgttctacctgatgaagcttctgcttcatctcaggcacggaaggtagctagacctagactgtagaaactctagagacagaggtaggaaacgcttctctcagactctatcctgaaggtttgaggtaagaggtggagagatggaataacatgttctatttcagtttattcattgtttcataacaaaacgtatttaatttcaggtataattatagttacaagaagagtacaactaatagataagcattagaatctgatcatggctcgactgctttctagcttccaaaagtttgagtatattattctctgtcttacctgtggtttccttgtttgtaagatggggataataaacctaacctgacatcttcccagttattgtgactgttaaatgaagtagtggatatgaaaagggtttagagagcataaagaatgacatgtaagtaataaccttaaccacatcataccaagctaatttcataattttaagtctgtataaggagtattccagttgtattggggtcaaagagcatagaaaattcacaaattgaagccataggttaatgcagtcattaaggactttcctggagcagctctgtaagaatagacataaatcactgtgtttagctcttaatcaagaggcaatgggtaatttcgtctgccagagatcagctgctagagtcaagctcaaggcacagttgtggacagatggatttacttcaatgcctacccttagttacagccactttttcccattcccagcgcctgaacctttctgtcttccctcctgatccattactccaggcagacccaagttaaccagtaacttacgggaaaggactagtaaggccactacaagacttttgaactcattcacaagtaaccttttggactacatgcctccctttctaataacaactaatatttatactgtagatgatatagaaattatagtatatcagtatgatatcagtatgatatcatactgatataatacataagcccatgcaacccactgaggtaaatagaataaatagtatttacccatttttccatgttgtagcatgtatcttcttaaaaattgtggtaaaaacaaacatcacctaaaatttaccatcttaagcatttttaaaagtacagttaagtagtgtgaggcatattcatattgttgtgcaacagatctccaaaactcttttcatcttgcaagactgaaagactacacccattaaacagcaactctttatttcctgctaccgcccaccctctgcctctggtaactacagttctatttctgtctctatgaatttgactactttagatccctcatataagtggaatcacacaatatttgtatgatttccgtgattggcttatttcacttagcatagtatcttcaaggtttatccatgttgtaacaggtaacaagatctccttccttttttttttttttctctttttttcttacagacagagtctcgctttgttgcccaggctggagtgcagtggcacaatctcggctcactgcaacccctgcctcctgggctcaagcaattctcctgcctcagcctccagagtagctgggaccacaggcacacgccgccacgcccggctaatttttttttttttgtattttagtagagacagggtttcactgtgttgcccaggctgtcttaaactcctgagctcaggcaatccgcccgcctcggcctcccaaagtgctaggattacaggcgtgagccactgcacccggcctctccttcctttttaaggctgaataatattccatggtatggctagaccaccttttatttatccattcctgctatgatggacacttgggttgcgtccatctcttggtccttgtaaataatgctgctatgaacacgggtatacaaatgtctcttcaagaccttgctttccattcttttagaagtgtatcagaagtgggattgctggatcacgtggtagttctcttgttgattttttgaggaacctccatactgtttccatagcagctgcacaactttacaatcccattttacagtgcatatttgtcccattttacagctgaggaaacgaagcacaagtggaagagcagaggctcctggactctgtgattccgggcagaccccttccccagcctaccccctgggctaatgagaggcagtgggtatttagtcggggatgcagaagccgcagaccgacctccccttcctccagggagactacaggcaaaagcatgtaaacccctttccattgccccccaaccacagccgccctggagggagggccagcgtggacaccaaggaggctgagggcgccccccaggtggaagccggcaaaaggctggaggagcttcgtcgtcgtcgcggggagaccgagagcgaagagttcgagaagctcaaacagaagcagcaggaggcggctttggagctggaggaactcaagaaaaagagggaggagagaaggaaggtcctggaggaggaagagcagaggaggaagcaggaggaagccgatcgaaaactcagagaggaggtaaggcgggcgctagcccactgagaacgttgcccgggaaaattccctagtgccgtgcggctgttcttttgagcatgggctctcaaaaatatttttttaagaataataaacttaccatgtgctaggtactgttttataacttgtagatgtattaatttgtccactgcttctaagaactcgctgacctaggtactaatccccattttacagatgagaaaactgaggcacagagaggttttgtttttgtttttgtttttgtttgtaactttcccaaggtctcccttgagtctgcctgacatgcaggaggagccccatcattaaaaccctttactgcctctcaaaaaggaaaagttagaaagctgaaaaggatgaaaggtctgcaaattagttaccagaatgaagttatggttttctaatagttggagagtttttatagagaagatttttttaaatctttttttttttttaatgagcaagtaagtacattagaatataaagaggcagggacagtatctgcgttgttcattactgtatacccaggaccccataccgtgcctgacatgcaggaagagccccatcattataaacagatggatttgtttcatcttttaagacagagctaaaaacagcagatagagttacaaggaggaacattttggctcagcatatgaaataatgtttaaccaactacaacttacagtactacagtttacaaagtgcattctttcatttcatcctgaggtacatcgttctcattttatgggcaaagaaaccaggaatcaaatagtttgagtgacttatttgaagattcttgactaataaatggtagaatcagtaaggagaccccgcttttccaactcagagcccagagcttttgagatagcgatctcccatcattcaaaatatgaagaaaaaaaaagactttcaatggcattttgacaaggatcctatgcaaaattttcctgaactgtatggaaaatttggatacattattttgaggtctcttttaactccaactttcaatgagccaatgacctttggttgggaagtatgggaagtaatcaggatgatagagtttgggggttaaacacaccccaggcttttttttttttattgtttttttagacatagtcttgctctgtcacccaggctggagtgcaggaatgcagtggtgcaatctcggaacacacccagtcttctatcctaactctgtcactaacaagctggggccttgggaaaactggactactctgtgtcttcttttccttatctgtgaaataatatctactttgcaggattcttccaataatttaatagatcattgtgctcccagtgcctggcacattctaggcactcaaaaattagtaggtatcattattgccatcattgttattatgattattattcagaggaggagagtatcaggaaaggctgaagagaaatcacgaagtcttagaactggattggacctaggagattatttgggctaaactaccaaacacaggatccttctgtgacatcctctgacagatgaacatctagtctctgcttgagaacatgcagtgataatgatctcacagcttaagaactaccaaagactgcattaaatctctcagaaaatcaagttgtgcaacttgatcagagccctgatagagaagacagagtattctagactaggaatgaagacacagaggggttaatgagacagtctgtaaacatttgcaattgcactaccatggttcaacgtctagagcatttcaggtttgtcaaaccatctaaaattatatattcacttgaagcggggagcaaccataaaatcacctcttgtaccatctggcaaatatagtaccacagatttagatagcttttcacataagttattcatttgtcttcacaactctcctaggatgtaggtagaaggaatattcatatcccttttacatatacagaagtgtgaggtcattgttaatgacccacaggatggtggtgattatgtatcatcctatgggaaatcatcataatgagtgttagtctaagccaggggtgtccaatcttttggcttccctgggtcacattggaagaagaattgccttgggccacacataaaatacactaacactaatgatcgctgatgagccaaaaaaaaaaaaaatcacaaaaaggtctcataatgttttaagaaagtttacgaatttgtgttaggctacattcaaagccatcctgggcatgatgtggcccctgggccatgggttggacaagtttggtgtaagcattttacatgtgctatctcactgagccctcacgaaagccctaaaaaatgagtactattgttatccctgttttacagatgaagaaactgagccacagagcagataaataacatggccaaggtcaggcagttggaaagtagcagcaccagaatgcaaatgcaggcagctcgactccagctctcaggctaaacctctggtgaccacctagaaggggagtgtccagcctgcggcctgagtctgctgcctctccaactgtgctctctctcctacagcactcttccctttggctgtgaagctggtactgatgcctcgttatttgttctttctctcttaggaagagaagaggaggctaaaggaagagattgaaaggcgaagagcagaagctgctgagaaacgccagaagatgccagaagatggcttgtcagatgacaagaaaccattcaagtgtttcactcctaaaggttcatctctcaaggtatttttttccccagaaaacttctattagaatatgatagagactggattttagccccttgtttagttattgattatacagggcctttgttcatttatctttttgctatccttccaagttaatctgttcaggctgctataacaaaatactttagactggggccaggcacggtggctcatgcctgtaatcccagcactttgggaggcagatgtgggcagatcacctgaggtcaggagttcgagaccagcctggccaccgtggtgaaaccccatctctaccaaaaattcaaaaactagccggacgtggtggcacacacctgtaataatctcagctacttgggaggcttaggcaggagaatcacttgaacccaggaggcagaggttgcagtgagctaagataatgccactgcactctagcctgggcaacagagcaagattccatctcaaaatttatcactcacagttttggaggctggaaagtcaaagatcaaggtgccagcagatgtggtgtctagtgagggcctattcctcataggtggcaccttctccctgtgtccttacatggtggaaggagaaagggagaaaacaggcttccttaggcctcttttataagggcactagtcccattcacaagggcctcaccctcatcacctagttaccacccaaaggtctcacctcttaataccaacacatcaaggactcagtttcaacatataaatgttggaccatagcacctcctttcagctgtttcacagcttctctttgtttacaacatatggaaaggagggacagtagtgaaatttttatctgttgtttattagatgctttggcatacattaaaatgacattcggtgattatctctcaattttactgatccacattctccatgtgcctcattcctttgagcaactgagaatagagacatctaaaatttataaaataggaaagtatattttaaaagtttaagctgcttttcatgctagctgttcattttttctttgtcatgattaaaagccagctggaaatggtacaggtgcaaattttaaagcaattattatgggaggaggtgaaatgtgacttggaaagggtccttttccaggatggctttggtcctatgacagccttcatggagcacagctcctatttgatgtaaaacagagtgctgccaagagaacagaaaaggagcaggaatcagctgagtcagggagatgatagaatagttgagatgtagggaaaacacagtggactcaagaaagtagcatccttgatttataatcagtccaccattattgccagtggcagtttctttgagaattaacatcattgagcatctagcacagtgccttacatcatattgaagatacttaataaaaatttgttaaatgatgaataaaggaatgaatcttcagagattgggacttttaacatttcattttccatcaacctagctaggttataaagcatcaacaatggacaaagccatgagagaattatacccaggtctggccgggcacagtggctcacacctgtgatcccagcattttgggaggccgaggtggatggatcacctgaggtcaggagttctagaccttcctggccaatctggtgaaaccccatccctactaaaaatacaaaaattagccaggtgtgatggcgcacacctgtaatcccaggtatttgggaggctgaggcaggagaaccacttgaacttgggaggcagaggttacagtgagccgagatcgtgccactgcactccagcctgtgtgacagaatgagaccctatcccaaaaaaaagaaaaaaagaatcatagcgaggtctggatggttaattatgtacatatgtgtacggttatatcaagtggcacaccaaaatgaccaaaaactgcttacattttacagttattacttgttccacatgaaaatcagaattttttaatccccaaataacttcccttagtctttttttttttttttgagatagagtctcgctgtgttgcccaggctggagtgcagtggcaccatcttggctcactgcaacttccgcctcccaggttcaagcgattcttctgcctcagcctctcgagtagctgggactacaggtgcacgccaccatgcccagctaatttttgtatttttagtagagacagggtttcaccatattggccaggctggtctcgaactcctcacctcatgatccgcccaccttggtctcccaaagtgctgggattacacgcatgagccaccatgcccggctcacttagtctttatgatggtctaggtcccagtcatatttctgatacctcccaaataaattatttgtacttgaacccttgtctcaaggtctgcttcagggaaaatttaaactaagccacagagggattatacatttaatatctgattatttatgaaatacttaatgcatgctatgtcctatgagggaaagaacaaagcaaggtggctgccctgatggctctaatgactgcctcaaagaaacaattcaagaattacaaaagtgagcagagcaaaatgagtagagaaaggccttgtggagtaggcaagctttatttataaactctgaaatttgaattttatgtaattttattgtgcttttctaatgtcatgaaatattattcttcttttgatttttttttaaccgtttaacagtgtgaaaaccattctcaaggccaggtgcggtggctcacacctgtaatgccagcacgttgggaggctgaggcaggtgtatcacctgaggtcaggagtttgaaaccaacctggccaacatggtgaaacctcgtctctactaaaaatacaaaaattagccaggcaaagtggcaggtgcctgtaatccctactcaggagcctgagacaggagaatcacttgaacctgggaggcagaggttagctgggcgcagtggcgcatgcctgtaatcccagctacttgagaggctgaggcagaagaactgcttgaacctgggaggcagcaacaaaagcaaaactccgtctcaaaaaaaaaaaaagaaaagaaaaagaaaaccatgttctctctttctaccttctttaaaatcccacccaagccttccttgaacagtcttggtaacatgaagaaaatagtagtcatctagacttccaaattctactgtggttttttttttttgtttttttttttcaggagaaactacaacctaccctaccctcctctaattatttcttctctaccaaatttctcaacgtacctatttctctggtctttccctcagccagatgctggcttcccatttcatctagtacccccaggaagccatttatctactccctctgatggagaggcatttgtctgcaattgattaaagtagatgtataaaaaaggtctaggttattttaaatttctatgtaagagagacacatattcaggggcagacagtctatgcttccctccatgtatgtgccttgaagaacttgctgtgactctgattttcaagctcaatttcatattctacaatgtaattgggatagctattgatacccttggccctgcaacttttataagtggtcacaagttagcattgtagaataccaatgggaggaaaaatatttgctatttgacatcaaaatactaccaactactgtatttttaaaaaatatctcatgatttctattccttgtttgggaaagtctgtacctagtttttcatcattaaattatgttagcagtgactgattttcatatgcaataaagaatagattttaagtaaattaaattcaaagattttttaatttctattgcctttattggttggggcagggtgtggagtaacgagagcaccaattttctaaaacgaatggtgtgcttttattccaagttttatcgagacaatactgccacctcttggtcttcagaagaaccaatttcccttgttaaattccttaaacagaacatttaatatacaaattcagtacaaattgtttagagccactaagttaggatattttctagcaggagtgcatcagtaaacggacagtgcatcctgacaaaatgtgcgaaatgcaatgatgaagtcaggctatgttagctatgatagaagcaaaaggaggagtaggaatctgagaatctcggtgatttgaataaatgccatggccaaggttagaaagatgatccctgagtcataaagatgctgcaggtgggacaaagaacagttctcacctccgctatccccttctgcagtgcctctatcctcccaccacactgaatttttctttatccccagtctcaccacgctgcgtgccttgtggctctccaaatctttgtacatgtgcttgctttgccagaaatgccctttcctggctaagccatgcacttccttcctcactttcataaactcatttctgaaaccatgtaaaccagaaactactaatctcagctcaaatatcaacactactgaaaagccttctccacctcccccagatagttacttcttatacacacagcatttttttctttaatattgtacctactgttaatttttaaatattttattttatatactttactagtcttccctactaaattctgtgttccttaaagaataagaccttgtcagtcaggcacagtggttcacacctgtaatcccagcactttgggagtccaaggtgggcgaatcatgaggtcaagagatcgaggccatcctggccaacatggtgaaatcccatctctactgaaaatacaaaaattagctgggcatggtggcgcgcatctgtagtcccagctactcgacgctgaggcagaagaatcacttgaacccgggaggtggagattgcagtgagccgagattccaccactgcactccatcctggcaacagagtgagactctgtctcaaaaaagaaaaagaaaaagaccttgtctatcttagcttgcttaggttgccataacaaaataccatagactggatggattaaacaatagaaatgtatttctcacagtcctggaggctggaagtccaaaatcaaggtgcaagcagattcagtttctggtgagagccctcttcatggcttgcagatggctgccttcttactgtgtcttcacatggaggaaagagagcaagtgagctctctagtgtgtcttcctgtagggataacaatcctgtaggatcagggttccaccgctctgatctcatttaaccttaattacttccttagaggccccatttccaagtacaatcacattgggggttagggcctcaacacatgcattttagggggacacagttcgatcaatagcactattttatttattagtattcaattttatatagaaggtactgagtatattatttattggctaattgtttggctgacaggctggcagggataaaaataggatagatggatggatagatggatggatggatggacggacggacggatgggtaatatttattaaaagtgccagtgcattgcatagttctaaactgtttcaccttactcacctgggaattttttctacagaaatatacttctaagtttataattaaaatcagaaaaataagagttactttacagatgttttatatatcccataaagtcagcactacttatagtacttttttgcatagttttttaagtaagagtttgcttttgtctttgtaggaaatcatcagaaagaatgaaatgctcttactagtatctataaaactgttattcaactgatattagagaggaagcatgttttcaaaaaaaaaaaactctgtggtatttattaattgctcatgaatcccagaccagtctgggtcagaaagaacccctcacatcttggagaattgtgtgtatcccctcaaaattcatatgttgaaatcctaatctgcaatatgatggtattaggaggtgggatctttggaagacaattaggtcatgagggtggaggcccccttaatgggattagtgcccttgtaagaagagacacagaaccttatttgctccctctctattctgcactatatgaggacacagcaggaaggtggccatctgcaaaccatgaagagaggtctcaccagaccccaaccatgctggcaacctaatcttagacttcccagtctccggaactgtgagaaatgtttgttgttttaaggcacccagtctatggtaatttctcacattaaccaagactcactgagacaaggggccactcaaacatactagcctagggcaactaaaatccagtagatttcttgactgtcctgaacagggaagaaaatggaacttttcagcgtgcatgtgctttggcacatgcagtcataagcaaagaaggtatttgctcatggtattgataggtgatgggtggtagaggatatttctagcctggagttgggtgtggcatggattcaacaaatatttgcttattgctaacatctaaatttaagtgttacagtttcagtaaaatataatgtttgatttagcagcttcagttgtagcaaaaaagttcctagctttaaaaaaaaaagaactcatcaaagactactaactgctgattttttctatgtccaaccctgtttctctgggctcatttcctcatttcacacttgggctaagaggggcttcatgggaagcctcagccattacagatgagctgtgccccatcctcattctacctgtatcccgccttttacgttccaaggctaattaagttcagcaataggcttgatcattgacccttgtcaagttaggaaatcaggttaagcaataagggactagttcacatttcctagttattcaatcctgttacataccaaatacatagttaaaacattatgggaaaattttgttactcgaatagcatggtatgtctctagtaaatacatcctaaagggtaacagtgtgtgtttttgaaaaaattatttgtttgttgttgttgcattttgtttgtttgttttgagacagatgctcactctgtcacccaggctggagtgcagtggcacaatcttggctcactgcaatctctccctcccaggttcaagcaattctcccacctcagccttccaagtagctggggctacaggcgcgtgtcaccacacccagctactttttgtattttttagtagagatagggtttcaccatgttggccaggctggtcttgaactcctgacctcaagtgatttgcctgcctcggcctctcaaagtgctaggattataggtgtgagcctcagcgctcagccaattatgttagtcttaaactttaattattttgccactgatttatattgttttagaggcatttttattccatttctgtctggtctttattttgccttgaaaacttgatttttttttttttacacgttttctctatcctgtatcaatcctaccttcattcccccaaatctcactatcaaataccttatatgtagttttgctttctagcagagctacgcacagtaactcaaatacccttatatgctcttcggtgtgtttaacaggttcagggatgatattggcctgggctgagaaacactgtttataagcttgaaatattaattgggtttattttcttttgtaattcctagatagaagagcgagcagaatttttgaataagtctgtgcagaaaaggtaaatatgcttgatggttcaattgagctaatcagctagcatatgtatgagaagattctctctcatatttttatatgtatgtgtttacttttttagcagtggtgtcaaatcgacccatcaagcagcaatagtctccaagattgacagcagactggagcagtataccagtgcaattgaggtgagaattgtcctcagcgttatggtcctgctgaacagaaatagattctgactacatagaagagcataaaaacacttaggacaataatcaagtccaatagccccaggagtgttagaatttttttttttttttttttttgagacggagtctcactctgttgcccaggctggagtgcaatggcaatctcagctcactgcaacgtctgcctcctggggtcaagcaattctgcctcaacctcccgagtagctgggattacaggggcccaccaccacacttggctaatttttgtatttttagtagagacggagtttcaccctgttggccaggcaggtctcgaattcctgacctcaagtgatccacccgccttggcctcccaaagccgaatgtgagccaccacacctggcccccaatagtgtcagaatattaatgatgctttattacactttgaaattctaagttctaagaaatacaataataaagataaattttaggagagttttaaataaattattttctactttcagcgtgaatattgtttaatgaaaaggtttttttgtaacgaatgggtttactggtatttaaatatatatatatatatatatatatatatatatatatatttaactatatatatatttaagtcttctttcaagtattctgtcaaatctgggtttaaatgtcacttcctcagagtagccttctttgcacccccaaactaagtactgccccccaattgtgtgccatgctttatggcacatcattatttttcatagcacttagcacaatgtgaaataaatacttgtataactagttactatctttcctttctattaaaatataagcccactgcagctgactgtcttgttttttgtttgtttttttgttttttatttttatttttatttttgagatggagtttcgctcttgttgcccaagctagagtgcaatggtgcaatctcggctcactgcaacctctgcattccaggttcaagcgattctcctgcctcagcctcccaaccgtcttgttttgagcacgactgtatccccagagcctagcaaagtgcccttcatacagtaggcatttaagaagtattgttgaggccaagtgtggtgactcatgcctgtcgtcacagcacttcaggaggccgaggcaggaggatcccttgagcccaggaatttgaaaccagcctgggcaacatagggactatgcctggctaattttttcatttttttctctacaaaatagagagaggcctatggttccagctactcgggaagctgaagtgggaggatcacttgagccctggaggtcgtggctgtagtgagccttgattgtgccactgcactccagcctgggtgacagagcaagaccctgtctcaaaaaaaaacaaaaaagtatctgttgaagaaacgaagtagaatatcaatttcacaacaaatggtgtcccaacaaaaagcatatttcatttttgaaagatcctctgatctagctgtgatggtttattttgagggacatatgtcatcagcatacagttttacaacagaaattatcactctcatttttggtggaggtgtttacacaatgaatttttaagatgataatgttgaggaagacaaactcactataattttatgagaacaaacttcccagcaccaatcctaaaaataactcacaaatttcagggaacaaaaagcgcaaaacctacaaagccggcagcctcggatcttcctgttcctgctgaaggtgtacgcaacatcaagagtatgtgggagaaagggaatgtgttttcatcccccactgcagcaggcacaccaaataaggtgagcatctgatttttgtctcttaagtgtagaggggcatatttttttgcatgtcgattttgatttaggaatcacactagtaaataataaaagcagtgaagaaggtgcaatttgtactttgttttgcaatgaccacaaaagcaagctcagagagaatgtgtttgtgaggttgcatgaggtactaagcccgggccatcttactccaaataaagtgcctgggctgaaatgtccacccttggagttggagtggggtgagttaccagggaaagaaaaccagataacatattctgtaaatatcaagtgttaaggtttatggttatgtgaaatcatacttaatgatattttgaatttgctttgaaaattccttcccaggtaaagtttacttcattctttaatattttggatgattgcccctttgtaggaaactgctggcttgaaggtaggggtttctagccgcatcaatgaatggctaactaaaaccccagatggaaacaagtcacctgctcccaaaccttctgtaagtacctttaggtttttctgagtttctttgatctcccagcttctaccagcagaagaaaacaagcagttggtctgtttacctaggaatggcagtgcccctgttctttgctttccctgatgaatagcaaacaggaaagtgttcagatttacaacagttctaagaagctgcatctcagttactcagagggtaaaatggaaccaaataatcacctctacaccctaactgagaggaggaatcagctagaatactgaggcagttcaaatttagatcctttactcgtctatttgtttagcttctattctataaattctggatagaaatttgaaaatgaaaggtcacatcattttggctacttctttgtcaagagcacccctaaacttattcccaaaagaatatgtatgttgcctattgggaacccatatgttccaatttgcctcatttttataacttggcacaaaaatgcagttattgggtagctgttgaaataattggtctaattgtgttgtcagcacctcctgaggaaagtcataaaactggaaactagaaaaactggttatgaatgatgtttttgagaatctaaaattttcttaatttattaagtgcagctatcttactaaaaagtacatttcttttcacctttttgttgaatgtatacgacaattgcttgcatttgtcattataataagaaaacgtatcaagctccccactgtatattgctgagctttccctgttaagtttgcttttatagctttgttggtgcccaagggagctgagagtccactgtcataatcctacattctagaggaagaagaaaaagtttccaatcctaggcctctgtgcatttaattgcatccattggctccatgccatttaattgcatttgttggctccatatataatctccaaagtcattaaattttgtcactttccaatttaaaaaggaagaaatggaaatgttcacaaatccttcttgggcacaactccttgaaccgtttaattaatctacaccccgagattctttgcataaaggctcacaggaggtatacactaatgtcaacccaatttacaattggaaaatctttatacattgaaaaaagcaacttttcctccccctctcaataggtacaagaatgcgggtttataaaaggacacagttgaggcaagagaccggacccaaaagttatgtgctctttagtgcctcaagttttccaagcatctctggtaacataaggagtagaaattattttcaaaaacaaaataatcactggttccagaccagtgattattaaccctttttgaattatgaacccctttaaaacctaatgaaatttaaggaccctctcccccaaaatatacatataaaaaaacaaggcagtctatggacctactgagtaactctcaagatagtaagtaaggagagaaagatctatgtttccctctttgataagtatgaaatatttggaggagatgctaatttttgcacgtttatgatatttgcaatctttcatttttgtagcagattatactcaaaaatttgatccagaacttggcccctattcttttatcagcactttaacttgtaaactgaaaagtttaccatcatctgtatgacatcctaatgaggttaaaaagataaaatgcagttatgattatgataggtataactgtatccaggtttccacagcaaaaacaaaacaaaacatacaccatgttctggggttattgacagcctcctaaaaaaaaaaaaaaaaaaaaaaaggcattgcagagaaattacaaaatcattgcctgctttacctactaattagtatgtgacttgctagatcaccccctagagggtgaagaaaaggaaagaagaacatggcagttagtatagattttagtgagatccttcttcccattagattttgtagactagtgtggcttcctgaatgagaaccagatggaagaaagttctatgaaatcaatgttgtaaatacaccagattgctactgggatgtcccttgctatttgtgggtagaatttataggatttcagtgtaactttgtaactgcaattcaattctgagtatgtctgtttgagctggtttgtctattctttgtgtctaaactaatgttacacagaaattaaaaagctaatttgtctttctttttgtttaaaaaaaaacaaccaacaatgtctttctcagctgaccttctgttcctcactctttggtctctggttgattggaaacctgcttctcctgccttcatttctccctcttcttccggagtgggtctttctctaaaatgtagtctggtcaggtaattccatttatatttcccctttgatttaaaatgccaacttataactcagatgttcatattttcttaaaaggactctttaaactctttaagtgatcttgaaagattcatcggcaggatttatgggaagtgcaatccattttcttaggtagaagaacgtgcatgagaaggaaaaatatttgtctcatatgaatcaaataaacaaagcgataatagctgctttccagagcttccctcagcatgttcctaattatagtttccaaaattttaaaacagtcttccagacagtttggcagcttccacctacgctggcaaatgtagtggaattctacaaaaataatctgatttgttgcttaatggctccaagttaaataggtgtaactctctaatagaatatcaggaattcatgccacagaggaaatccagaaactcagtaaagtttaggcaaatctgaaatgcttcacaggtatcatttaactgtgcattttcagtgttacaatctcaatactatctatcagaaatatgtccatttagatcagtgtccacgggtaaatgcaattgctgttagctttgccttcctcctgagaaaagggtttgccaagataagcattactatttcagtaaaacacatttattttctacaaactaccttttgccaagtactaatataagcaaatgctggaagaaaagtaaattgaaacagaaatttggatccttatccaaatgaaattaattaggaggtagtaaataaagactctaagctgtataactgttatcgatcatattttagtgtttccatcccaagatttccacatgttcttacacatgtcatcaactgtcaacttctcgcatgggttcaatttgtgatgaatgtttatatttgctaggttctactgatccacttctgaattacccacttgcccctcgggagacacataatgattttagggtgaggaaaatgctgctagaaaagggactttgtggctgggcgcggtggctcacgcctgtaatcccagcactttgagaggctgaggcgggcagattatgaggtcaggagatcgagaccatcctggctaacatggtgaaaccccatctctactaaaaatacaaaaattagctgagcgtggtggcttgtgcctgtaatctcagctacttgggaggctgaggcaggagaatcgcttgaacccgggagtcggaggttgcagtgagccgagattgcgccactgcactccagcctgggcgacagagcaagactgtctcacaacagaaaaagaagaaagaaaagtgactttgtttgggctgcccggcaacggatcccaagatagtgattccagagcaagttgtttacgtggaggtgaagaaaaccctacaggggctgaggttgggagaagaaggcagtcctcacagaaggtgttattaagcaagtccccacatggactgttaaactttcatcccatggaggaaatcctggaagccaccaaagaacacatacttcagagttacccaagctgaggcgagagtgagcctgaaaataatattgcaccaacattcaccagtcagccattgaggactgctcctggggatgttataataactctctcaactttccagcctgcccctgggcaggcaaatcaggcatctgtacccagagaaagtccctaggcagagaagcgctgtgtgggcagttggcagtcaggctggtgtgcactaaagtagtaagggctggggggaaagaggtgagtacaaattgagttcatctgtgaggcaggaaatgcttatcaaaccccaaattaatcatttttaaataacccatgatctattgacttgtaagagtgcagaaatttaaaatgaggctacattattttaaacatgctcctgtttcacttttactgatcaataaacagtaagtccttaggaaagggcaaggaccccgaggctatagttccagcccattctcatatcataagacatgtcacggtctatataaaatcaaacaacagctaaccccatctctactacacatacaaaaaaattagccaggcatggtggcacacgcctgtaatcccagctactcgagaggctgagacaggagaatcacttgaaatcagtagatggaggtcgcagtgagccaagatcacgccactacactccagcttgggctacagagtgagactctgtctcaaaaaaaataaaaaaataaaaaaatcaaacaacagctgatggtcctttcaattccatttcagatcactggggtaaagtgtattaaacaacaaactgattcaaataaacaatagatgtggccatttatttagagctggctagaaaatataaatggccacctatcgatgtttttctgcttcctttttatcaggacttgagaccaggagacgtatccagcaagcggaacctctgggaaaagcaatctgtggataaggtcacttcccccactaaggtaatctattgggaagactagtatttcagaggtttgttttcctgatgtatggtgtagtataatgtcctggagtcagatgagaaatatcactgacctacagatctttgcctgcacacccatcagtgtctaaaagaccagtacataacacagtgaaatgaaaagcgcattgcaagtttgtcagtcatacaacataaacggcccaaatccatggaatggttctcagtaggacattctcaatacaccacagtggtaggaacattggcagcagaaggccgtatgggataccatggtctacgtttccttacaaggtcccagcttagtgccacagtcatttaaaaatcacttggggaaaacatctgtctccctgagtgtttccaaaactgctttctggaaccattttagattacattgccactgccagcagcctaagactcagggttgctatggccaaaaaaaaaaaaaaaaatattcaaaagtaaggcaaccatttaccaccctgtgaaaatgaatgattaagaatgattgggttcctcttacttttagtcttctggtcaaaggatatggtcattcttcagaaaggaggctctgaagaacatctaaatgatgcttacactgcaaatgggaccctttgtggtacaatgagctcattcaactcccaactgtagcctttccccatttcaagtaatagacctcgtgttctccttcaataaaaagaaaattaaaaagggagaaactggagaccaacaataagcaaggttagaacaggctgcttatgggttgatttaaacagaagcacttcgtaagcaaactcaggactaaagagcacatcaacggcaactagagaatcactacaattcactgcagtgagagaattaccttccctttcccactttctcatgctcttagttctggtgcagctacctaaacatattaccccaccttcactattagctacgtattgcgcttttattccattaaaatccactagcctttctaagtcattgctaaacatatgaaaagtacctgctggtaattatcacattgctaactactagcgctacaagtgagcaccccactatatgccagacactattctaccttcttaccctccattatttcatttgatcctccagtcaccatgtgaggtaagtagtttatcattctcattttgcagctgagaaaaatgaggcattgagagatgaagtaactttcccaaagtcacacagtgaataagtagcatagcctgcattgatactccagcacctgatccgagcctgcatttttaaccattatacatggtactttcttttaggatgcatattcaggagaaaatgtatagttattcaattccttgtataattttctctcggtggcaggggagaaaagaactttctttgttattttttaaacaaagaatgagcttgttgacctaagcttttatgacctctctagcctatgctattagcgcattgcaggtttgtcagccatgcaatgtaaatagcccaaacccatggaatggttcccaggaagacattctccacacaccactgtgggaggaacattgacagcagaaggctctcctctcagacctctgagaggtatctgacttctcagaatggcagtcccagtgtttatataggttcctgtctgaaaagcagatgtcagctggccatagaccatcatcaccagtataacggagtctctctggataacattcctcctagccagagctctggaaagtggaacaaagatgatgtggaatggtcagactcagagaacaccactcacatacaaacatgaatggtactccctggagttatgtagcaccagggcagtacaaggtaggagggtgacagtgtgagttttcatgtgccactaacttctttctacagtagtaataatataaccaccagaccgagaactgagtttatgaggtagcagattaggtacctcttttgctccaaactgtcaaactcatttcttgttactcagtcattccttagaaatgaatacaatgaacacccttgaaaattggaattcacaacactttaagatttcttaatagcttggcaaaaatttttagcaactagctgagggggagagaatggtgtaagaataggactataggtcagataagtctcgtggggtaggggtgtaagaataggagggagaaaatagagattgctagattaaaaatgggagaaaactaaagataaacatcctccttcaccatcatacattgatgtggccctcactgagctattcagtcgcatgtgcctgttctggaatacacactgtagatttttggctcttacagtggggcttaaaaatgaaaaaaacaaagcaacttacttgactctaaatgctataagcaaggccaaaagttaagacaggaaaagagaacatcaaggagaaagacaggaagagggaagtgaaaaaaatcagcagaaggaaggctaaaataaaataagatccagccaggcgcagtggctcacacctgtaattccaacactttgggaggccgaggcaggcagatcactggaggtcaggagtttgagatcagcctggccaacatatagggaaaccccgtctctaccaaaaatacaaaaattagccgggcgtggtggtgtatgcccgtaatccccagctactcaggaggctgagatgggagaatcacttgaatctgggaggcagaggttgcagtgagctgagatcacaccactgcactccagcctgggtgacagagcaagattccatctcaaaaaaataaaaagtaaaataaaagatcatatttgaatggaatgccgataataatcctccctttcataaatatttattcctgccatactattattcatttttcttctgactataaaaaccatctgcctgaaacactgcaggctgtcagtttcacactacaggctgtcaatttcaagttctcttctcttggcaggtttgagacagttccagaaagaacccaagctcaagacgcaggacgagctcagttgtagagggctaattcgctctgttttgtatttatgttgatttactaaattgggttcattatcttttatttttcaatatcccagtaaacccatgtatattatcactatatttaataatcacagtctagagatgttcatggtaaaagtactgcctttgcacaggagcctgtttctaaagaaacccatgctgtgaaatagagacttttctactgatcatcataactctgtatctgagcagtgataccaaccacatctgaagtcaacagaagatccaagtttaaaattgcctgcggaatgtgtgcagtatctagaaaaatgaaccgtagtttttgtttttttaaatacagaagtcatgttgtttctgcactttataataaagcatggaagaaattatcttagtaggcaattgtaacactttttgaaagtaacccatttcagatttgaaatactgcaataatggttgtctttaaaaaaaaaaaagaaatgtactgttaaggtattactttttttcatgctgatgattcatatctaaattacattattatgttagctgacagtggtactgattttttaggttggttgttttgtggatttctttagtagtgatagtagcctgaaccacattttagataactcaattatgtatgtatgtgcatacacatatacaaacacactaatggtagaatgcttttttatgtgctagactattatatttagtagtatgtcattgtaactagccaatatcacagcttttgaaaaattaaaaaatcacactatattaatattttatatttgccaacagaaacatggcagataggtatcaatatgttttcaatgcctgatgacctataagaagaaagtattgaaaagaagagagattagaactgttagaaggagttgaaattttctaaaagacatagtatttagtttataattaaatgcattcttgaagtccagtgtgaattttattaatgctatcatctcgaccaagctcaaagcctacttattagaaacaatgaagttcacaataggtcataaggtctcttccttttctaaaattgaaagacaagaaatttagtgccaatattgtacagacagaaattccatgtatgagtctcaacaaagactacctttggctaaatgtctagaagcagagaagtaaagtgagcaaaatccagtgttgaggagtcatgacagtactttgatctttatatactctgaagcatttcttcaaacttttctacttttatttgtcattgatacctgtagtaagttgacaatgtggtgaaatttcaaaattatatgtaacttctactagttttactttctcccccaagtcttttttaactcatgatttttacacacacaatccagaacttattatatagcctctaagtctttattcttcacagtagataatgaaagagtcctccagtgtcttggcaaaatgttctagtatagctggatacatacagtggagttctataaactcatacctcagtggacttaaccaaaattgtgttagtctcaattcctaccacactgagggagcctcccaaataactattttcttatctgcagtattcctccagaagagctaaccagggcagggctggcatgagaagtgacatctgcgttacaaagtctatcttcctcataagtctgtaaagagcaattgaatcttctagctttagcaaacctaagccaaaggaaggaaagccatgaagaatgcagaagtcaaaccctcatgacaaagtaggcacaagtctacaataagctaaatcagaatttacaaatacaagtgtcccaggtagcattgactcccgtcattggagtgaaatggatcaaagtttgaattaaggcctatggtaaggtaacattgctttgttgtacttttgaacaagagctcctcctgatcactattacatatttttctagaaaatctaaagttcagaagagaatgtatcactgctgacttttattccaatatttggatggagtaagttttagggtagaattttgttcagtttggatttaatcttttgaaaagtaaattccttgtttactggtttgactataattctctgttatctttacgaggtaaaactgcaagctgactagcatgttctgtgaatctgccattcctaaaaattttataaacacttgatacttttcactgataatggatcgctccaataaacatatattgtgaaaatgcatccacaataaatggaattccttcctgcaaaatgtctttttctcacttatttttatgtacaatattgatagtgagaggtatgtctattataataaagattatggcacagtaaaacctgtatttcaggttgagtcttggtttcactctttaaagaagaaaagcattttcatatttttaaattacctaataaaatatagaaaattggtcttatgttgacaactgacctaacacgtatggaaaaggttgaagagggattttgcaaatccttcctaaaagaaactatcgtccaggcacagtggctcacgcctctaatcccagcactttgggaagcaggaggattgcttgagcccaggagttcaagaccagcctgggcaacatagcaagacccctttctgtacaaaaaaaattaaaaagccaggcatggtggcatatgcctgtagtcccagatacttgggagcctgaggcaggaggatcgcttgagcccaggaggtcgaggctacagtgagccctgatagcaccactgcactccagcctaggtgacaaagcaagaccctgtctcaaaaaaaaagtaactatcgattgtccctccatcctccttctcattgccagtgttgtcacataccagcccctctggctcctaagatgggcagtactgttttctcaaaggtagtgtctcttatatagaaagacccatttaatatataccattcatttgtagaatacttactacttacaaggcactggtgattacatgtgaatccaaagttattttttcatggtaattttgcatatttatgtagcactaattggtctgaaatctgaagttctcataaaggttttaaactgtgggttcgaagctcctgaacagttccctcaaccctgcctacaaaattgacacaatgaactaagttactataaaaaaattagtatttttatttctgtgtcctaacaagaagggtgataagtatagacaataatatagttatcaaaatcaatttgcaaaattaagcaatggaaatacaatttgtaataccaacaccaaactgataagattaggggtgaatggaaattaattttacaatatgtatattcaggatatgagcttgaaaacatactagtgtcttctgtgatgtcaaaacaggtctgtattaaaggttttttcctacctttgcttgcatgtatgctccaagtggaagaatggataagaaaaaaagatctcagtcctaaatttgtgttcttccattggtgttaggagataactaacaaggttttgattttagtacagtgtctatttgtgtcaagtctattaatcatgttgtcctaatattctatatcctactgactttttccttatctgttactgagaaaggaaagtgaaaaatctcccactatgattatggatttgtctatttctccttgtaattctgttaattttgccttccatattttaaggttattttttaggtgaaatattcaattcactaggaagacatcatgattctagatctttagctaaagatcactctgaagtgaccatctatttgtgcaaagacttttgccttcaagttatttttttctatcctaaaattaccacagtggcttccttttgactagggcttg

SEQ ID NO: 83 - DNA, 263801 bp, Homo sapiens
  source 1..263801: mol_type = genomic DNA
aaactggtccctggtgccgaaaaggttggggaccgctggcctgtagtattcagtatagtaaaatgctgtacaggtttgaagcctaggagcaattgactattccatccagcatagctgtgtagtaagctatactatctggttgtgtacaagtacaccctatgatgttcttacaactgcatcgcctaaggatgcatctcttcaacttctcaccgtggttgagggatgcatgactatatatattttcaatttccaatcagctaggaatcacattcctgtaactacttgattggatatttttggttgtttgttcaccagtatagcaggcaggcttttaagaataataaatccataaattagattaaaatattggaccatattaatggttggtgctatcaggaatggagacttactaggaagagtttagcgcatgttggaggaaactcaggaaaaaaaaaaggccaaaagtaacacctgtgaagtaaggtgaaagcgcctggagctatttagccagaaatgagttgtggtataataactgtcatagatatgtatcagaacatgactaattgttgttcgtctttgctgaaatctgaaaagaaaaaagttcaagggtagtttaagtgatgtatgtttaatactgagaagaagagccatgacagctgatggacaggacataagaatgcttatcatgggatacatctcttgggaagagaaaaagggcttttacatgtagcagtcttccctgtcatgaatgaggacaggtcctgccttaaggcagagggtttactagttggcttccacaaggcccttctagaactgtaattctgagccacttcagatgctgagattgaactcgacacagccaagtatctcctcttttaggagctccagcagtgccgaggaggcagtgccaccagcagcgacgacagcatttattccaactgaagacttcactcaaaggtgagtcaggtcagtgtggacctgggcgcttccttttcctccagctctcactgggtccaggcacaggagccctgagggatcggcgaccacagtactccctccccggccaccaatataagctttgacagaggatggctggttagctggtgttaggtgggagggactcgccacggagacgcgctcaaggagggatgagttgcgccaccaccacctaggtccctctctcgctatccggcggggccgcccggacccaggtgctgccagggtacgcctggcgcccgccatcccagagcagcgtcccgctgcgcacggtctccctccagctccggtccccgcgggagggcgcgtgggatgatgcgcgggtccttgtgccttccccaagctccagcatccggagccgccctagccggcaccgcggcagccacagcctgggagagagaaaggaaagagggagggcggcgggaaaggctcggcgcgggaggagggcgggtgaggagggaaggagcgagggggagggagcctctctcctcagcggtgcagctagtctccctccagcgggcggcgactccgggttccccctcgcgccctctcgcagaggctcgcccccttccccgcccaccgtccctgcgagcgcgggcggcggcggtgggcgtgtgcgcgcgtgaaggacgccgcctctctctcgctcctgcgttcgcaggcggcggctggcggccggcttctcgctcgggcagcggcggcggcggcggcggcggcttccggagtcccgctgcgaagatgctcaaagtcacggtgccctcctgctccgcctcgtcctgctcttcggtcaccgccagtgcggccccggggaccgcgagcctcgtcccggattactggatcgacggctccaacagggatgcgctgagcgatttcttcgaggtggagtcggagctgggacggtaaggcgcgggctccggctggggaagcccgcggcgtgcactgggggttgtccctctcgcagcgacggctcggagggtgcgggagcctgccttcgtgcccttcgatttctccctacctagttagtgtcttgagagagagctaaccttcattcaggtgcggctcgagtccttcccaccccaccagagcgcctaggccggtgcagctgtaggatcagcccgactccctcccaccttccctccttctcgcaggctgccacttcccttgggtgacagctcccaccgcacgtgggccctgctttcccaattgatatctttgctcacgattatagcttgccagagggtcctgtttgtctagttattgtttagggtgggggccggagggtgcccctccaaatcaagacagaattattaagttagattcctcctccttcccctcgtcaagctctccaaagcaagtgacacgagaaattaaacttaaatactagcttccctgcagagtctgctcaggagtgaagggagaaatgaatcatttaagagagttgaaggcagaataatgaactagtgtggctttaaagagaaagcagcatatgggatccaggcagtggtaattagtgagaatgctgctgcttcccttctttcatgggctggagtgatttatttaaattatatatgcaacagaccatctccctaggattgcagatatgtcccctatccctcctctgaagatccaaacaggtagcagtttggccttctgcatgattccatatgctttcgtatttgtatccattgaaaattatagttttctttcccttacttcctttttttttgtcttttctctctgttatccataggtaaggagatttattttcaacacttattttagatccaggctctttagtatagggaatctgaagatgtaatttcaacggttgacaagttgcagcttctgtacttactactcctttgcaatttcatttttcattctctttttgctggaaatagtattgctaacagcctttttattttttcaagtcattggaggatccagagcaggattctggatgttggtatttagtgggaagatgtaatgatcactgcccactctccccccactttgctagtactattgaaggctcattgaatatagatgtgtaaaataggcaaacttctgaatgaaaattcagtgatttgtcactgttaaaaatgttttgaagtatttgagcactgaataatgtatacataaacatccatttttgatcaagtttttcagtattcatctgaagatctattatatatataggtggaaatgaaaggacaatgatgtcgatttttgtaaggtccaaaacatgcctgttattaattgtatgatgcgtgacagtggaaccatgtaaacctctgagtaaagggatgatctacttaaaattgtttactgggtgttttataaactactgtgtagtagaggaagtgcctgatgctgctgcagggactgtcccagtagcacatctgttttcagagtaacattaaccctagatgcctcaaataggctgacttatccacacacgttgtctttatgaataagcttcatcgtcatgaaactcaagaaattcactttaatttgaaaaatgggaaaaaaataaactgccaattgtatacccctatgagatggtagcctgcataggaaaaaactgagaaatttgaagtttgggttttttatttttcagttcagaattacgtgttgcagtaaattttggaggacaaatattaatcggttatacagaagcttctcaacttatgatggtgttatgtcccaataagcccactgtagttgaaaatatcagaagttgaaaatgcatttactacacctgtgctaacaaacgttgtagcttagcctagcctacctgaaacatgctcagaacacttaatattagcctacatttgggcaaaatcatctaacataaagcctattttataataactgttaaataccgtgtacagatgggattttgtagacatggtgagatatgaaacacaaaacacaatattcaaaaaacactgacaacagagaacactctagagttccggttgtttaccctcctgtggttaactgggagctgtggctaatggccggtgcccagcatcagagagagtatcctaccatgtatagttcaggaaaagatcaaaatttgaagtacgatttctactgaatgctatcactttcccaccatcataaaagtcgaaaaattgtaagttaagcccatcctattggagaccctctgtctatacattgctaagattctcgctctattatctagtcttatgattactgtaaaagatcacagagttaaactacattgaggaacaataaaagctaaaatgtcttacttaggctctgtttgtcagcagtaaagcgtattgttaggtaagttttctgtacatggcagcattcgtggggtgcatgcttactctggctgagactttgagaagtatcattttcattatcagaaatttttaagtaaataaacttaaaacatcaactactattctagatataattattaagaatcgatagagccagagaatgcaacagaatgatgatcgtagatattggctgagtgactaaaatcttctttcttcctacactagagatcaagttgaactcaggtcatcagtttcaagcctttactctcagctttggaccaaatccacctgctagtgtgactctaattcattagtaatgcagttgtcattaatatactaagagaacagtgcttctggtgttacgtgttgctgttgtggttagctctagaaagtagacagtctccaccagaattagtgatttgttggctcctccattacagttgtctgttgtaaagtagtgactcctgattgcaagaagattggacggtgaccactggggcgatacaccctgaggatgtgtttgggaactcaaggggagctaaactcccaaggctatatccacctgaagcccctggatagtgctggcgaaggcaggtgctggcagcactgatccacatggagccattgagaccaagacagatgtgctcactttcttttggcagggagggcatagagtataggggttacgggtgaattaaaagtatcaggcaaagtaattttcctaaaatcacatttgaagacactgttttgttcatagagtttttcaaaaagtttacaaaaatcatgacacacacacattcaactctacttaaaaatacgaattggccatgatcctattcagggctccagatcctcgagagcagttggtcttttgcccagtgatttgagaaactggcattttaaaggcttttctgagggagaagggagctgcctctggtccagatcccgcccagtggtttggcacatggaatgacaggaaatggcccagcctgcttggtggtgcagatttcgtctgtgcatgcaaacccatgtcctgttttcagttgtctcacctttagtttctcactgttgttccatgttgaaagaaaagatgataagaaaaccagatgtattcccagacatacaaatccaaggaaaccaaaccaaatgaaagataattagaacaagagaagaatgtgttaaactattttggaaccttttttttctttaaatttagttcccattccacttactgtagtttctttaggctaggcactttgcatactcctccccactgcaatgtaattttaaataatacatttatgtgtcacatttatgtaaacacaattatgtgtatacatttataattttaaatacatttatttgtcaactcaattaaactaattatataggatcccttgctatatgtattattgtttaggaaccaaatagatttccatagtaaggggtgtgtgtgtgtgtgtgtgtgtgtgtgtgtgtgtgtgtataaaacagaaacaatttcataaaacagtgtttattcttattaccagcaatgcactttaatattttctattatatgctgtttgatttcatctattttgttaaaaaaacttggctgaacccatgtgatttcacatcccactaatgtgttgtgattcagtttgaaaagtgctgttgtaggccataaatctgtgtgtgatagattaagctatgaggcagagtcttttaaagaaattccctgcagaccaattggcaacattgggtggtatccttttggcacagccctgtagagaaaaaggctcctatctttgcctccaggtcattactgatttttccccttctaaacattttggaaaaactctggtgtctccctaaggtctgctgggcacacagtaatttgaactggctaagagtgccaggggctgtgttgggaaggaactcagagactgagaagtggtatattctacatggtaacatgtattctggctccaggtcacagtgagcaaatgctttctataaggaaacacgaaagcgtgcattttctaagagaagggcttcagccaatgttcttggcttgtcttagtgctcttggctctggttgatataacaagatgtcttagactgggtggcttaaacaataaatatgcatttctcacagctctggaggctaggaagtccaagatcagggtcccagccaatgcatttcctcagttaggactctctgttttgcagatggctgccttctcgctgtgtcgtcacaaggcagagaggaagagagaaagagaggggaagagagaaagaaaccaagctctctggtgcctcttcttacaagtgcactgatcccacgatgaggggtttagctgcataacctcatactaaacataattaccttccaaaagccccacctataaataccatcatattggagttggaataaggcttcaacatgtgaattttgaggggacacaattcagtccacagcatggctgctgaagaaacagattctccttttttttggtcaaccaatttcctaaaccattctcgtgaccagagcttcttagatccttgattttttccgacaccatgctttagggccccatggcctatctgggtaggtatactgctggcttctgatctcctgctacacacactgcacttagaagctccagctcttgggggatggtaggtttttttatcttactaggaattaaaaatatacttgtgccaaccctgtcttgttctctgtgcatctgattcttttctcaggcagttgactcaggagcaaggtgggattgcaagtgggagaataaaaactggggcttcatagggtcttcccaggaacactgactgtaagcttccagaaggcagagtctgtgggtttggctggttcactattatgtgctcatgtctagcagagcacttagtacttaacaggtactcaacaaatgattttaaagagggtgaatcaatgataatgaaatgggccgggtgcagcatgtgtacccgcttcctcttctttgaggtcttggtcctgatgtcgtagtgatattgattctagtgaccctaggataaggagaatactgtaacccttttctcttctccctaaaacttgcctgacaataaccctaatctcaatcagcattggttttctttcttcagtgtgagtattggtagctgccacctctgtagcttgctgttgttaaaaataatgtcacttttctgttggcagagtgttttgtggctctgaaatgaaagggattcagtttcaccttcactgtcactttaccacaggtgtatcagaattaggagttaaatcaagttggactaaaaggcatgaaatgcctccaagctataccatccactaaagttaatgcatagtaaatgctaaatttggaaatatactcactgtaaaaaccttaaaatcaagtgaaggctacgataacatcattgctttaagagcacactacttttccatgtttaaatactgtcacaaggttaaaaataactccagattttgggggaaaaaaaaaaaaaagacacaggtgccatctgcttctaaactgttctggagaacttgaaagagagagagaaaaagaacactaaccacaaaatagcttcaaagaactttcttgtaaacactttaccctcagacatatatgtgtgggttatgtgtttgcagtaatacatttaagaacaaagtagtgttagccaagtgaagtgtttcaactactagttattttttgttaatattttttttctttttttcctctttttttttaaaaaaaataaagggttttttaaaaactcttttgggaaagctacgtatctaataaacagaatattgattttgtaaaatttcaaggtcaaattcatactgcaaaatatggtgtttgaggcaaggaaccatgtaattcaggacaaagaggaacttttcatgaagttgatagcagctagagtcaaggttttactcaaattatattgatctttacctcagttttcttgatctatttgtagtacaggattatctgaagatttcatgactccaatggtttaattaggaagttaggtctaaatatcgaaggcatagtattagcacataaaggatgtggacccttcaatacagtttgtcagagattttcctcagtcattatcttgtcagtggtaaagatcaaataaagaaaagaacagtgtctggagagacagtgattcatagtgatgggtaaagggtaatgcaagtagaccttcctcttttctcttagactagggtttctcaatctaggcactatagacttctggcccaggaaattccttgttgtgggggctgtcctgtgcactgtaggatgtttaacagtgtccctggcctctacctactagctgccagtagtgacacccttataagttgttaaaccaaaactgtctctaaacattgtcaaatgtgtcccctctctcctcttgagaatcatgtcttgaagctagtgttttacacattttctttcagttatgtagatagtgaacaacaacaaggagattgatagattatgttaatttggctttactgagtatctgctacaaccaaatgtttctcccatttctatgtattaccataagatttctgttttatgtgtattccacttctgctatttgcttaatatttttatttaaattaccttattttgttaacctaaatttatttaccaagaatacaattttcactaaattgaaaactgtgaataaaagcaaattgtatatgccataaatagaaacaaattgtaaaaataaattgtaatggaaacataacatttttagtaaattatagctagacttgtccacatgcagaaggctgtaactctgaggactgatttcttccttaaaaaagagatgatcaaagattagcagagttaaaaccagagtagcacaaattgaagttttcttcttgatgtaatcagaatcattgaaaagtaattgaaaagaaaaggatgttctcgctctctcttttattccttgttatttaattccatgcgtttgtgctacctaaagtcctcttgtttataagtctaagcttttcaataattctgacctagacgatgtatgctggcagtgtgcatgtggtggggtaagggcctagagtgtaaatgagcatgataaatcaatatttggcctccaagtgcatagggtactactaataaggcaccaacaatatatttaataaaagataaattaatgaataagtaaaatgaataaaacttattagaaatctaagaacaatagccatcttcatgacagagttgtgacagagaggactggggtgtctttatgggggaggggtagactctgaaatttggcaggattttaataggtagagcactggcaaacagcatgtcaggcagatggtacattctaagaagaggcaaaaaaaggacagaaaaattcaggatatacatttttgttttgcaaaatttataaagcatgaacattgcaatggcagattgggtcagcagggtaagttgatgtcagaccaaagacaacctgtttaaaaaaaacaaaaagagtaggcttgtgtcacttgaaaaccactttgtagataaagtaaccattgtgagagaaaaacgtcagctatagaagcagctgggtcttgggctgaggttgtgggactcagaatttgccactacctataatgtagatcaaacatggggctagataagagaaaactgatgatgtaaatttttttttttttttaaggaaaaaacaatcccatagcctatgactaggtaagaaaggagaaatgttggacttagattggttacctagaccaggtaaagagtgagtaaaaagagacagtaagtattttaggcttgaaggccattcagtctctgatgcagctctaccctctgccatggttgagagaaagcaggcatagacaacatacagacaatagcacattactgtgttccagtgacatgtcatttatgacagtaaaatttgactttcatataattttcacatcacaaaatagtattcttcttttgatttttaaaaatgcaaaaattgtttttagattgcagactctagaaaatcaaacggctcctaggtctggtctgtggtttgctaacctagaccagtcaagctaaacttctgctcctccccagttgcatgagaatttcaggttaaaatgatatcaaatcttaacttattcaaggaactacctttagtctctctttcactttgaaaatgtcaactttttattagttttccacgtgggcacaagctttaaatgcatactcatcttttatcaaaatctactgaaactgctacagttacagttcttaccaatgtaacatgttggctagttccatttctctctttcttcctcctatttctttttgtctgatactgattatatgactgatgtttacttcacataatgtttgtgaaaatgaagagcctttattcgaagggcgtgaaagttaaatttccataccgtgaacaatgttcatatcaaaagactatttattggcgggtaatttgttttgtacataataactaaataggtttcaaattgataattcctctattatatttagagtgacaataatatgctaaataaattactgatgaaagattttcctctaactagtaaagttgaattaatttttccatttgctagtattagctgtgtgttgaataatccttctatatgctatgcagatgtctcaggtggataattaaggtcatttaaatgaggaacctgtttaagcaatcttttgaaaacttaaaattactccttttttatatattgaatagagttaaattaaatcagccactcatatttcgactatagcagaggtctataaggtgggatgcccgtagccagggtatgtgtaatacaatgaggtgctagaagaaagtattagagaatctgttttggtttctttttttaatttttgtctttaatttttatttttggatgttttaaaaagcacattaatgttggttaagtaacacatatataccattaataggtacgttagtgtacacagtttggaagcatgtgctcaaaaaacattttattggatggtgactgggtcaaagaatggtagtcataagtggatactgaataaacttctttatatttaaataacattctactttatgaaaagtgagtttaaagcaaatatacagataaatatgcaaacaaaaaatcatattgcaaggtgtgtctttgtgcagaaaggggaagtgggtacatacgtgcaactgttatgcatctcaagactacttgatgaacggttttgataagaacttactgccattgtaaccaaaacagtcacatagaagaaaacagaatgagagtaaaggaatacagattgcacatcaagcagagggtgaacttaactttggcttcaacaacaaagtttcagtggtcatggagttgagagggaaaaagagtagagaaatagggtttgtttgcaagaatctcaattttaatataactaatgcacttcgtggcaaattttgccaactgctggcttaggcagctaaaggcactgacctaaagtgttttgtggacagtacttgaagagttgtgggcattagtgccaggatgctgagcttaaccctgttagcaaatgtgttgttaccacttgcttgttaagtcatgtttcagggtagtatggctcaaaaatttaccaggtaccgaaatatttcatggaaaaaaataaagaaggctagatttgagaccaccatctgattggaatagtctctgaaaaaagataatggataggacacgttcttacctgttttctttacaagtttgtagtagcatgctttgttaaaagtgcactttctttgatatatgtcatgcctgtagacagaacttgactaatattataaactggaacatagaagtggagaagataacagatctataattgtgctcacacatgtcttgttacctacaatgaagtatttgaatgatgtctccctattttaggtctttatggactgtttaatagagaccttcacttgcattttacttttcattgctcagaatgttgcactgttagtttggtttgccttacttttactgatttgaagggacaattcatgactactttaatttagtaagcagctgccttccacttaggactctaacagacacacaaagttgttctttagttgcgaaaactgctctaagattagtgtttacctggattttcatatttgctgcttattcattcaaataagtcatttttattcaaagctctccgtcagggcaaccactgagaaaataagactatgctattaaatgtgaccaaattcaaaatatgtaattcaataaatcagcctggcctagagtgttcagttctaataggcctctaaagggttcttcttgactggaaacattttagtgactcctgagggaccctgggctcttcctctctttttcccctcaatgtgaacatgtacactaataacaatgttcaatgaggtaaactcgtgagctctctgagtgcaacctgtaactggaggcaaactaagaacgtaataaacagagcttatcatatgtatgtgtgacacaccaatgaagtgggaacctgagaaaattttcaggatgatctccagaaaaccagtgcagttctttaaaatattgacctactgaggaaatggaatgtcaggactgagctaagggctgttgggattgggggaagtggttggcctaaggatctggcttgggccaggcaagggcagcagagcgttggtccgagcctgagccaagtagtggaggggagtgatcctcggggagccacctctaaggggagaggtgggtgaggcagctactcagggtggctctgaggcggggagcaccaagcaggccattctggacagctggattggtgaagatgaaggtctgctgagcaaggcaggggctaagacaggaacaggcaggacacaattgttacttgacggccctgcctctttgggcataaagccccgcacctcactcagcttcatttgtaaagtgaagattgtggtagtgtgttctccacgtcatttctgtgacaatcaaatgagatcacaaatgtgaaacactgagctccatacccagcacataaacttaatattattccccacacaggccacaaggtgggaagtaggagataatgactcccacttgtgtattgataggataaataccttacttagttcagtttatacagccttgttagcaatctgagctcaacttccaggccagcctccttccccaccacttctcttctgtaattaccatcatgggatatttactaggagcttggtgtgattatactgtctttaagtacgttgctagttagttcgagaatactaccaggtgtttatcaccagcaccaattcacaaggatgagcctgaggctcagaatggtgaagcaccttgtctaagctcacacagccaggtggagaggagcagagctgagattcaagccctggtttgtcagacttcagcactcatgctcttttgctctacctgccttggctgcacagatgcctcagtgatcttcatatctctgtggtgttaagcatgaaactctcttggcctgaaatgtgcctctcctatgaatccctccaggacagtcatccacctcaggtagaaagtttctgccctttccccactcacaccatttcataattccccatctccagtgtttatggtcttacaggtgaatgctttgtcgtcttcaccaccagaacatctgcttattgggcagaggaaccccatatcttatccctcttttattcctactactaggcccatccctcagcctaatgcctgcctccccttaagtgtttctggaacattatgtgaatgaacaaatgtcagaggaattaggcaaatagctgcaagaaaatcagcggtacttaaaactgtctttcttcaggatgtttttttctatacgaacccacttctaaactagcacaccgaaattacttgttcagtacgtgtctccctctcattagaatgtaagctcttgaggctctggtttctgtccctttgttccctgctgtgtccccagaatcttagcacaatgcctagtttatagtgaacactcattacatatttgctgagtaatatatcagttgcacccatggggtttccacaattgaaactccttttgaacccagggagctctggtcttttgtcagtcatctctatcttaaagagcccccatctctaagtgatcagggatactgtcaccttctgtgaggagattatctacctctaagatcccttctagtcccaaccatgtgtgcacctgcgttttcttccagttgaattctctgggcgatcaccttagttctttatgttgtttaggagacagagcagcttttgaagtaagtagggctctaagcctgaaaggctttctaagtgtgttggaggatcctcacataaattttattctcattttgtgctttctaaatgcatcacctttaaaaaatgtacctattgttacattcactcatttgtacttcctgctgtagactatacaaatgctagcactagttgtagatatctaggacaagatttagaagaaagtatgtttcctggcttcctctacccctctagttttgcttttagaaaagaatcattctttttaaaaagcttgacttatgacctatttgtggctatgtaaccagttagcaatgtcctgtcacatggttgggtaacatatcccctgacttgaccataggaggggaaggaagacctaaggagagggtcttgaaggagataagagcataaatagtctgttccatgtctatctatatttggggatattatttaaaagccatctactgaaatgcttaatcatcgatcaaaaagaaatgcagcttgacataacttccaagtagggttattaactttacattcctgatgtttatgcactgtcaaagtaattattctggaaatgtgtaccttcccatctttcttttgacaaccagaggccaggggagcgtggtgaaaggaaactgtgggtgggaagcagagaggcagacacagggctgaggggcagaagggaggccactccttaccagctttacttcttgttttctgagtccagttacccctaggcccagagcacttctccgtcccctcctgatttctccctgtttccttcatctctccagagcctaggtaccagtcatttccttgtatctgcccatcttatggaatgaatgtttattcctccaaaggcatgtattgagaccctaactcccaatacgatggggtttggagatgtgccttcggcagaaaattaggtttaggtgaggtgatgaggcattagtgctcttattaaaagagttgtgagagcttgctcgctcgctgtctctcatcactgaccatggaggacacagcaagaagtctgcaagcctggaagagagttctcatcagaacccgaccacactggcacccgattgcagacttccagccctcagaactgtgaaaaaaatgttttttttttttaagttaagccaccccagtctgtggcactttgttaccagccagagcagagaaagacagccctgtacccttttcccccatttggcacctgtctgacgtcgcagtttgaggagtgatctgctcttctttctcagatgcctgacatttcctcccagatactgggtaaaggaggccagaaccccacttcacaaggagtaaagctccttacttgttttatctaggatggctaaagctgactctcagaggctcttcttttttttttttttttttttttttttttaacaggaggtgggctccctagcatgcctccaccttgccagaccctagactgggacaattcttctgtggctacatccccacttccactcgtgccttccaggcactagcaccttggatcccactgtgcatccgtacctgttggctttccaagtgtcaatgcctgccagctcctggtacattatttcctcagcagctggcacgggattttttgttgccaactagaagctcagctattaaaaaataaaacttggcgcatcttgagtatcatatgttttcatcaggacttggatctgtattctggcacagctcacacgatcactttggggacctctctcaggactaggaacccagtattcctctgggtctttgaccgtgttttcaccttattctgaatatattctcaaaccttgaaaaacctatgatgcttacgattaattcgaggtctgttttacttgtgttttgcttggttttattggattttttttaaccttgtcagtgtttctttagcactaggttgctttctctggctgttattgtcagttttctatcttaaattataaattcccgagaataagattcatgtttctcaggttaatgaatagctaacacacaacactgaaatggggacctttactgcatgtctttgcatgaacatgaggttatccaagaagggagatttttatttgcagggattgttaaatattaagataaatgaaaaggacaagttttggagttagaaagacctgcaatagagtcccagttcggccactcatgaagtgtgtcattttagacaaattttcattgagcctcagcttctccacccataagaagagataataatgattaaatgaggtcagtgcattcattatacacggtaagtgtccagtaagcattagatattatcgatattaattctggaatagctgtctgtaaaggtggagggattctaggtgattggatagcacactttctcaaaaatgtcataagattctaaaattctggaaatgcgttggcaggaggccttagtaattctctgctactgcttgcagcttctgagtaagctttctgagcatctaagcttcccctttacccaggggtagtacatggtgcaatatttgtaaatatttgactactgttttttgatatttcatgtattgaaaagaaggtgtagtataaccgtaagattttccacatctgcagacaaaaggaaagttggggtagtttaaaataactgctgcatgtggttctttctgtataatttttagttttttttcttctaaaagggtgttagaaaatattaatctttttgttgctttgaggtcttatttacactaactttacctcttcttcatagattaatttttcattctaaatgttgcattcttcaccgggaagttaaataaccaaacccagaatcactgcaacttacctgtgatttagaaatagagttctggaaatcatttaacaatctaaaaaaaaaaaaacccataagtagtaaggaatatttgaaagcagtctattagtttgtgcacgctgataaaacaatacatcacatggaagagacttatatttaaatgatgttactattagccatacctaaaaaatgtatttctctaacgtgatacctaagttgtaaaagaaagtttgatttccagtttcatcttacatttcttttatagctgcttttaattgtcctaccctctcttctggcgaaggaacttcattgcagtacttaagaaaacaaattaataaccttgaagaaagctgttaatgagatactcataactaaggaaaaaagtggggggatagaaattagatgacctaggagacaccttacttgagtgtcatttaggtaagggtcattcattctggaaggcctctcggtaaaggaggagggattacaaatgattggatatcacagcctttcaagttgttctctgattctgagatttcagaaatgttttggctatagggcaatgctaagagtcaaaagcagggctgcagcccacattaaataaccctatgactttagtagatattaatagaacccccagtggcaacgatggtggtacaaagatacattccaactctggtacctagtagctgtttattgttaatgaatcttttaaattgtaacaagccccattttctcctctgtagaatgaaaatactagtgccttttttcacaggattattgcaaagattaaaaaaggtaaattctttgactgtagttaagtgtaaaagctatgcacacactgcaaatttttatttgaataataataattatgacttttttttttttttactattaactaaactgcagattttatttgaatttcaccagcttttctactgatgtcctctttctcttctagggtccagtctaggcaaatatattgcatttaattaccatgtcttccttgctcagtttcttagtctttgcctgtttttcattaccttgaaagtcttgagcaatactggacaagtatcctgtggaatacccacccccagcccctatgcccccagtctggatttgtctgtcatttctcatgattaactggggaagaataccacaaaaatgaagtgccctccttgtgacatcgtatcagatgttgcacgatgtcatgtgacatctctatggatgtcaacctctgtcactttccaggtttctccactgtacagttactatttacctcttttcttactctatctagtctttggaacttggtgactaagtctagctcacccttggggaaaaaggggttaaacttcactgcccagagtggagaatatctacataaattgcttatcgttctgtaaggaatatttctgaggtattattttataactgataaattcttatatatataaaataatgattgaatgtcttaagtcatttttgaaaaatcttgtgaaaatatactactgccagtaaatcatgcaattgggaatgtactaaccagtgagaagctttgaatctaataggagaagctgtccctggaatcttgctgttacagagcggagcacattggagctgagggctcaaagggagggcctgaagtcaggtctgtttcatcttgacagaggtagatcagctctaggcaataactgatttctgtgtatgtcttgttggtgaataattcatggcaggaacagcccttatttaagatggactgttggaacttcccactggaagaccacgcaggcaactttgacacaggctattcgaaactaactccatcttccactcacccccaaacaacagccacaagaaaacctggtgtcctgcttgtgtagcccacctcagtacatgttacccccatttgctttgctccttacctagaaatccagcggtattctggatttctccttcaccccttcccctaataagacatattctcccacttaatacatgtataaccctgggcaagtcacttatcctttctgagtctttgaaggggtataataataatctcataaggttattatgaagattaaatgaaacagtgtatcataaagttccttggcatcgtacctagtatatttcacacattcaataaaggttaataggtatgatttatatctcttaaatatactttaaatccgttccctcctctgtgtggccactgatctttttcatttacatcatttggaactctttcctaggttattgcactggtatttaaatcttgtctctaatcttattgcatcccatctgcttgtaagatgacctttctaaggccaagtttgataatgtcactcccctgcctaaaatcctttaacatcttccatcccatccaggatgtgaaagtcctttgcatgaacagcaggtcttttcagaacagccgttgcgcttgccgtcttacgcccaccactcctgcgttctcacctgggctccagccctacagctatttttcctcacccaggatgtgtcatgctgtcctgtgttcttgtgcagcacctccatggtgcaccttcccaaaccgcgccccctcactccacgccccctctttctacacccctcttccatattttgtaaacaccttttctgattcaggatagtgcaggtgtcatctcgggaagccctgcttggctcagatgcaggcagcctgatgctctctctgcctctactttttagtgcactgtggcgaggtcctgtctgcctctacacctggattgggagctcctctaagactttttagttcccatgtacctccacagttccgggcagatgtttaaaacattattcaatgacttgtagtaaagcacagtaaggcagatttcactcaggaccattgaatagggaccactgcaatggggtcctgcagtggggaagagaaagattgggcttaactccaaagacagcaagggcaagtgggattttatagccaaggggcaaggacagtggatggaaaattactaagaggaaacatcggtgatatggggaacctgtggttcttcctgaagatagccagggtgatcaggcatcacctggggaagagtgaaggatgaggaacttgatcagactctgagtgtaatcagacattgagagtagtgggttattgccagattgacttagcaaggttcttatgaaaactgtattgtacaaggaagcacacagatgggcgtagcagaaggctcaggagcctgactaaagttttgtcaagcaaagaatctttgtcacacagggtagactaaaaaaatgtttactgcctgccagttataggttctatcatgactgagttaacctaactggaaattttactagccctatcatgggaaaggctccaatttccctctctgccaatatcttcttgttttttgtctgtttgtttttgcaccttctgaagcctattgagaggatgaggaaggattcaggcaagtatctctgggagtctcctagccggcggttctttcctgtgtttacaaaggggcactgctggggaatgtcaagcctcgtaatgtaaaaaatactgaagatattgtgactgtatcttgtgcctatagctgcacgaatgcaacatgcattcatcttcaccattcttaagattctgacttagattttttcaggaacttagagctggatagaactttaaaattcaaccagtccagtgttttgtttgtttgtttttgtttttttaatacagatgaagaaaccggagcacagagaagtcacctgtcttttccagcccttcaaaactagttagtagtagaaatggaaccagaaccttggtcttctgcacttttgtctctgacgtacttcctttcttcacaagtgccatttacagaaagctgggcttaaaccattcccagctattcctcctacagctttcctgaattatttcagaatacaaaattctgtatctccaagaaactattacagatttagatttaaaaatatgcactattttctaccttgtatgttttgcttactatttttttttgcagaggatatgtcttaaaaattgaaatgcatcaaaaattattaaacattgcagaatattttatacttgtcttcattcccattttggagagtgttcaccttgtaaaaaatctttgtcctcaaatgtattggaatcacagttaagaattctagccttgatgttggtttgcattgtcttctggtctatgagtgatttggggctgagatattctttgtcatacctctttgaagatactagttaaatatgctagtgtcccactcacttttaaaagctgacctatattaaaatataacataaaatagtctgggcgcagtggcacacgcctgtaatctcagcactttgggaggctgaggcaggcggatgtcgaggtcaggagatcaagactatcttggccaacatggcgaaaccccatctctattaaaaatacaaaaattagccgggcatggtggtgcgtgcctgtagtcccagctacttggggggctgaggcaagagaattgcttgaacccgggaagtggaggctgcagttagccgagatcgcaccactgcattccagcctgggtgacagagcgagattctgtctcaaaaaattaaaaataaaataaataaataaataatataacataacataaaataaatccttttttgtttctaactttctgactctttctaactccaggaaaagtgaacgtttgagcagatggattgatgaatatattgctagaatatttagcagaaatgaatatgatgaatatattgatggattgatgaatatattactagaatatttagcaaaactcacatggaggtagtacttttatggggcttgcacatgttacaggactaagcttactttttacttttttacagttggggacatattgattccataagttatttacaagagaaatatctttgatatttattcttaatttcaattaatactgccagcacccaatttgcattaaatacatattcttctcttttcttctttaccccagtcagtaatttcactgactatggtgataggctgtcaagtaaagctttaagtttctttaactgataagaaaaattattttaatttattgttgataataatagcagaaatttttattattggtaaaagggaaaattgcaagtgttgtcttttattcacatgcctatatctaagcttgcactgaaaaatgtggatactaatacattttctgccatatcttttcttcctttcttggtctactttctctgacatgagttacaactaccatgttcatatttctctcaaacagctctactttgaccccttcaatttggttttttattctcataattccattaaatagcagcaaatgagtttcacttgacttctccaactgattccctgatctaatattttaaacctgttaactgtgtgtaaatttgttgataatacagattgccttaactttttgaaagtggtaagatgactgctgtgtgtgccataaaatgctgcgcattcatggacaaattttctgatataaacaaaacttaacacaaaactgttgggtgtgtacgtcataatcatgtgaacaaacctatcagccacaggagtaaatggttctcacaaatgactgcagtttgtataacttgtgttcagccaaagcatgtttctatttttattcttctataaccatttatagaaagcattgatgttaacattatttttctgccagccaccatatagagcagggatttctaactttaatccatagatcttcctgtgactaggttttgggactatatgaagcttctgaaattgaaagctatattttatgtgtggacgtgtttttctgaagcaagtcaccacagctttcatcgaattctcgagatgtttaaggagcactgatgtttgaggtttgttcacataaatgtatttgtacatattctcagaatagctggaaagcacaaagcttgtgctcacctattcatttaacacactttttctttcgccactgccctgcccagtctgtctacccccaagaagggctttctgtattcttatattcccagtttttactgcttctatgttcccttttatcagttaggatgctttaatgtacaaatgtaatttaataagtaaatactgaagcaccaaaagaaacctagctgagatcatcttaaccaatggaatagatttattggctcaagtcactaaagtccagaactttttcaggttttacatgcagttcgacttggtacagatttatttctctgcatttattttagctttgctctcccaggtgtgttggttttgttttcataccagcttccctcatggtagcaaaatgcagcatttaagtcctcctactggcagccaaccatcatcatccaggacagtaaggatctttacatcctcctattgtttaatgaagcagaatccaccatcctggccagggggatgtctgtacactaattgacctaggcccagattaccaccacacctaaacaaaccagagacagcagggatgaggttacaattgttggtttatgtcattcagggtctacttttaggactttggcaaccccaacttttgtgagtgtgtgtgcatgctgttagaaaacatgctgagcagcaaccaataatgtttactatatcccttaaattaagtggggttccagcatacagctcctggtatctcattatagttatgatgtgctgcagaagataggattttattgctgtagaagatgggaatttattgtgtttcctgaagaaggttatggaaaacattagttcctcgggatgttttatcaatcagagtttagtagagaaaaacagaaccaataaaatacatatatatattatgcccagctcatagtacacacctgttaaatatcagctactactgatatgtatagtatatgtatgtatgtatgtagtgtatgtgtacatatgtaaaaatagtaggatatagcctagcaaattacatacacacacattgattcatttatttttatttataaatattttctatttatattaaatataaattatttttatattttatatttatagctatataaatttataaagaaatttgtaaataatatttttaataaacttataaatggaacttattttatatttatatataaatttatgtatatttatacttatagatacataaatttataaatttcataaaatttaagaatggttttaaatttgtaaattgattataaatataaccttataaatattattttatttataaataaatgaatatatttatttttttcaaggaattgggaaggctagcaagtcagaaatctgcaggataggccagtacaatcgaaagtctggagcgggaactaatactatagctttgaggtagaatttccctttcttcaggtaaacctcagttttgctcctaaggactttcaactggttggatgaggccaccccagataatggaggataatctactttagtgttgtctaattgtagccgttaactgtatttataaaataacttcatagcaatatcaagactagtgttttaattgaataatgtgctactatagtttagaaaaatttacacataaaactatcacagatgttaataattataaggccaaagaagtactgcgaggttaaatttgagaaatggtagattaaggattgctctagaattttccagtctttaatgtgctcaggggcattgtggtttttaactgtttctcatacttatttgatcaaggactttttgttcccctgcagattatctcactggactagtgttttacagaatacattttggaggggctttactataattcggttctattttacttgtttgtatgtttctgttgtttgtgttcttaaatgtatttatgtctgtttctgttctgttaaactgtaagctcctttggaatcatatcttctgtcttcttcacaaagtggaaatttaataaatgttgactgagagatatttttaaataactaaatggttattaactcttgggttaatgattttaatatttgttcagagctatcactttctcttggcagaaattaaattgtaatagcttttaaatgtttgctggtctttggagattttcttactgtggggaaccagccagtaagatcgagcaggttctatgtcctgggcatgataagcctcatcttagcacttactttttaatgtgacaggctataattttgtgtcacttaagaaattatttaaatccagagaaaacaagtcatgaaaaaaaaaaacaggacaagtgaaggtcctgaaagcgaatctggttttatttgttttgttttactgttttctcacagtatctagcacattgctttagtctcagtgctgcttggtatatgttgtgcctgattcttagaggagattaaatatttcctctggacaccacttaaatcccttcttattgtgatgatatattatcagatcaaacagagatgaggtttgctcttctgtaatatatcagtaatgtcatatggtctagagtctagatgtgatttagagtcctctccagagactatgaccagtaatcaaatcatgttgtggttagatccattagccaggaaaggcgtggagcatgaaagacagatctgattgtcacccataggtccctgaactgtatcctggatctctgttaaatcctctgagctacttcctattgcgggggcggtgtgtgggggggtcaccttaatctgtttgcatggatgtttttaatgtgtttgaaaaaacaaatcaaaatttgaagttcagtttaattagaaaagcactggctcaatctgaagcgattattgttttaaaataaccattttgattgaattcaaccagattatttaaaaaccagtttgtgtgtgcaagcatgaaaaagtgggcatattagtttcctattcctttcctcattgttcaagaaagagaggatttaaagccttctcttcatcaaataattgggtaaaacccagccctgtaaaacttgaaagtttccttccttccaagaacatagatgatctggaaattatctgttctacttgagacaatggcctgaaaactgaaaaagattataaaatataactgaaactgaaaatgttaaaaaatataatctaaatgttctagatgttatatattgtatgtataatatagtatttgaatataattatatgtattttaaataaatatacatttatacatgtaaatctaaataattataataaattatttttgagtatagaagttttgaaaatgttagataaacaaaaggctgactatgaaaatgactttcaatcccattacccagaaatggttactattcattttattcttggttcttttatatttgtgtgtatatatatatatatatgtgtgtgtgtgtgtatatatatgtgtgtgtgtgtgtgtgtgtgtgtgtgtgtgtgtgtgtatttgctttcacctaattatctcccatacattttattttagggctataggttaatgttttattagtttaagaatatattcattgttgattgctttctcaatatgcttttatataatttatataaaacataaaaacatatttaacatatttttccactgagtacacaaaattgcatacaggaggagcagctgatatttaacaggtgtgtactatgagctgggcacattatttttactgccctcaattctcacaataacctgctagataggtattattaaccttaggaaacagaggcctggggagaacagtaacctggccatttcatacaggcaggaagtgccctaccccaggactacctgattatctgtctgactccaaagcttatactctgtcttatggtctcttctgaagtgaattttctgtcaaatttactatgtcctagacaaaatatctaagataaaatgaaactaaattatgagcaaattggccatgcacacaaatttggtgttcagaacttgacagaggtaatgcatagtgcttttacatttcagacagagtacatgaatacaccatcaggcagctacagagagcttagggagagaatcatgttgctttctcttacctgattgaaggcatggtgtacttctttaaagaaggaagatattctctactgactcttcttaaaaatcagctttgtttctgataatgggctcaaaatatcagaggacccaaattggggactttgaggctagctggtaacatgtattttgctacccattttcaatgcctatgggctcattatatgtggactttgtatttctagaagaatgctgacatactaaaggtacaactccacttcccagtatactgtttctccttcttagaatgtcttcatccctgtagtatccatttttctttctcatatctgctttattctttgtcttttctattcttacctagatcctgttttaccatctttcttcttcctctctcagttttccattctccatcaccactatgatcttttctgacatccatttatcctctacatttcctgcgaggcaacatccaattctgagcccctacccttcagttttctcatattttaaaaaagtttatgtagagatggaatctccctgtgttgccagggtggtcttgaactcctggcctcaagccaccctcttatctcagcctcccacctcagcctcccaaagcattgggattacagggacgagccactgcacccagccattatttatgtagtacttcttagcctctccatgaatgtgactttccagcccaacagctgccttggctttgtaaatccttggacattctttgctatggcttgctatgcttaaataaaactggcttcaaaagtgggagacattgctgtatctgttagagttgcgtagctgtattttgtgttatccactcctgtaaggtattgcactttcatgaagtgattgttctgtgactagtggaaaggctcttgggttgtaagtagtctggttacattttactcctccacagtctgttgtgctctacacaagggcttttgaccaaaagaatgatatccacttcattcttcattgactaagacacttcatttcagaggaagagatttctttttgaattctttctctgaggatcatgtaagccagcagaggccttgtctatatgggtgtccaggttggtcttagaaatatacaagtgtattggtagtcagaacctaaaaaaactccaagacagtcagagaagagaacttcctaacaagacatgtccagtgtgtttaccatgttcactgcatcacaaagctggaaggaaggcagagctgggccagttacagccttatcttcattaagttctttctcaaataaaaaacaaatacagctatatggatttaatttgagaaggcctttctgtgagtcttcttatgtctatgcttttcctttgcttcttatttttttctttctccttagtctttccctccctttaaaggcttctaaatattaaattgaaatacatgagaatgtgatacagagctgtgatggcagggaaagttcaatatgtattcactaatgaaggtttcctggtacacaaggtacattgaggaaatccatgtttttccatctcacgtaatgttatgtgtatgtgactttgtggtattgtgtttggggttcactgacttttttttttaaccagtgtttatatcttattgctactaatgaactcagatagatttggtggaagaaggcagaaaataattatgagtccacacttgtgcgtctctgtacattttctttatgcttgtgttacttctggagtcgtgttagcataacagaaagcatctgggctagggcagagttatgggatgccaaggcatagtcatagttacagggtgccaagacactgtcgtattcatggcagctctgggaattacccctaagtctgtcgtcatacactttccaagaatggatctagttggagaagtattttaaacctcgtcagagtcacttgtcttggcttcttcagctgacttgagtggggactctgattgttggctgctgtagtatcatccgtgcctagagatacagggctcttgctgtaaataggatggcataaccataaaccatggggtgagtaccttcttatacatttttgtttagtatggagaagtgtggaggaacacaaagaaaactgcattcttccttgggcttttatgatatgaccagcattttcttacatattttctatagatcctttctcctaaccacctttaaatttaaacatacttttggggaacttgtggttgctggtagagttagtgtaaaaaatatcctatgagtcttataggtcccaaaaggacttacacgtaatactcagtttaagaactctacaatgatattcttagcagtaagctggtaactaacatagtaataataatactacaaaacaagttaatcataatgtaatgttaaccaaaagaacttgtaagaaaaactttgactctattatttgtgactcactacatttttcctggagaaattattttatccgtgatcctacagattttcaaaataagggctagataaggaatgtgtctgtaattaatgacagtttttggtaggggtgaaaacagcattgtatagactagaaaaataattctagtagtctacagattttcaccaatctgacaaatacttagcaatagcaagtgatgctacttctattgatgacagctgtgcatggacaatgcagaaagagatagagggctcaggctgtcagtcatgtttgcatttgtctttgctttcttatttttgtcaaacttgctttcttatctacagagaacttgtttcttgtaggttacttggcttccgctgattaaataactggagcaacacagacacatgtacatacacacatttatgttctcattggtaatggcttagtttttgatgtggaggtgggttaatttgacaaatgtctgcatggatggtaatttagtgcacctttcctgtcccatcatttttgcctttcatcttcctctaaaaggaccttcgggttctggcagctgcccatggagaagactcagagctgtgtgctgatggtgcttttctaggcagacctctcaagccagcagcaggtgccggctgccctgcttgccccggaacctgggaggagagacatttccagttccggacagggttgggctgttctgctgcaacagatggtcagcatttggttttctcagtcatgtcacctggggaactccaatactgttttatgttctgtttcttacttttcatttaaaaagaagcagaaagagaagcaccatgccatatcaaaatagctgacagcttccatgttgagaaaaatgaaagacaattttttgaagagaacagaaatgaacaaatgtacatggtgcatttgctaaaatgcttagctacaattttatgatgttgactttattccattttgtgaaaaacagaaaagattagctactgagaggttattgagtatattatatacaggcttttctttcatttttcaatagtaagtgagacaaaaatttccattttaattttctaatttgatattcatatatgcacatggatatttcttcatctgagataagactgtcattatcagcttcatttggttacataatgacaagtcaactcactatttaaaccattcccaaataaatttcaattatttaaattataaattatctgtaatgttatatataagcattttcttttcacctggaaaaagcatttcagaaatctttttgtgtgcagaaataaaactctggtaaaactaccatagtttaagatctgaatattgaatctggtttatgaaaaatagaagctcagaataaattatcattgtcttgattattcccgcacatggatgtggaagtgactcaaattttactcttaaaaggtctgttttggaacttgagggcaagggcctttgttctgccttctagggtataaccagctctgctcctgcttcattaatgtctataagtttgttacaaagacagaaactgacaggaaatgaatttagggtagggggcactgacacccaaagggaagtcactgtggacaagaccctctgggaggctggcagagattgctgccacgtggccatggcagtgtgcgctgtgagatgatcccagatgtctgcacagaatcccttcctggaggtggagagggttgacacccttgtaaaacacagggaacagacctgctaacctcatttaatgccttcacactctgtaatgccagaaactaatattaatatcaaaatacaagttttaaagtgtgtcagagatgatgttcatgcagaatgtgaagaaattaacatattgagaaggaaactgaagaaccaaggggtcagtttctctcagcattcacagaaatcttcctgcacatcccatctactcctgagtatgtacatttccacctgattgccagctcccccaggcgaaggagttgtttctgctaatcccccatcaatgcatcatgcacaccgctctacatcattaggcacctgcctttctgtgagtgatggtgataaaaatgaaactagccaagtatgtgtggatcattgggtaaaaagggtactgcagtcaggttctcgggatttccctggggacttttgtggtttggaggagctgtttctgtagtctgtgcaaatactgtgatgaggcccacatcagatgctggggggaaatgtgaagcacctcatggcagtagcatcacagtgagctcattgatgaaaaaagaacccaacaaaatcccagtactcctaaagctatactttgtccaacttttacttagtacttaaaaaaaaaaaagaatggttttatgtggtgtttaaactgggctgtgtatcaaaattccctggtgtaattgaagtacatttctgatggacattgtttgaaggtctaattttgtagttgcatgttgtctgaactactgttgatggccatgaagccctggttcctgagccttataaataactttggtctgcccatcctgtgccatcatcacttccattggatctgctcactttggtgagctatgaatggaaaaactcttcccaagtatcaagcaattatatttctccttacaaacagaaagtgttttcagtgatctttatgataatctgagtgggttttcttggattcatgcccagcaagtttatttttgtgtgtagtaggctgattttctgatttttctgtacatttctttgtagagtttaccgaactgtttatctttgctgacaacttcagctaggtcagagtttgtgtaaattcagtgaagctttaaaaaagccatgatctaaagttccctaagatctttattgctgacttttagagtcatgattttgtcacaaccttagctgagcctgtctcgggaatggaaacagcagctgaattgtgtgtttgcatacccgaagccccagaccattcttgcaaagcctccattatttgtctttgtagtctcagaagctttgcatttatggattcattgtatcatcattttatggctatttggagtctctgatgatgttctaattaaatgcccatttcctgctcaccactgttttataccgcttaaaatgccaacttctcccagtgtatttttggatatgtgagtaatgggttgaatcaatagtgttattggaaattaactgtttttaaggctaatgatgtaaagattaaaaacatttccccaaggtcagtttccttatatttagaatgcatacacacacacatatatatagctgtatgtattttgatatagactaatcgatcacagaattcaactggatatctcacaaaaatgatcctgtcttacatccataccatggctgctactcagtaataaaaagcaaaaaatgattggtacatgaaataacttggatggactcaagggccatatgttagtgaaaaaagccaatctcaaaaggtgtgattctgcttatataacactttcaaaatgaccaaattatagaggtagagaacaaattagtcgttgccagggattaggtatggtggtgctatggtggggtggaattgggtgtgatcacaaagaggaacatgagtgatactattgtggggatgtaatagttttgtatcttggttgtgttggtggtcagattaatcaacatgtgagaaaatggcatagagttacacacacacattgcacaaatgtcagtttcctggttttaatattactatgattatgtaaaatataacctttgggggaactgagtgaagggcatgtaggacttctttatactagttttgagacttcttgtgaatctagaattatttcaaaatattttatttgaaatgggccaatagttttagagagccctaataaaaatgagccttttcttaccaatcaatatcggtaataaatgcagtaattgactctcagagctagaaaagacatatagtattcacacataagtaccagaataatgtggcagcccaagtctttttttaaagctgtttatagcttctaatcttggcagcagcttattatttttgaaaatgtattaactaccatgggcacacttgtaaagtgatattcattgctcacaacagtatctttggtcttctgtattttgaaagtttaccactttggacagtaagagtcatgccagcaacattccagcagtccttcagacaaatccgttaaaaaaatagacatggcttttaagcagaaaattgaaactggatcttttctttacaccttatacaaaaattaactcaagatggattaaagacttaaatgtaaaacccaaaactgtaaaaaccctagaagaaaatctaggtgatactattcaggacataggcatgggcaaagatttcatgacaaaaacatcaaaagcagttgcaacaaaagcaaagattgacaaatgggatctaattaaactaaagatcttctacacagcaaaagaatctgttatcagagtgaacagacaacctacagaatggaagaaaatttttaccatctatccacctgacaaaggtctaatatccacaatgtacaaggaacttaaacaaatttacaagaaaaaaacaaccccattaaaaagtgggcgaaggacatgaacagacacttctgaaaagaagacatttagtggtgacaaacatattttaaaaagctcaatatcactgatcattagataaatgcagttcaagaccacattgagatatcatctcacaccagtcagaatgacagttattaaaaagtcaagaaacaacagatgctggtgaggctgtggagaaataggaatgcttttacactgttggtgggaatgtaaattggttcaaccattgtggaagacagtgtggcaattcctcaaagacctgcaaccagaaataccattagactcagaaatcccattactggatatatacccaaaggaatataaatcattctgttagaaagatacatgcacacgtatattcattgcagcactattcacagtagcaaagacatggaatcaacccagatgcccatcagtgatagactggctaaagaaaatgtggtacatatataccaaggaatactatgcagccataaaaaggaacaagatcatgtccttcgcaggacatggatggacctggaagccattatcctaagcaaactaacacagaaacagaaaaaccaaacactgcacgttctcactcatgtgggagctgaacattgagaacacatggacaatgagataccatctcaggggaacaacacacactggggcctagcacggggagggtgtcgggggagggagagtatcaggataaatagttaatgcatgcaggcttaacacctaggtgataagctgataggtgcagcaaaccaccatggtacatgtttacctatgtaacaaacccacacactctgcagtgtatggaacttaaaatcctggaacttaaaaatagacatggctttattggacattccaatagtacctagtctgaatgtctttttttaacagatttaatgagatatcattgatgtaaaaattatataagatatatttaagatgtacagcttgatgttttgatatatgtatacttcagaaaataccgcattcaggctgactaacatacctatttgtattagtttgttttcacactgctgataaagacacacccaaaactgggaacaaaaaagaagtttaattggatttacagttccacatggctggggaggcctcagaatcatggtgggaggtgaaaggcccttcttacctggcagtggcaagagaaaaatgaggaagaagcaaaggcagaaatccctgataagcccatcagatctcgtgagactgattcactatcatgagaatagcacaggaaagaccagcccccatgattcagttaccaaccccctgcccaggtccctcccacaacacatgggaattctgggagatacaattcaagttgagatttgggtggggacacagccaaatcatatcaccattacctctacagagttatcagcgtgtgtgtgtgtgtgtgtgtgtgtgtgtgtgtgtgtgtgtgtgcagtcttagccttgttggtcttgtgttatatgaacttgtttactttctgtttaacacttaagaaaaatccaaaaagatacgggtctctaatttagctaagaaaagtaaacaactcaatctatgtatgtcaaagagaacctaggaaaaacccttaaggaagtaaatctcaacatacggtatgaaatttatgtaaaactgtcagccccaaatccagggaagaaagagatttatgctaatttgtcaagtggtaactcattttgggattatgctatttgtaccttttccaattctactctcacccttctcccaatgaaataaaaggacacatagtcatagagcaagaacccataaaaagaggcagagtttgttttctttatcttccctaaacatacagaatatatgcttcttggagggtaaatacatttaatgttaatctctgtatctctcactcccataccttggcttttgccatagaatttaatatttaactactgacaacttaagagtctctaaataaatggaaaatgaattttcaataaaactgagagcagtcagagaaaagttgtagcaatgataaaaaacaatagttttctcagtgtaatttgatttgaagtatagagaagaagaaatgattttaacccaagttccctgaaagatatttgcactgaactcatgatattcacggaaaaaatacgaaagcaaaggatttgggcaagtttccaacagctcattggaaatgatcaggaatttactgtctttggaggatgggttgtaggtatatatgcagcaccctgaattcttttatccaggcaataacggtgaccccacatttattgctccaagtcattggtgtcctttgaaaaaatgccaaacttatatgtggtatctcctacatgttctggtttgaattaagaaaatgtgacttacaaaaagttcccctgtataaaactaattaaaagtattacaaaaggacccttcatattaacaaatgatttcctgtgactcatttaagagtgaattcctgtagggtgtgaaagtggatttttatagatcattaacaacctgacaggttctgggagcagaaaaatataaaacatatgtgttaggaaaaatgccagttgaagatcaatcaaaagtgacatcgagtgtttctgaacgctttagaagaatcaagcagaaagtaatttataaagcatttcttaagaacatatcgattaaatacacttgtacaataaattctttggtaagttctataaattcttttaatgtcataaataatagccgaaaagaattttgaaagacaaaataaatgtttctcttgttcccttgatgattcacattcctgaaggtcatgtctgttcacttgtgttcccccatcctgatctctcattgtcttgactgtctgggtcaatcttgattctgtctcatcaggtcactaaagctgctaacagtaagatctccttactgttgaatattggccaaattcaacagaaacattttcagtccttacattagtcaatatctttctggcatttcatagtcttcattatacaaaccttctgaaattcattcctttggccccacctacaccatgtccgctggtaaaatctcctgcatacctcattgatcctcctctgccttcttcactggtttctctttcttcacctgctggctaggtgtgggctttctccaaggctctcccctcagcctcttgtctcttgtcttcctatattttcagttataacccagtgttcttgtcttaaatatgcatctgcagtccctagctttcttctgagctgtaggcctgatttttgaatctgaatattttatcctcctccagaaacactgcctctcttcctgtcttttcttacacttccagtctctcaaggaggtagcctcaatcttttattaggttttgttcgttccttatcttccagtttactcccttatttcctaaccattaaagattcctcagatcctgcaccttatctatacccctactgctgctatcttcattgaaaccgtcaacctttctcagttatattatttctggaataacctaatatgtgtcctggtccctaatttcatctccttaacattcatcctcctcattgattatcttttatcctcaaaattacctttataattaaaatctggttgtctcagtcatagttcttaagacagtttacaatctgctctcaccctacctttcaaaatatgtaaataggctgccattccaacagtcaccttaatttttgaggcccccatcctaaaatagattgtctttattcctagaatgccctttctcatatcttgtccaaccactttatccttaaagacacaatttggatgtcatacacagtgaagatttccctgattattcccaaactcagttattgccttttttccacagtactttccatactcctattaccattgataacattacattatttccacaatattggaccccattaggatgttgagagcctctgtcgtcttccatctttgtagctctaacacttagcacaatgtctggtgcataatatgcactagttattgtttgctaagcgtagcacacattacccagctgcaccagtctaggaatatagctgtcaccctatagcagctgggctctactccttcctctaggtatttcccttccggatctctgaggtttcgaggatagcctcatgtaatcacaaacaaccatagcaataattatcttcagtttcctcacctcaatatccttatagtttccttctctgaccctaatagtttttttttttttttccaggtcaccacaatgactttttctgcttccaaagttggaaaagagccatctttttaaaaattttagtgtcacgtttatcatgcaaaagttggagagaatgccctccatccctacttctgttgtattctctaatgacttatgcattgattacaagcagaatttgcctcttaccccttcaggtatggggccctgcctatgactcactgttccttactgcttctctccccttgtgaaccagtttaggctctctggggctgggatatgtgccaatctggggactatgatcttcttaaaagtatttttttttcctctttacatgcttagccattgtccagaggcaaaacttgtgcagcaagccttctcttttctttggggtacacagcctgggatattaaggagaagtccttatctttgagagtttaatacttttgaggtcttaggtctgcagagtcatccttgtgttcgttcactagcaccttacatgggtttctgagcccctcactctgctgacataccttcacaggcagtagagacacagtttaaggtcctcattctggcacttgatgtgtaaaagaaaaattgcactagactagctaaacgggcaaaaaaaaaaaaaaaagacattcaagaaaattgcaatagaggagaaggattgaactcaactccactaaaccaaagggggaggagtttctaagcactggggtgagctggtggaaaattgcgggaggatgttagtggagggctgatcaacatgattgggccactggtgcttattgaagttaggctcccactctcctacagaggctgagagggtactatctttcttgattacatgtcaaaagggatggctcccaggttcttgagaaagacattcctgggttgtagaatatttatgtcttaaagtagcagagcaagaatttataatggaaagttttctaaaggaaacacattttaaaaaggaggtcagaggccttaggaagaagcctgtctaaagttgaatcaatctgagggggattttatggccatcttttccagatgcataaatataaactaaaaagtaaataatgacccactttacttgctttcatgtggctttttatattccatcaataacaatgaaatcggttatgcaatagggcagttgttattattaaggaaatttatacatagattgtaataatatgctaaaattgtgaacaatttgtctcccaggttctgtccttttgaacaaaaacggaaatacacttcaaaataaatgctttgcaattactacttttctttcttctgacttactatttattaaaggtgaatgtatttatcacacagacagatactttggtttgattggtttgtatcattgctttctctttgtcatagaagtatcccttagagtgagtcttttggcaacatataaagtgataatttaaccccctggctgagttgtttctaatataagtgaatcatactaagccagagggcagatagctgaagagaaaggaagtagtaagacagcgaaaagagatcatagttcatgtccccatttttctaaagggaacactttcaatgataaatcttgactatgtcaggtgattttccttttttcactctgtggaaaggtgtttcatcagttttccatacctattatgtgaaatatatttcataaatacagctggtgatcttcaggcagtactggaacttttatgttatatacatcataattattgttaatggtaaagttggatggaatgaggaaaatgaaggaaagataggaattgggtcagggctctgactgagtggccagtgaaggctgttaagggacaataaataatttgagctctttgggaaatactgttatttacttctctacttttatttccagatttcttcacaactccatttcttttctgttattactcccacagcagtctacttcttccaaaccttatcatcattgccatgtccatttcatctctaccctaatccagttcaacaccctacatctcaaatggcctattgaaataatctctttattggacatcctgctataatccatttttaatataaactttaaaaaatgtaaaccagtccaaattgttctgattgatagctgtataaccctcccatagctttccagtatgctcagaataaattccaaactcttaactgtggctctcaaaacccccaaaataggctctagactctgtaaagggcggaagcagtgtggattctgtacttagtgtattctgatagccacgtgtcactatgtactttttctttgtgtcttcacgtctcctcctgttgcattttaaagcactttcatagtatgtggttttgcctaataaagcattctcatagaaaaaaaaagccacctcacctcttcccattcttcccctggtttatgagttcccaggaacattgtcctttctgtcttttgaaactgccaagcttactactttcctagggcatttgcccttattgttctctctccgtggacagttttgctacccaatttttgaatgactggctctcttttttaaatgtagtttggtgtgatgttgacttggtttggtgggagttgtgggtggagttgtgttgttgtctgtggtcctgctgcaagatggtggcaggtgttgcacaggtgccttggggattgtcagctttgttggtgtgatttgcagttatcttggtgcagcagtggctctgttccatgtgcagtggttaccagtcgctccaggggtttggtgtgccgatggtgatgtcagctgcctgggtggttgatgtataaacaactggtggaggacctagtagtttcccaacgatgcatagatgcataaaacttcccagcaggtaaagaactccttgcatggttcttgaatgcatgaagggtatgttggtttgaagtttctccaatttcctatcagataccctaagcctttattcagtgtcgtttgtcagtgctttgagagtcttattcactgcactaaatctattgtccatgtggtgtttgaagtcattgatgtgattcagtactgaggaaaattcactgccgatatccgtttcagcttgctgtcctctcttgtcactggtgatactttaagagtcattttctctgttgaaatggctgcagagattgagccctcttctttcatggcaaggttccaaggatggaaccaggatctcttttggcaggtactcaagcagcataggtggtgttttgcagtcttggccctttggacatggcaattcccctgtttccctgaggtctgatgttgtttgcttgatgctgatactagcaatctgctgattgacatggtgtcagatccctctgtaagtttccatgactggctttcttgccgttgacctttcagtacaaatgtcccctcatccatgaggatccccacactatccaatatacggttagtccccttcctccgagacaccctctatcaccaccttccagttttgtttttttgatgacttcaggtaattataactacaggtatcatgttcattcgttttgcttgcccattgtcatgagaatgtaagccccatgaaggcaaggatcttgcctattatatactctgctataacccaagcaccaaaacaccccctgaaacactgatatgcttcataagtatttcagtgaagtaattaatgaatttactaaataatattatttattgatatcctactatctgccaggtgaaatgcaacattgtcttgggaaccaaacgtgaatgtggtgtggttttatacttcatgtagcctactggctggctattatctttatctggtcatctggctactaaaccatcttttaggatttaaatttaacttttgtctgaagtatcaagataagttgatattttagcatattcgcgggtagtcggattctttggttctgtaactgtactctatatatactccctaagaacctctaaaatttagcttctctcattttacatatattatttttcactttattaaggctttatccagcaggtaccagattcaaggctttttatagctcattataaggtatgcacatgagagtaagatatttacccaatcttcaaggaatgcaaaatttagtagatgagataaactctattctggtaaacatgaaataaggctgtattttgaaaattctataaaagaggcagaatgagtaatagagggatccagagaaggaagctgtcacacagaagtgagatgaataggaaatgcttcattaaaagatttactttttcttgggctttaataatcaccaagaccttgacatgtggagatacagaagaaagggaaagggaaggaaatgagttttccagttgagctgcagcatcagcataaagttttggaaaggatctatgtcatggagggctttgaaatttccttggtaggtggtgggagccattggagttttactgcgaccaacattagcacagcatttcttcagagagagaaatttagacatcttttggtagatgaattggtgtaagggcaaactggagacaggaagatcaatcaattagcaatcttttctgagatgacagcctagataggacagaataagggtttgaaaagtagaatagaaggtttcctaaataaatatattcacacacacacacacacacacacacacacacacacacacacacacacacagaaagagagagagagagacgtttgcccatgagaacatttcccttattatatttattctgaactgcagttgcttccctcttcaacccagcccttttcactttcacattcatgaattctttctttatataagctacactttggggaatagattttttgctttttggtgtattttactattctcaggtatttaaaagcatttttaagatatctatgaattctcaaaatgcccacatttctggcacagttgaaatagcgagacttgagtttagacaccagtggtctccttattatgaattactgtcctgctatttattagtctttctcaatagattgacatagttggccatttttctctgtaaactctttcactcctacctgttcccaccaacacatgtatagacatgcataccccagattgactcatactcgttttggagatgttttgccatacaaataaaatgtctaagccctgtggcatatggtttatagatctcactcaaatattttgattggccctatgccatagctctagctaggggtgccaaagtgctaaatctattggttgtgtttcagtccttaccttatttgaattcttagtaatatttgatgtcaatgaccacaccctccttgagatactgttctccattggtttctatgctataacagcctctctgttttcttttcccttgcctctcagtcgatttcttctctactggtatagtctctacttggccagtaaatatcaacattttccagagtctaggtcctcttctcttctaattctgcctactttccagctgttgccttcattccacatctttggtcagtaggagcctcttcaggttggtccctgaatcctattaatatgattctggtagtctctgagagcttccttgttgtctattttaagatactctgaggttgtctgtacattttctgccctaaatagggaataagccatttctccaaaaagtcttcatttcttttagttggaaatggtatttcaagatcgtaatttgggccctagaggtgcttactgtgacaggatttgtcattgtttccaggctttcctattatgtatatattatattaacaataatacttgtaatttaaattcagaactatgtgtttttgtttcatttcttgtgtattacatctgtgttttccttctacattaagaattttcattctgggccgggcgcggtggctcacgcctgtaatcccagcactttgggaggccgaggcgggcggatcacgaggtcaggagatcgagaccacggtgaaaccccgtctctactaaaaatacaaaaaattagcggggcgcagtggcgggcgcctgtagtcccagctactcgggaggctgaggcaggagaatggcgtgaacccggaaggcggagcttgcagtgagcggagatcgtgccacagcactcccgcctgggcgacagaacgagactccgtctcaaaaaaaaaaaaaaaaaaaaaaaaagaatcttcattctgaaggacacaggggatgatagaattagaatatcccacgttacaaacacaatagctcagattaataacactaatatgatcaccacggcttttgattcagtaaatattagtgagaatgctgatgaacatatagtgtgcatagtgtaattgatttggaaagttacagaactctgtattatttatttgtctgggtagcaaacggtactgattagttgaagtgatttttttctcactatgcctttctctatacttgaggctgtcagtgttttccatgagaagcctattgggagttccactcaacaggcagattggcatcattaggcccagtgtattcactgtgaagagctgcctggtggaagcttgaggtaggccctctactactcattatttttactactgtagatccatggacacattagatccattggggatgagcgattctccttttatatatttacttccagtgaatatggtactgattttctgtttcctgctaaaatatacatttatggtgaatcccttgaaagccactttgagatgatcataattcttattcaaataagaattgaggtgtgtttgtgagagaattgggatagaaatgggggttaatgcattcattttggaatagcacatgtaagtgttcatctctttggaggaaaagtgaagctgaaacaaattttcatgggaataatggaaacactggagcttttattttggcaagccccttgaatttccagccaaggaatgatccccacttagttatatgtgtaaactgctactttgtacaaggaaatctaaacatttgcagggagttaatgggaaaaagtaaatagaaagtcttttgaacttttgtgcagcaagttttgaggaagctaaactcaagtctaactctggaaactaagtagatggagagaaaaatgatagtggggatcatattataaatatttatgatgtaatataatagctgagaaggctgatgtgtggtatgtgacatgtcaaagataatttgtttccactctattttaaagagacatctaacttagtattcctttctatctccttctatacctggtaaggattaaatattaaaaaatgatatgtattgtaggaaaaatgggattaagggaacataaagatctattgaaaaggaaagattatagaagctaaatacatacaacttgtattatatcaatttaagaaaggatgtgacctacaaataatgaaaagcagcaaaaaataaatatgaaagcagggaagactttttggtgatgtagggatatatgactagaaggaataaaaagaaatcaaggcatagaaaatttggtttaaaagtattttgataccaataatgataacttggaagaaatgcttttatagttttgtgcatggaaactgtaaacatgcccatcatgtacgtatttgccaagaaaatggaggtacctactgttctgtatgtgagctgatcttctgcaatgagtagtgggggtttgtgaagggtctgattggagagaattgagaaggcaaacctttttgacttgacaatttatggtatcacattatcttctaacttcagtaacctattttggataccttggtcttttccaaatgaatattcagtcttttatatgtctccctttcccgttcctcttcaagtgacatctggttgtgtgggggaaagggccttcctccatgaactcttagcaggagaaatagtggccacataaccagtccacatcatctggaccttcctgggtccttgctgtgcagtggctggtctgtttttggaaatagtggctgctgagatagattttaaactgcaggccgtgacctgcagtttgggtaccatgcaagcacttacggctgacatccctggtcccagcagtttgcctgcatactcagcttattttatctcacatccagccctgttagcaccttctctcgtccctgggacatatagaaacctgtggactccctgcagtccctaaagagagcatagggagccagaaggtctaactcagctcacccattgagccaccttcttgtacttgtgggtctgctgtttggcatacaaggctgtccatgggcatgtaaagcacttcctcagccaacacacagggaagcgtgccactaaccagtctgtcccgtgttttttagagctccccacatccaattggatgttttcataatgtcatgctcctcccaacagtgggaaagtaagggacctatgcatctgaccttttgatcttgcctgtgtctctcctctactcctgcaatcaccaggaccagatatggcagcgtttcatttcctcctccagttctacaagggcttcctgtgtcatgtccttcttcatcccaaagagctttctctctccgcttccatggtgttatactgtcagaatatctgctggaaatcatgattttctgaggagaagtgaaaacacatctaggcaatatttaaaacatgttaactctgttacaaaaataaaagttagttgatataagttctgttctaaaaggttacgtaaaacccctcctcattaaggctttcaccatcctatctgctactcttccttttcctgtccatttcttaattcaccatcactccctctcacacattcaacaactaagcacctaggtcacattttctttctccctctagttgctgccatgcccctggcctctggaaccttcaactcccttgtccctggtgactttcacctaattacacaatagctacacacctgatactattaacactgacatcccaaccttggatcacaacctctcctttcagctttctgacatgattactgtcaaaacaacctttcttcttcagcctttggctcctcaatttttttcttacctatcagcttacccctattcccttcctttctcactcctcttaaattccatgaaccacaccttccatactctattgaaagtattccccaattctattcttcatgtcaccagcctgacaaaacttcaatttggatcagtctagttcaatatctttaccatgtatttctgagtgccaggcactagaacctagcatgtagtaattatctaatatttgccgaatgagtgtattagaccattctcacactgctataaagttatatccaagatggagtaatttataaaggaaggaggtttaattgactcagtttcacatggctggggaagcctccggaaacttacaatcatggcagaaggggaaactggcaccttcttcacaaggcggcaggaagggagagtgtgaaggaggaactgtcagacactcataaaaccatcagatcacgtgagaactcactcactatcacaagaacagcatgggggaaaccacctccatgatccaatcacctcctaccaggtccctcccttgacacttggggataatggggattacaattcgagatgagatttgggtggggacacagagccaaaccatatcaatgagtatgtcagtggaacacgtatctggtaatatttaagatcatagaatttggataagccatttatgacattttaaactgtgagaccttgggcatgctcatgaactctctctgggttctggtttcttcaacattaagataaaggataacaatagtctctaccttacataagaattcaagggcatgtgagagtaaatcacttgatggagggctggaacatggtgcgcttcaaggcatattagctaatgtgtagttgctgaagcaaaattgaatgcacacctacattttcaccatgattcttctactatattgtgtcactactcaaaaaaaatagctgcaattggattggctagtgggaggagatgggagcaaggagctggaagtcagatggatgtgagactgcaacaagcattaggtgggagcatctcttagaagttaataaaatgatcatagtattattactatgcaagtaaattcatagaaaagtatagaattaccaaatatttggcaagaccacatcttagatttttcataggcttgtacttcatctttgcttggttttttaccttgtcttaatcaccattcttcctgctcttgtttagttcctaagttttctttccaggacactggtcctctaagtgtgccataaaagttcatatatactgtgtattcaaagcttcagcaaaggtagagaacaaaatggacactattatccagatgtcattggtgtctccctccaacacttttctctcccgcgattcttgaatagtctttttaaatattctgagaagtattatctgagtatctcccaacccaccaacccttagagagcatggaatatatcttttttccctttgttactggtatgaatcatggtgtctggcccacagacagccctctgtgtgtgtgtgtttgtgtgtgtgtttgtgtgtgtgtgtgtggttattgaataaaattaaaagatgagtaatttgccatgaaggtcagagaggtgttatggaaatttttgttccaacttatgatttctcgggtttaattctgccaaagagttcactagccaaatctttctttgtgtcttttacaagtattttatggatgagtgttgctttcttttttccattgtctctctttaccatctctgttgtgctacagaaaggagaaccaccatatacatgccaataatggtgttaagcattttaatatatatataaagtgcagatttcccaaggacattatactcttaagtggcaggaacctagatttgagcctagagctgagcaatatattttggagctataatcttgagaaactacagcttacatacattcacataaaacttaaacgggatttaacatattcatatcatgtactatggcagtgtctgtgaattagaaattaggtaatgttacatatttgactttttgtaattaagataattacttggaagcattgtaaataaaattattcaagtatttcaacaaagttgcaaaatgtctgaatgccattttagaggaactaaaaaattcctctgagaatagacgctttgatagaaaggagggagcaccaatatttctgcagtcttgtacatcacttctctgtataatccttgtctctatacagagtgtttatgaactacttagcaataagaaaatgaatttgctaggactatcgatacccagtcgtcagattatttacattattttccactctgatacactcagatataatttaggggactatgccttcaacttaattatcagtatccctctaaaatattgcatttccaggaaggtacacaagtgccatatctatttctgtgcttccctgagtcaggagttgttgtaaagggatgcctcactgattcacttttctgtaagtctggaaattgttgtcatgttggacacattattgtgtcaaaaattatacaactgttatctctgcaccaatagtcactgatgattttagttatgatttctcattaattactttctatatttgttaccatctcatgctaatggcccagccacaaacatttatgatacagtatttatatatttagatataaatgcataaatttgctatgtatttttatataaatgcataaatatatataagcacatacacacacattcacaaagacagatacagttgtctagaaaaaggcaatctttttgggtaattatactcatgaacaatttatatgcagattgtaagattccaaagtgttcatctggaagagagtatagtaacaatacccagtcttttatgtatacaaaagttgctggatggttaaagatgatctttattttttagtctaatttttaatttaataatacatgtattcattctcataataaagaaatttaaaagtgtatagatttaccaaaattcctcttgactgcttttctctgtcccagagttttttccagaggaactaatgtttcctctttgaaatgttatccgtcagctttaaaaaatgcatttatatatatatatatatatatatatatatatatatatatatacacacacatacatacacacacacacgctcacacacacatacacacacacatatatacacacacatacatatatatgtatacacatagaacattttatgtttgtcttgtgtgtgtgtctttttaatataaaaggtgttaacagctatgtattgttctgcaaatttgttagtctgtgtgtcctgcaggctctttatatcagggcatatatacttacattattaattttaatagctatatgttatccagtagacttagaataaaatcccaaattcttacttgatggcatctatggagtatggccacctcatctctcattgcatcctcctccttacccactcctttctgctcacactggctgtgtcttgatgtttctggaacacgtggaacacaaacccacctgtctccttgactgagaagctccagtcctcaatattttcttgcctcatttccttactttattcaagtctctactcaaatacagcctcatcagaagttccttgatgttcctctccaattcctatatcctcccattcattctccctctctgtttccccttaacttgttttatttttctttatatttatcactacctgacatgtaatagatttatttcttcattgtctgtcttcctcccctagaatgaaaggtttattttcggaatttgtttgctaatacatccccaaggccttagaacagtgaatggcacataattggtgttcaataaatatttgtgaatgagtgacaagtatgaaactttagtttgttaaaccattttctttctgatggacatttgtttccaagttacactatgacaatgccacagtgaacatcttcttatatgtctacatgcatacatatatatctccagggtggatttggataagaaaaatttttggatcaatgtgtatgcacatttaaaattttaataggacagaaaaaaatagcccttcaaagaggttataccaatttattcccttcaacaggggagtacccatttccttacatccttgctaacattacatgtgaaataacttttttaatgtgagtctgtgggaaaatctgaagtttgttataaaagaaaaaggagaaagtactattgagtaggcaactatcagtttcttccttaaaatgtgtccatttcattttaagtgttataccactcttttttttaaaaaaaattataagcctatgtaatgaaaaagtccagtatattgttatatctaactaattttccccagtaaatatgatggttgctcttgacttttttcttaatgttattttatttttatttgacaaataattgtatatatttgtgaggcacaatgtaatgttatgatacatgtatacattgtagaatgattaaatcagactaacatatccatcacctcacatacttatcagttctttcttgtgagaacatttaaaatctaccttcttagcagttttgaaatatacaatacattactattaactgtggtcactatgctgtgcagttcttgcagcttccatttattgagtcaagaatgtttcttactttgtattctcagcatgctatgagttatattctcccgagaacaagaccagaatcttagaacactttaatttcttcttctttttttttgacacttctcctgttgatagcacctgtgatttaaattctaaattgttactggaatttaaaaaattacaatgcatacttattggtactttatcatacatcttactgtttctttgctcaccattacatctttgcttggtcttcctcttgtattcatttttttattatactttaatacctcctgtagtgattctttcagatagtgtctgacagtaatagacttagaatcccacatacttgaaaatgtctttattttgcttttaaaatatgaattatagcttgggagtaaagcattttcggttttggaggatgaaaagaagttggttaatgggtacaaaaatatggttagatagaaggaaaaagttttaatattcgatagtgcagtagggaaattatagttaatagtttattgcatatttcaaaataactagaagagaaaaactgtattttttccaacacataaaagattaatgtttgatgtgatagatatcccaattaccctgacttcatcattacacattatatacatgtataaaaagagtcacatatacccccaaaataggtacaactctgatatatcaattttaaaaaaagaaaagagaattttaagttcaaagtggtatatttcaggaccttaaatatatagtcccaccatcttcttgtatcaaatattattgacaattcagtttaattctaatattaactgatctgtgtctgcttattttcctctaaaatccctcattcctttgattgtgagggctaatgcttttatttaggtttgagaaatattcagttataatttactgaagcattccctccagtctgctgtatctattctctgttttgtgaactactattattacttatgtgtttaaggatttctacctatcctctaggtctgtctgtttttcttttaaactctcttttctccccttttttggagcacactggtattcaaccacccatagcctgtgggccacctctactcctctaattggcagtgtaccctactcccccaaaatcttgcagctatcttggggctgttcgccactgtttttatttaaaattgtttttagccttttggcattctgtcatttaaataatttttgctgggcatggtgacatgtgtctgtagtcccagctactggggaggctgagtccagcaggatcatttgagcccaggagttcaagttcagcctgagcaacataacaagaccccatctgtaaaaatatgtatttatatattaagtcaaaatctaaaaaagttttttttatactttcttgttcacttaggtcatgccttgttttccactagctttgtgaatttctttatatttcaaacatgtttctgttgtttgtatgggtttggggtgggataggggtgcttctatgaattcttactctgtcattttgatcccatctcttgcttaaagagttagaaaatagtaaaaatttatcataataattattaaacattagagttgttaagactgaagaatccttaccaaaaatttttaaaaatatgatcttgaccatctttccattatcatttactatgatcctttttgatcacaaaagtttggccccttttaaccttcaaaggcaataagcaatttgatcttaaaattgctgttcctttgccacagatagtatcttgctagactgaaattagacgttttaaatgaaaatctccccacttgactgaatttccatttctcaggaggtgtgtccacatagcccaaaatgtactattgaaaaagttatcttttacctaattttcattaagatgttaacacatggatgataaattttgagaaattagattttacagacagaacgcatgaagctccatgaatactggaagtatttgaatccttgagatgtcaactgtggttttggaggccacaggctttcaaccacttacactggagtctagtaggagctggaataagtctttggcttgatcttgtagcagttggctaaaaaatatccattgaattaaacagaggaatgtgggcatgttatgtcataaagcattagaagcataatatatcacagaaactccctgaaactgattttctgggattaaaagcaatgtttcattcggccagttgcttgttgcaatttcaacagactagaagctatcttatttttattttcctttttacctctttttcaaagttccccatagtaagagttacagttacttcagttttggtaggagatcataaattccagcagccctgaaaggatggagatagtcaatgttactttgcaaccaatatagtttttagatgttaaaaaataaattatgaattttaaaaggctggccatgaaactcagtcgtgttttttttctttaagtttatgatacacaattttttgtgtatctcagtggcttctagactgcatgtaccatttcatatgttttataatatcactgcttctattgatgtttaagggaccaaatgattttataaactgcttcttaatggtgagaatctaggatgtgttataaggatttattggtatataaatataaaaactgtgatcctggaaaatttttaaattcagtactgtcataagtaatgtttgatcatttctcaggcatgggtaataattatttaaaaatttcaggatgcagtgtaacttggagaaagaagaaaagttagtatttggtaaaactatgccattgtagaatttgaagaatcaacttattctgttactttatgtttcagaagctgtaataatgtttttagggcattcctctgtatgcgttagttctcttaactgagattataatgtccataaaggcaagggttttccttttgctgccctcctacaggaataattctagtgctttgcacaatgctcagtgaagaaatgcttggtagtgttagagtcactgcatagccctggacacgtgggagtgcctacctttgtgttggaaatggacattgactcaaatccctgtaaatgttgcatttcacagatttatgcaatagtcagtttcattatgaaattaggagaatcaggcttgtttgttttttttacagtgcagcttaaatagttcaaaataatttgggaaaagtcactcacaattatagaaacctttatcttaatggaagaaataaaagacaacatatatactacattatattataaacaaagagcctgttaggttcatgtgaataaactaatacttaaaatttgtagctaaatataaaaacatttacggagtaaatgcaatgcaccaggtagtgtgtgcagttcaaaagtaccaggtgagaagaaatccctgatataaagaagttcaaaatctaatgtagtagtttttatttggcaattgagtctgttacagtgaatctgatataattgttattttctaagcaaggcttaccaggcatcttaaactgggtttttgcctcctgcaaagaaaccactccatcctttgctttccaaagaaatgagagagggagaaaaaagggatggtttcagtgataacaagactttttaaaatataaatatatagcggatctcttttagtgggaaaactaaccctggagagctctagaaaggattgtaaaatgccttaagattggttcacactaacccaatggcggtagggtaccgcaatacaacctctggggcaaccgttagagactatgatggtgtatggctcaagggcgccccctggagcacggccttagtatgagtggcaacccttggaattttgcaacacagggcctgctcagcgaggtgtccttgtgtaattaacgaaaataagtctagtttggacccattatttcttttatttgtagcaaatttggtcgtaggcttgaacttattgtatacactgacctgagaagtcgggatagaatgatgaatattactggaggaaaggagtgaggccaggccaaagttcaaagggacctgggtttccggccctgtgactgtagttcaatttgagaaaccctgactgagctatttggaaggatgagctctgtcatcatagcaacactgggacccttctgcagatctcagctgtctctgtcagtcagctccagccctgagccatcaaatccatgtatgagaaagctagatgctacatactcaaagatgtaccaaccaagcgcagatgtgccagagggagtggggagtaaaattttctcagagagtgatctttttccttcatatgatagaattactgattatagaacacaattattctactttgtgtcagggtacagttaattcagcaaatcctaactcctattgctaatttatttcttatctttaagacttttgaatcattttattttttatgccaaaagtatggtactcattatattgctttttatttggcagtgcactacacagtgtgtgtatgtgtgtatgtgcctgctgtgtatgtgtgtgtatatttacccatagtttttgagtgctctgagggcaggaattgaataatatttatccttgtgtcctttgtgcctgcccctgggtttgatgcttagttaggcaatccacaaatgctgtttgcaatgttgaaacttaggaatggctaaatttagtgggtggtaggatcattcctgatgagctttcattgggcgaattgagggacatggtcatttggaagaaggaagcattatacagccggtattcacagcagtattgaggtcagaagatgtccgaaacacctgtcaatttcatgtgtgtattatagtttgtaagtaaaaacattggaaggcagttttcatgaaaagaacgtgaatatcttctaaaatgtgtttttatttatctgattgtgatttactaatggaataagaatattccccaggcatcacagtaagagggattattttgaaacagaacaagcttttaaatgaatcttctaattagaaaaatatcaggctatagtgataacatcttacttttaaaaatcagctttagcgaattacagatttttatataaagaacattccgaaggcactggacaaacattgtgctgtagaaggcagacaaaaatgcaatggctcaaatttttttacattattttttgggactcaaagtaactcttccagttacataacctagtgattaattaggttttaagtgacctaccagaggtcttatctttaatatctatgttgctgcttctctatcatgctgccttaatacgattaaaatatatgcagatgataaagaacttggcacaaaaatgagcactccaaaattctaaatacagttgtttctataggaaagccaactgttctgttaaaaatctaggctagctgacctagatctccaaactgaaaggtttgctgagacacgtgcagccgtgtaaatctctgagatgtgggttatttaaacagatggtaactgtgacacagtgagctctacatgcaaattggcagagaccaggaccagaaaggaagcaggctagagagaaaacataatctcactgtggacctctgagaattttaattaaaacgcagaacaaaattcagagtgcttggatatacttcttcagaatattaatggaatattagcattggttggatggttgctatgataccaacagtgagaaaagcaggggagtttttggaatcttctttagattttgctgagtttctgggtgtgatttggccctgccagttagatacactcaaataacatctggaggagaaaggaaggtcacggcaatatttctgctgtggtgttgatattgccaaatcaagttgtggaaagttctatttctctgttttctataacagtattctacaggcaaggccctagtttgctaggtgtcaagagactattaaagcagaggtgttggtggcttccagactcgtggatctagaaatccaaaaatttctgatggtgacatgctggacagttctgtggtgctgttttgggctttgctcctgggggcttatcctaaagcctgctactgtagttctgccagtgattttgcactcctgctttcctgtattagctttatagcttaatataactagaataatgtttttcttgcaacccacttgtaagtgatatagtacatggaataaaatattctagcctagatattgcttgcctcccatcccctctcccttaatctatggtatacatagtctttgtttccatgctgaattgtaaagcacacatatcattcctctctctctagaaggaagagaatagcatttcaggagaaaggggttaagcctctttactgcataatccagagagatctttttggcctctctgggttatgtaatgagaagattatcaagagatataaggataaacatttgatttaagaagtcaagttcatgagagtttgaagccatttttataaattacatatatcaagatagaagatgaaagaatgggctgcgtctcatggaaaattatctaaaattgacaagaaattttctggaattggccgggcgcggtggctcacgcctgtaatcccagcactttgggaggccgaggcgggcggatcacgaggtcaggagatcgagaccatcctggctaacacggtgaaaccccgtctctactaaaaatacaaaaaattagccgggcgaggtggcgggcgcctgtagtcccagctactcgggaggctgaggcaggagaatggcgtgaaccccagggggcggaggctgcagtgagccgagattgcgccactgcactccagcctgggcgacagcgagactccgtctcaaaaaaaaaaaaaagaaattttctggaattagggcaatgacttcctaatttattgcattttttcttcattgcattgtttttcctcaaagagaaagtcaaaagacaaagcaaatatggggctgtttggctaatactactgggccactctgatagatgcttgattcttttatctaacatttaaaatacaagtgtatatgcagttccctactgttattttactcttaaattaggtggctgatggggaaattgaaaaagtttcagctagaaaattaagaaaaggactgacagtcccattaactactggtaattaactactgggtaatatttgtatatattgctcttggccaatttttctagtatacattgcttgaaaaaatatcagtactgtaaggatatatttctcattttaaaagtagaactttttgcgtgaatcagttaaatcacatttttctatgacccttaattccgaattttttacctcctcctggatcaaattaatttctgtaattagctttgtgtgttttctttcagtttattttttatattttgacttgctagtatatgtagccaccagaatacaggttaccattcttacttaagttcttcctatataaataagatcacactgtatgcatatttttgcaacctactttttttcaacaatatgtttgtaagatctatccttgtacagtgctcctcagttcatgatggacttttgtcccaataaacccatcacaaattgaaagtacaataagtcaaaagcacatttaatatgcctaagctatgggacatcatagctaagcctagcctgccttaaatgtgctcagaacacttacattagcccacaattgggcaaaatcacctggcagcacatcacactgcagagtatcagttgtttatccttgtgatcatgtggctgactgggagctgtagttctctgctgctgcccagcatcacaggttgtaccacttgtcgctagcctgggaaaagattgagataaaaaattcaaaatacagtctctacctaaggtgtattgatttcacaacatcataaagtcaaaattgtgtaagtcgaggaacgattgtaaaccagggactgtctagatttgcataaagatctatcatatttgactctttagtatttttgtatcactgagatagaaaacaaaaaccattaccagttaaactgacacccttattggaagctcttttagacttatatgtagatcttaagtcatttatttatgactgttatactctgtgcatatagaaaggaaaacataagaaaaattaattaagatattctaaaacctcttcacagtcagagttaaattctttaatcactgcttgattcagttatggatgcttgtgtttttccaaacagtaccatactctgtgccgtcaaaagtatcaatgaatgagcagttctttaaagaatgctccactattatccccaataatgtcttccaagctgctgatagccattgtggcagtcttgaggctcacactttcttgatctgtctagaggtgtgaatggaaggtttcaaataacaatcagaattcatattcatttttcaaataactcttaaatggtttgttgcatgcaatcttacagggttgtagttgtccaagtgtgccatcaacaataaccttttttttcattcttaatcagtggcaacagaggcattcctactgtctattcaacagcaagtatatgatgctatcaatttaaaacataccatggaattgatgagctaaagtagttcattcattgtaactgattaatagtattctgtttaaaatagtaacatattttaatgatctatttccatcctcatgagcatttaggttgtctcctttttctttgctattccatttcacttgaaaaatcattttatgtgaattgtgtcctaaagttttaaaataggtaatttgtgaggctttcataaaataggtctgacattttaaatatggtgaaactttattacgtaattaaaacaaatcactaaattaataacaaggtaactgtgaggtaaaaattatagtatcccttctttaaatctgctatcacaaattatttaaatgacaccctttatatctcccttattaactctattggccagaaaattttaaatatctagattgctagaaggtgatcataggcaacaaatactttatatttggctttgacattttttttaagttatgtatccatgtggatttgtcaaataaacattaatatattcaatcaaaagacctttattggtagtctgatattgcaaggcattgtattgggtaatatgagaaacataaagatgaactaacgagaaactaaaaagttatctggtctctgcatcatggctttcctcagaatctttccctatttcttacatatcacttcatatttggattctgctaacctttgagggctgacttgtacaaacttggtcccagacacagatagaagccttgtctggctctgggcggatcaccagcctcagatagtctctcttgctctacctccccacctccctctgatgaggatgcttagtttagagctgcaagaacttccctggagcacagcagaactgttgaagtttaaaggcccgtaataggcaaaagagtccaaaggaagggagagctatccgagagcgttattgcttctttttcctgatgttatttttgctaatttggaagttaaacatactagtgcctttccagtatttctgatccccatggataataagcaagtgtgtagtgagatttttatttcccatctaacttgattttttttgttcctgatttatttatctttttctaaatcatgaaaaagagatatctccttctaaaattatgacaaactcactttttcacaaaattgcccatggaacctaactgtaaatcagcagaagctattgctatgtcatatgctacacatcctggaaatactggatgatttctaattttttaacatttcatgcatggcgcatatggaatgtctgtcactaaaataagaactatatcacatactgttcttttggctggagcataaaaataaagccctactccaaggagtcgaaacaaatgaaaattgtcttaaagtgatcatggtacactagaaggaaaacagtactctgcagaatatgcagaaagaaatatactaatgaacagcttatatatgatttgggaaatgaactatacacatacacacacatctgagatattcatgtatctccttgtgtattattatgaatcctacgaaatttatggttttatagattccaatgtgcttattcacataagcacaggtggccaatgtgattttaatgaaaatcagaatgctgtggtactttactaacttagttgttcaataacataatatgtcagcaggatgatacctattagcttttctaaatgtttttctataaacacacttaaaagtgctgcccaaactgaggttcctctacataatgatgtcacccactgtggtgtaagcatggctgcaatggatgtaatttcttaattcattcaaaatccgtgctttttcatgtggataattcttcacatcttttctcttttgtttatgactgcagttgtaactcttttgtgctgttagaataaagtagtgtatttatttgtttctatggtcatcctcttaatggtgagttgcttatgttccctgtcaatgctattatggtccaatgataaaattagtgttttttatcagcaggtaaatctctactctatcattgggtagtttcccgtgtgatgacagagcagtgtttgagggaattgcttttggcatttacgtgttgtcatccatttctctgataaagtaaatccataatgagtttcagcactctggtgagaaggacccttcattactcatagacttgctgttagtagcattgctaccatgctgccatcacccaagcttaggataaatgggacattagccagagtcgatcagaggctgaattggtatgtgaccaaaacgcaaagtggaagtcatagagcaggggagatacttctgtaagagaaaaatggaggtatgtaaaattcagtgaaacccatattccaatagtgagagcaacatttaagggttaaggtttctaggttttgtacagagcagcctgcacatatcatcttatttcaccatcataatcacccttttgaggtaattcttagcatcttcgtaaagatggagaaatagagctacagagagagtaaacctttgtccggtgttgtataggtgtgccatttgggatctcacaataccatatagatgatttttacttgaaaatgtatagttggctaatttttgcttatgtgtccatataattagaacactaaatatgaaattaaattggcatatgatgaacagtgatgtggtgtgattgtaagttatgtaacagcttttacataatttattccacttaacagtcctttgcagcccctctttcaaatgatgctcagaatgttcaagatgtttgtccaagataacatgtctgtgtaagtctcaagggcaggactcaaatccagttcttctggtcccaaattacatgctatttgctatgtatctaacagtgatcaaaaagttcaccttatgcagatttagctgctataaagactttattaaatcactaatattataaatatatttttagtattatttccaatagtgaagttccaaatatagaacataaaatttttgtctaagctggttgggagcttattaactgatgcatgttagaaagaaaaaaagaaaactgctactaatgctactgaaactaactttttgattgcttaatggttgaacttctttgaagtagagttttcactgtttttagacaagttcatttcttcttgatggttattgtttttgtaggtttgcttctgtctctttcttccctcagcaaaagcatttatccttatgtaggttcttgagagtttttggaaatcacaggtaatcaaattccatcacctctttgttaaaagatgctgattggtggaaatactagtatcttttcataagaatggccttactgaaactttttttaactttttaaatttttcctatgtcaagtagttagagtttcccatagagagaaaaccactgcactttccttctctccttccaaaagtgtaaacaggctactaggagaaacctgaatagggaatactgcttaagagtgtacagctcatgctaaggtgataggggagtgaatcaagccagaagagacaggataggaacaaagttccagagaaagttaataatatgggatcaggtgattgtagttgtgaatatagttagagtttagaaaagatcaataaaaaaaagctttggttcatatttcaaaagaaaatgcaactctcatagtttatatgaaatcttgaaaaatttagatttcatttattctgtcttgaatttaatactgtcaatgatgatttaaagaattatttgattttaaggaaagtttacttttcaaacatacgtatttactaatacgatagtcatattgttttgacttttttgtcaaaatgtcaaaatgtttttgcatcctgtttcatatttaatactttaaaaagtgttggtggaaggaatgattggatgcttatgtaaaagtttgtcattcagacatctattgcatctactaatatgactgttagagatgatcaagtgtttaaaaggtggttctgtctcatgaaaagcaaattaaaaattacatcctaacctttttattgcaaaaaccccatagctatagaaaaatgtataaaatatagatatgctccctaatgaaatattgttaagcaaaaccaccacccaggaaaagaaatgggaaattgccagcactccagacgcctctggcaggccttctcctaatcatatccctttcgtttttatggtaatcagcttccttgctttgctttatacttttaccacaaagtgtgccgttctaaataatatagttgagtttttcctgttttgaattttatataaatgaaattatgtagtgtataatattttgatctgtttcttttggtctaattaagtttttaagatttattcatgttttgagcatggttctagttcttttatttcattgctatatggtattctgttgtaaaaacattatcacaatttatttttctattctgctcaaggccagttggcttgggtccacattttagctgttacaaataatgatgctctaaacatcttgttttgtaacctagcacacatgtgcaagagtttctctggggttggtgattggaagaggattggtgctcatagggatgcatatttttgcttcattagataaaatgtatctttttatcaaagaaattatacctatttacagtaccaccaatagtgtatgagagtctccattacctcacatctttgccatatcacactattttgagacattgcctgacattttaatttatatttttctgattactaagagttgggcactgtttcacatttaaggcctgtttgttatttcctcttttatgaagcccctattcagacatttgcctatttttctattatattgtttatcttttctgtgttgatttttgaaaatacttttatattctcttagcctcctttcctcttatggcagaacatggggtagagagtatatatgctattcctgtactagagagtgtagtcccaaggagcaggggtgaatagtaaggggaataaaacaaaaggaggtaaagctgataaaatggtgcattactgatcaagctgctagtagttgtgatagattactcagtctcagaagattgttccacaaggtcagtaaactacctcaagaccttccattgtaggagagaaaggggaaatatttatcagccagttcctagctccttttggttaaagtcccatgcacagagtgctaattttcttacacttctgggttacatatgtatgggtactggtggtttagcctaaataggaagctcatggtgggagaggagatgttgaaatacaggcatgggctgggtgtggtggctcatgcctgtaatcccagcactttgggaggctgagatgggtggatcatctgaggtcaggagttcaagattaccctggccaacatggtgaaaccccatctctactaaaaacacaaaattagctggacatggtggcgctcgcctgtaatcccagctattcgggaggctgagacaacagaattgcttgaaccggggaggcagaggttgcagtgagcagagattgcgccattgcactccagcctgagcaagaaagagtgagactccgtctcaaaaaagaagaaaaagaaaaaagaaatacaatgaagtcaaatatccagcttacataagggacctttattttttgtgaatataagatatcctcctcaccactttgaattatcaaagtaaccccttcagtgtagtggcctgtcacaatctctaaaagacttaaggcaagaagggtagtgaaacagctaatagtcttaattgttgcaagtaatctcaaggctgtatttgatattcactataaatttgccacaccatttattctagattttttcttgctcttggacataattggacaccagtctttgtgggttgtgggttgactgctgggtagttccacatctttatccccaagagatctaaacctttagatgccttgcttttttgttggcctataactgccaaagttgctcattcaccattatcacagtgcaccaaaagatgcccaatgaatcaccccacattcatacttctccccatccccattgtgtagcagaaatgctagctctcagggttgattactcctcataatacagtaactcatttctttacctgttggtccacaagtatgaggaatctaaaatttagttggaacttgattatgtctgctggtggaagtagtatctccctgggaacccaatattctatggcagggtgtaaagctgtggggacaggaaatacaaattacacacatggaagatggtaagtattggtgagaagagcccatcccacctttatccctaggtttccagacctgtgcattcaaggcctgtcaagtatcgtatatatgccattggttcaacacataaaccctgttttggagtatagacgcctgctcccctacccataaaaattttccttgagctggaagctaagatggtgttataactggccatttcattgtgctgttaggccacctgcttctaatcttagaagcaagaccaataggtcccatggctatgcaaacatttttgcatcttcttgtcatacattaatccctagccagagattagagcctgaggcaaaattattatgaagtatagttagggaattatacttcattagggaattaaattccaggcagtaggagtgagcaataagagaaatgaaccaggaaatgaaggaatgccaatatacagatgtgtgagcccaaagtataactacttaaatccatgggactatcccctgagaagtcttataaactgctgctcagaaccatccatcagaggccaggatgcggggcagagccaaggggaacgttttgttcagtgactcttgagctgggcacagacaagcactaaaaggcgctagtgtttccactggtgtttccacatttgtgagttgcatatgtgcgggtgccatggggtcgagtgatggaatcagcagggagactacatggtgagaagtgggagaagtgctgggcaggcatgaggtaaggtgtcaagggtcccctactaatacctggggagtagaaaatcacacgtctcttggaggtttatttaaaagtgaatatgtaaaacgtatggaaccacataagcagatttggattccatcaagaaacttgggcttatatagtccaaatcccatttaaattaagaaaatgccacttggctctttatgttaccatgggaaattctaaggcaagaatctcagaatcaatgttcttgtggtttgtgtatacataagattgacaattataagtgaaataagcccaaaacttttaatgaatccctcatttttatgtcaaattatctaaaataattatgcattggatttaattattgaatgtaggagatatatttattatgtgttcgaaaaataataacagtttgaaaaatctcaatgttaacactggtcatatccagtggtgacattatcttctcctttatgatatcctgtattttctgaatattcaatatgaaacatatattacatttgtgataaaaaatacaataaatattattttagaaatgaaaaaataacaaaaaagttgataaatgtctgttgattttctttcctctaatcatggtttctctcttgatatctatagacacacttcattgcttttctttaaagttaaccgaagcaagtggaaatttttactcatccttatgtcgtcatacctccttggtgacttatattaagtctctattaagactttaattaatctgtagttttatttttgatatttgtagagacagggtcttactctgttactcaggctggagtgtagtagcattatcagtgcttactgcagccttgacctcctgggccaaagtgatcctcttgcctcagcctcctgggaccacaggcaaggaccaccatacccagctaatttttaattttttttgtggagatggggtcttgctatgttgcacagctggtctcaaactcctggcctcaagcaatcctcctgccttggtctcctgaggttctgtgactagaggtgtgagccagcgcacctggcctatatttttaaacctgtatgtagggcatttgctttcttagtttcttttccttatgtacctttgaaattatacttttcacttgtttgatatcttaggtttttcttgacaacatactattttataaggacagtgtctagacattccataaaacatgtgttttaataatttgcaggtgcttaagaaaatgcaaaagccacaatgggtatatatttatattccaacatcctgcaccaaaatcagtggtcctcagaggaataaagaaacatgcacatttgcagcaaattttctgtcaaatcataaatgcataacctaggtgatggtaacactaggttggcatattcagtcagtctgacaatagcaccaggacaacgtgtcctcataattatctccatgatatcaccctcatggatagtgatagtgtatctgaaacaggttggctttcagcaacattctatattgttatcatgtttaaatgtatctaagtgcctttaaaacttatttttcaaactacttattagccacagattgttaaataaaataatgttatataaagtatgaatgtatgtgtacatatgtgtttgtgtgtgtatatgtatgtgtatatgtatgtgcatatatatgtgtatatatatgtatatatagtgtgtgtgtgagtgtatataaatgaggacacatacagtaaaagcccaccttattttaatggtgaaagcaagactataacctcagaaaaagacatatttttctctgtttaatagcatagtgagaaaaatctaagtcctcccttagcctttttttaatcatgaatttggatttttaaaatatatttgagggtcaagcatgctggctcacacctgtaatcccagcactctgagaggttggggtgggaggatcacttgagcccaggagttcgagaccagcctgggcaacatagttacaccctgtctgtaacaataataacaaaaaagaaaatattagctgggtgtggtggtgcacacctgtagttctagctacttgggaggctgggataggaggatcatttgagcccaggaggtcaaggctgcagtgagctgtgatcacaccagtgcacttcagcctgggtgacagagacattgtctcaaatatatatatttgaagtatcctttaaaatgaatttttgcagaatttaatgcttgaatgaagcaatgtgcctgcctttaaaagtgggcaggcttcctgtatttgagataattttatatcggaagcattgacagagaaagggcttgatttttattaaactgaatataattggtattcagagtaatacaaccagtgatttctctttatttaaaaggaagtaaagcagccatcattgacacacacatttattattccctgctacaaacacgtatggagaaatggcacgtgtcatacattgttctggattctggggtgcccagaggactaagaagccaatccttattatttggcagaacaccttcagttaaatgttgaataggactctctaggaaaatattagtttcaatatttttaaacctattaatttaaggttatatataaacttttgaaggaaaacactatgcttattgaaactttatattcgatgcttttatggcggtggtctactttttttttttgagatggagtctcatcctgttgcccaggctggagtgcaatggcgtgatctcagctcactgcaacctccacctcccgggttcaaatgattcccctgcctcagtctccggagtagctgggattacaagcacccgccaccacgtccagctaatttttgtatttttagttgagacggggttttaccacgttggccaggctggtctcgaactactgaccttgtgatccacccgcctcagcctcccaaagtgctgtgattatgtgattacaggcgtgagccatcacgcctggctgctgctctacttttttttttttttttttttttgagacggagtctccctctgtcacccaggctggagtgcattggcacgatctcggctcactgcaagctccgcctcccgggttcatgccattctcctgcctcagcctcccgagtagctgggactacaggtgcccgccaccatgcccggctaatttttttgtatttttagtagagacagggtttcactgtgttagccaggatggtctcgatctcctgacctcgtgacccgcctgcctcggcctcccaaagtgctgggattacaggtgtgagccaccgcgcccggccctactttttaaaaatgacttgctttcatgaaaattgtgaaagtttgtcattggtttgtatatatccatttattcactcacccattcatttgctaatatattcaaatgaatacatatagaaagctcacagttgttttgatgccatcaatgaaataaaaataatagccccatacattaataggaaagttaagaactgcacagatgattgagtcatgggcttataaaactacacatattcacaatgctaaaaatgctatttaggtaaatttgaggaaaaatcacccccaattacatcacatttcattttgcgtagtaccctctaattactttgcacatacacatgtgcatactttaaaaatagctgcattaggaatgtgcatatttttgtaattttctttttttactaaatattattttgagatattagaagaaacagcttaaaaggtggaggatgccacaaatattctcttaaatttttaccctagggttttcagagtcctggttgagatatatattattcagttcaaaagcaagatggtgatatcttataaatgctagcactgtctaaactatgaagacacaactgatgcacatgttctgtattctgtttcaaatgttgcttatttctattttttttttttttgagaaaatccagtgggaactcagaagcacatgcatctgagtgatactgtaccagaagtcccttggtgcttgagttcatgtcctcaaattaggcaatgtttcctcctttcttgaaaagcaggttgcatttttcttaaattatggagtcaagctattattatcatgaatgattattaaattgctgcagatgctactaagctatgtgcagtgcatgaaactgttatgtttttcactttttaatccaaagtgataaaaagctgattgccttaaagctctgatatctatacagggaagtaattctttacataaaacatcgagaggcaaattttattttagaaatatgtgactttaaaagtcttacagatttaaatttcaaattaaaaacatattgccagctgctgtggtttgaaagggtttatttgcagttgttctggcttcaaatttaactcttcatgataattcgcccaaattggtttcccctttatctcctatttaagagtttaaaatagaaaaagaagccagcatatctgcagaggaataaacagtgtaagaaggagatggttacagtagggagtccaacaataaatatctttaaaagcatgactattgtccatgtccctccatatcctacaaatttctcatttagatgcagcaccatgctcacttcccagtctaaaaatcatagtcaatattctgctgctgcaaacttgaaagtgaaccgtgggaattttggttcaagttaggttcaagaactccagccctaaaatgattcctaagaattatcagtttatcctttagcttccagtttggtgtcagtgaagaccacagttagtggtagtgagcaagatgagctcaacccagatctgtgtctgtaaaagctctctctaataagacaaatgtgttttagggaaaagctataatggaattatggctcatggaacacataagaaaggatgttgtcttcatttactctttaattccaaaatatattctggaatttacttgctagaggaaatctgcaatattctaaaactttcatatgctgggctcttccttcttatccccactgttgtctagtggttaggagaatggaaagagcagaaaatgagaggggaacaaggacaatttgaacaaatatgcttttcggttttggtcacgtggtttcaaaaagtgaggttgaagcatataacaaaaattggagtttgggataatgagttttgattctgttatcagtcttcatttgctacgtagttgaacatagtgaacttctttcaaagtggaaattttactgtattaatggtataatatgatgaccatatattctcctagctttttcatttagaaagaaataacttatgtattctttcaggaaatttgcctgctgaaaacaaaaacaagtaatagcccacatactttcttctagaatattggcagcttttttatcaccctctcagtatcccacctccacccctgtgggtatggcaaatatcagtgtatgcttattggctgtgttggagaaagaagcatctggacactcagcataagcttcctataagaagttaagcttccgtttaggaaatatatggaaatatttaagcctaaggaaaacaagtctgttaataacacccctatattccattactcaggaaaagtctggaaagttttcttagttggcatttatattatagaagtcataatcaagaatgcttggttcattagggatgaatgtttgggttacaaaaaataaaattaactcctggtttggcaaatctttttaaaaggggcagatagcaaactttaatctttgctgtcagttgattttttacatttatttaaatttgcatttgcattctatgattgttttatcaaataagtatgttctaccaaaaataatttgccaaatattcatataaataggacaactctataaatgagtatagatagacaaataacccgtggcttgaaagaaattgggcttagggtgaaaaggaatcagtaactgaaagtggagtttaaacaaaaacagaacacaaccctcaggttatcagcttcatgaggatactatcacaaactcttgggaaattccgctgggtgatgagccaaatgcctgcagagccagacacttctgattcagtagcagcagttctggatctgtgcataatacccaattgattatgggtcattctgttctaaatcaatacattttagacacaaatatggcatgaatcaagaaaatggttttatgcaccgaaattgatgttgatcagaacctttatgaggttttaaaggtgaaaactttaatgggccttcctgcttataattatttagaattggccccaaatccttacattcagttgctttgaatggtggaggatccaccttgctcttaagctcctttaatgagcaaaagcttcagacactttttaaaactaaaatgcgaactagaattccaattttttgaaaatttgcttggttagaatcacattgcaaaaatgagttatttctagcagcacttaaaaattaaataataaaaaatactttgaaatccaatggaaaacaatgaggcattctcttctttttttccaaaaatagcacaatgcagttgactttcagtatgacttaataactcatttataagttctcaagtctttcctggggcagtgtggtattacaaagttaggctaggatgtggaaaattagctcactgcacttcgtcaaacctatttaagagagattttaattcacctccaattgacatgagtggctctcagtgtcctgctgagccatattagagcttgaggcaaaagagaaattcaactatactgattctgtttttatttaaaattctgacattctggctttttttgcattgactatgatttgtttaaatatttcatcaaaatattacaaatcttgattattaatattttgttgcccctttaaattttccactggaggctaatgcctcactctcattggctgggccttgtctatggtgattctgataaagagatctgagagatttatctcatttttcccgttgtaccaatacaaatatctgaatgttgtagttgttacacatcattctactggtactaattcctctaggtttggagctgttggtctcaataccatgaatacagtgttaatttcatgattctggtgccttttacctgtagttgtgttagctcatttaaaaaatactgtatttcatcaataattagacacacaggatttgcgtattttaacatttctctgaaattgggatatattttatagtaaatggcatctgctaattggcagctcttttttctttttggtatgtttttcaactggtggtatctctaagttgatgaagtgctgtcctcaccatagcacctaatgtaggaatattgctcaattttattctaagcatctgtacactgagaacattttatgattgagcaatggtatttatttcagtagccttttatttttaaaatttcttattggccacttaaaaattatgtatataagttctaagtaatatgaattataaacatgcattataaaattggagcccatataaaaccaaaaatagtaaaggaaaatagtttgcaataaaaacaatatgcttttcattgaaatataattaatgcacaatacacttaatttagattattttgaatactgtcttttgcaaagctctaagaatagctagggaactcagctatgatcacagtctacccaatgagagaattcaactgcttctctttcttcttccattctgtcttgttcccactcacaggtcctgattgagaaggtaaagcattgtcagtggacgtagagtggagataggagttttgaggccactgttctccccacgttgcccagacacctgcataacggggagccactatgctcttggtttgtgcaggtgcgactagcccctggtggttctaccccttggcagtgactatccctggagcaggtgtcataactgaagaagcacaagttactgctcttgcagagcacaccgctcgggctctgaattacacctgcatggcgctcctcctgttaacagatgaggttgatcagatgagaaaggctgtgaaaccaaatggccttagacatagtaactactgcccaaggaggcacccgtgccccgttaggaacacaatgttgtacctttatccctgacaattggcagaacataacagccctgcaggggatctaatgagagattaaggcagtccagagccttattgacgaccacctgcagagatggtgggcatctctaggctctggcctatgctgggccctcagtcataagtagcttagctgggatcctagtagtgagctgttgctctttgtattgttgtcgtgggttataaattcagggctctgccctataggcacatgtccctacctggaagatgccctcggcctaggaggtggagtgtaagggaaatggctgcgctttagtcaggagtaggccaaggcgaccttccagcacagcatgacttagcaggtttgtagtgcaggctcacaactccacacattatgtaaccatgtcacatgaagtacattaggtaaccactcatgtgagcttgtgcttggctgggagccactattgtctatataaggtataattaccctgctaatgctgtacataacggcttgtgtccagagagagaataaaggcatgtcgaaactctctgtgattcctcgagtgttttcccagctacctgtcactcaccacccccgcttggacctcagcttgggctggaacctggcacttggtgtgacacacattctagatcttaaagagttagtacaaagacagaaaagaaggcaaagcatctcattaataattttatattgtttaaatgtttaaatgaaaatattttggatatattccacttatattgaatatattttgaatatattgattatatttagtatgttttagaaattaatttcccttgttcctttttactttctaaactgtgactgctaggagtttgtaattccctatgtgaccagcattcgtagctagtgctttgcttctgttgaaaagtgctgttctaaatttgataaaacaggaaaatctggagacaagtgacatctgcaagttgatttcctcccatttctgtgttttttttaaaggtttctataactcctaatcatttgcccatatatgacatagtatcggtgtttctttgtggttgccaagtttattagttgcacaatatttttaaatgtcacctgtggtgagcttttcatggggtcccctccctaagcaagccagcaagcagccccttctgttcaccaagagtcagctatatctgggttctaactcagtctctttttctctttgcacctcttgccttctttgtcactttcatccatgatttcatgttgaggctagagaaaatgaccagagaatggaaaatgaaacaaagcatggagtgatgaagttaattgaaatcacagaaatgataaaacaattgtatactaatgtcagaatcatggggcttctttgctcataagagctgtgaaacgagacagaattattaccattaatgaaactgaaaaatatgagagacatagaccacatttcgaattgctgcatgttaagatgcttacatttttccttttctgaaatctgaaactttgccttgtgggggagtaggacttgcctcttcctctagttgttcaagttattttaaaattctagaatctttttgaagaaagtgtgtagttttagtaaaaatgaagtcactgatgaaaagtataatctttgcattgatttttttgtgtctaagctttcttctcaaagaaaaaaatttaaattaatgttttattttctccttttttgttaaaatgtttacttcagacattacagtgatagatgtcatggataagtagctgaagaaaataatataattgactttttaaatgaataaatgagttttttccttcattgaaactgccaaacttcacaccgctttaaagaattgacccatttaaacttttgcaacctattttaaattggctggagagagatgttataaaaaagtatggaattgtaattgttggaattaaaagcaaatgaagttattttaacatcatttttaacataagaattctcctaagaattgaaactgcatatttaaattagatttagtcaaatggatatgcagaaaaattaattttgggaaaaaacttgaaaatcaaattgtttgaaaacatctctctgttgtgtttataaactcagtgaccattattttacatatgggattttatttattattaagaaaatttgcagtttacaaatttgcaatttgaactgacccgtaagtgaagtccacatgctggagaaggatttaatagcttcatggcttactggtttttttttttcatcagccctgttcaggtgccttttgtaagacatatgacccccctccttaacgtactaggtctgggcatcttgactataaatgtgatttgcttctatatatttcaggcaacatctcttcctagcataattgaaaagattatttactggagaatgtcaacaaatggctttttcaaaaaagacttaacatatcctacagaatgatttatatacagcaaactaaacagttaaaatgaatataaatatgtatgtttaattaacttgaaattacaggaattgacaaataaagaataattctggtgataactgctgacttgctcctacatggatggtgatgaaacacttagaatggagtgattaaaggaactaagtcctgatcttactggaaactatgtctagtaggattagaatgtctctaatgaatccttcattgcatcagaagtcattattttcctttgaagggggaatgggagaaaatatagataggaaggtgaatttttcttaataaacataactctcataggggtaccagcgtctggataacataaaataataaaatgaattctattttcccaattcagagacaattcttccattctagccaaataacttccttataccctcccccactatcattttgggaatcctgttttttgactggactccacaactttcctatacataaacttgcttccatttatagattaagttttatttttaggattcaactaaagtataagccattgtagtttttttgcatacttactcttcggtcatttattctctctacagttcacttgcaagatgattaaatttagttggttttcatatgagaaagagagacatctctttgctcagttaagaagtatttattctgaagagcttttgatgtaatgatttaactggcattagaattcggtgaggatgtttgctgaagggtaaatattcttaaattataaagccctggattctttaagcctttcagctaccattggctttggactgaaaagaaatcttaaaacattttatattaataagccatattctctcagtgtccagctactagttagctgtaaattaaacatttttggaaactgcctaaaattctcggggtcccaattaccttataaatgtatcaaaactggggtcttgagccaagatggccgaataggaacagctccggtctacagctcccagcgtgagcgacgcagaagacgggtgatttctgcatttccatctgaggtaccgggttcatctcactagggagtgccagacagtgggcgcaggccagtgtgtgtgcgcaccgtgcgggagccgaagcagggcgaggcattgcctcacctgggaagcgcaaggggtcagggagttccctttccaagtcaaagaaaggggtgacggacgcacctggaaaatcgggtcactcccacccgaatattgcgcttttcagaccggcttaagaaacggcgcaccacgagactatatcccacacctggctcagagggtcctacgcccacggaatctcgctgattgctagcacagcagtctgagatcaaactgcaaggcggcaacgaggctgggggaggggcgcccgccattgcccaggcttgcttaggtaaacaaagcagccgggaagctcgaactgggtggagcccaccacaactcaaggaggcctgcctgcctctgtaggctccacctctgggggcagggcacagacaaacaaaaaggcagcagtaacctctgcagacttaagtgtccctgtctgacagctttgaagagagcagtggttctcccagcacgcagctggagatctgagaacgggcagactgcctcctcaagtgggtccctgacccctgacccccgagcagcctaactgggaggcaccccccagcaggggcacactgacacctcacacggcagggtattccaacagacctgcagctgagggtcctgtctgttagaaggaaaactaacaaccagaaaggacatctacaccgaaaacccatctgtacatcaccatcatcaaagaccaaaagtagataaaaccacaaagatggggaaaaaacagaacagaaaaactggaaactctaaaacgcagagcgcctctcctcctccaaaggaacgcagttcctcaccagcaacggaacaaagctggatggagaatgattttgacgagctgagagaagaaggcttcagacgatcagattactctgagctatgggaggacattcaaaccaaaggcaaagaagttgaaaactttgaaaaaaatttagaagaatgtataactagaataaccaatacagagaagtgcttaaaggagctgatggagctgaaaaccaaggctcgagaactacgtgaagaatgcagaagcctcaggagccgatgcgatcaactggaagaaagggtatcagcaatggaagatgaaatgaatgaaatgaagcgagaagggaagtttagagaaaaaagaataaaaagaaatgagcaaagcctccaagaaatatgggactatgtgaaaagaccaaatctacgtctgattggtgtacctgaaagtgatgtggagaatggaaccaagttggaaaacactcggcaggatattatccaggagaacttccccaatctagcaaggcaggccaacgttcagattcaggaaatacagagaacgccacagagatactcctcgagaagagcaactcgaagacacataattgtcagattcaccaaagttgaaatgaaggaaaaaatgttaagggcagccagagagaaaggtcgggttaccctcaaaggaaagcccatcagactaacagcggatctctcggcagaaaccctacaagccggaagagagtgggggccaatattcaacattcttaaagaaaagaattttcaacccagaatttcatatccagccaaactaagcttcataagtgaaggagaaataaaatactttatagacaagcaaatgctgagagattttgtcaccaccaggcctgccctaaaagagctcctgaaggaagcactaaacatggaaaggaacaaccggtaccagccgctgcaaaatcatgccaaaatgtaaagaccatcgagactaggaagaaactgcatcaactaatgagcaaaatcaccagctaacatcataatgacaggatcaaattcacacataacaatattaactttaaatataaatggactaaattctgcaattaaaagacacagactggcaagttggataaagagtcaagacccatcagtgtgctgtattcaggaaacccatctcacgtgcagagacacacataggctcaaaataaaaggatggaggaagatctaccaagcaaatggaaaacaaaaaaaggcaggggttgcaatcctagtctctgataaaacagactttaaaccaacaaagatcaaaagagacaaagaaggccattacataatggtaaagggatcaattcaacaagaggatctaactatcctaaatatttatgcacccaatacaggagcacccagattcataaagcaagtcctgagtgacctacaaagagacttagactcccacacattaataatgggagactttaacaccccactgtcaacattagacagatcaacgagacagaaagtcaacaaggatacccaggaattgaactcagctctgcaccaagcagacctaatagacatctacagaactctccaccccaaatcaacagaatatacatttttttcagcaccacaccacacctattccaaaattgaccacatacttggaagtaaagctctcctcagcaaatgtaaaagaacagaaattataacaaactatctctcagaccacagtgcaatcaaactagaactcaggattaagaatctcactcaaagccgctcaactacatggaaactgaacaacctgctcctgaatgactactgggtacataacgaaatgaaggcagaaataaagatgttctttgaaaccaacgagaacaaagacaccacataccagaatctctgggaggcattcaaagcagtgtgtagagggaaatttatagcactaaacgcctacaagagaaagcaggaaagatccaaaattgacaccctaacatcacaattaaaagaactagaaaagcaagagcaaacacattcaaaagctggcagaaggcaagaaataactaaaatcagagcagaactgaaggaaatagagacacaaaaaacccttcaaaaaatcaatgaatccaggagctggttttttgaaaggatcaacaaaattgatagaccactagcaagactaataaagaaaaaaagagagaagaatcaaatagacacaataaaaaatgataaaggggatatcaccaccgatcccacagaaatacaaactaccatcagagaatactacaaacacctctacgcaaataaactagaaaatctagaagaaatggatacattcctcgacacatacactctcccaagactaaaccaggaagaagttgaatctctgaatagaccaataacaggctctgaaattgtggcaataatcaatagtttaccaaccaaaaagagtccaggaccagatggattcacagccgaattctaccagaggtacaaggaggaactggtaccattccttctgaaactattccaatcaatagaaaaagagggaatcctccctaactcattttatgaagccagcatcatcctgataccaaagccgggcagagacacaaccaaaaaagagaattttagaccaatatccttgatgaacattgatgcaaaaatcctcaataaaatactggcaaaccgaatccagcagcacatcaaaaagcttatccaccatgatcaagtgggcttcatccctgggatgcaaggctggttcaatatatgcaaatcaataaatgtaatccagcatataaacagagccaaagacaaaaaccacatgattatctcaatagatgcagaaaaagcctttgacaaaattcaacaacccttcatgctaaaaactctcaataaattaggtattgatgggacgtatttcagaataataagagctatctatgacaaacccacagccaatatcatactgaatgggcaaaaactggaagcattccctttgaaaactggcacaagacagggatgccctctctcaccgctcctattcaacatagtgttggaagttctggccagggcaatcaggcaggagaaggaaataaagggtattcaattaggaaaagaggaagtcaaattgtccctgtttgcagacgacatgattgtttatctagaaaaccccatcgtctcagcccaaaatctccttaagctgataagcaacttcagcaaagtctcaggatacaaaatcaatgtacaaaaatcacaagcattcttatacaccaacaacagacaaacagagagccaaatcatgagtgaactcccattcacaattgcttcaaagagaataaaatacctaggaatccaacttacaagggatgtgaaggacctcttcaaggagaactacaaaccactgctcaaggaaataaaagaggacacaaacaaatggaagaacattccatgctcatgggtaggaagaatcaatattgtgaaaatggccatactgcccaaggtaatttacagattcaatgccatccccatcaagctaccaatgactttcttcacagaattggaaaaaactactttaaagttcatatggaaccaaaaaagagcccgcattgccaagtcaatcctaagccaaaagaacaaagctggagacatcacactacctgacttcaaactatactacaaggctacagtaaccaaaacagcatggtactggtaccaaaacagagatatagatcaatggaacagaacagagccctcagaaataatgccacatatctacaactatctgatctttgacaaacctgagaaaaacaagcaatggggaaaggattccctatttaataaatggtgctgggaaaactggctagccatgtgtagaaagctgaaactggatcccttccttacaccttatacaaaaatcaattcaagatggattaaagatttaaacgttagacctaaaaccataaaaaccctagaagaaaacctaggcattaccattcaggacataggcgtgggcaaggacttcatgtccgaaacaccaaaagcaatggcaacaaaagccaaaattgacaaatgggatctaattaaactaaagagcttctgcacagcaaaagaaactaccatcagagtgaacaggcaacctacaacatgggagaaaattttcgcaacctactcatctgacaaagggctaatatccagaatctacaatgaactcaaacaaatttacaagaaaaaaacaaacaaccccatcaaaaagtgggcgaaggacatgaacagacacttctcaaaagaagacatttatgcagccaaaaaacacatgaagaaatgctcatcatcactggccatcagagaaatgcaaatcaaaaccactatgagatatcatctcacaccagttagaatggcaatcattaaaaagtcaggaaacaacaggtgctggagaggatgtggagaaataggaacacttttacactgttggtgggactgtaaactagttcaaccattgtggaagtcagtgtggcgattcctcagggatctagaactagaaataccatttgacccagccatcccattactggttatatacccaaaggactataaatcatgctgctataaagacacatgcacacgtatgtttattgcggcactattcacaatagcaaagacttggaaccaacccaaatgtccaacaatgatagactggattaagaaaatgtggcacatatacaccatggaatactatgcagccataaaaaatgatgagttcatgtcctttttagggacatggatgaaattggaaaccatcattctcagtaaactatcgcaagaacaaaaaaccaaacaccgcatattctcactcataggtgggaattgaacaatgagatcacatggacacaggaaggggaatatcacactctggggactgtggtggggtcgggggaggggggagggatagcattgggagatatacctaatgctagatgacacgttagtgggtgcagcgcaccagcatggcacatgtatacatatgtaactaacctgcacaatgtgcacatgtaccctaaaacttagagtataataaaaaaataaaataaaataaatgtatcaaaactagttcttattttaaaatgcactttattaactaataaaatatgagcaagctttaattttcaaaagcctggggctcagaaatccaaatatataaaacatataaaataggtggtggtaataaggattactaaagaatatttttgttttatgaaataattgatcagtgtttcctttaaaaacattaattccctttactgtagttattacttttcattcaaagatatttatctacaagctacaaaatttgcagatgaaacttaaaaattaattttgggagcaatcctttttggagatcaatccaaaatgacagctaagcatctctggaattgaaatttagtccagtgggaaacagaatgttatttagagaggttcagtttgactcagatttcaggaaaagtcagttatgtaaaattctcctagaatcatttatgttatggaaaacaatagcttattaccggagctttagccctaaatactgaattcgttaaaagtgccttctgtaatcttaaaatgaaacccattatttattttgaagtaaagggaaaattaaatattcagtaatcttaaaattacatgtatttaattatagatgaaaaataattgagatataattaaccttctatttgccatatggggattacctgtgttgtggttatatttgtttaacttcattgactgatgtttcctttgtaccataaacatgtagtaaattctttctagtgtccaggaactacaatccgtggtcgagatgtgagtgaataagacatggttcttggacctgagtatcttagagtctttgagttcaaacaaacaaagcacacacaaaagagcaatgcagtgtcacaaggctctgctagctgacggtccagggcaccctgagggcacatcgcttaacaattgttgtgctttgcaacttgagactattcattgtcagtaagcatgtacaccaaaccaaatgcctcctgaagggacttatcaattctgcctgggctgagagatgtaggagaggaaaacctttgacctgggtcttaggtgggcaggacagggtgaatggcagaaaaggcagcatgatcaaagatgtgcatttgtggtgggaacctttcaggtgtctgggatcaacaccccactccctctcaaggagccctggccactcttgggcaaaatatgtgcccatttttgttgttgttgttgttgcatttaaccatccccataaggtctcactaaagctgaacctccttaagctaaagtcaaatctaggagtgagaactgactctggttctgagccattaacaatccattttactgcctgcttagtcatcctcctggctttttctctgggtgagctgtggcacaggttatttcttctattccgacttgttcacctggagttttccaggtccggatcatggtaaagtgtccctccatgaccaccctttaacttctattatctcactaaaatgtctgttctctaaaactttgcttatttttaaaaagtgagttgaaataaatgtgggttggatatgggactttagacttggaattcattccatctttaggaccactggtggtctcagtgtcatgtggaggtgggggcagatattgataagggacataggctaggctgataccttaatttgcaggaaaataaatgtgctatctcacacatgcttcagaatagataaatagtctgttagattaaggaaatgagtagacagcagggttcaggcttctatgtcctcttttctacaacctgaggagagtttactgacaccgtttcatgagtgcatacatttacctggtgcatatatttacctaggctaacaaggcatattcaacctcgttttgggggtagagttgacttaactgtgctcctccgtcatggccacctgtatccccacctgtgcaaagtttctctagttttattgctttgttatctctttatcactgtttctacctcctcacctccattctctagtaaacatccaatgtgtttagtagcttctttggaaataaatgtatccttctaaaataaagtgttatctgtgtacttatgctttcaataaagataaatgatattgtgctacatcgtgagtaagacgtcagggagttggttgacagaagttccggcactaatgacaaaagaggcatgagccaattgatagaaggccttgtaagtcatgctaagaaatctgaattttacccattggcaatagggggtaattgaaaggttttaaaaagaagatgtcgctttaggactcaagcttactttgacagcagtgtggaagatggctcagaggggtatatatgtaaatactaagcctggcacttagtacataggaactcctcaacaaagacagctagtattacttttcatgctttggtaatccctgtcctagtgaacacagtatagctttaagactaagggtatgttctgagcgattcccttaaggaaacttctactgaattataaaaagtatattggccttttaaaatagtagcagaactataataagaattgtgaatatgtttctttttgagtatatgaaacatttatttatgtgcatttgggatgctttctctagttttctgggctgtagggatgatgagtcgctttagctgtgttcatctgacagcagtggtgaggatcattttcacagacacataacagatctcacacatatccgttctaagaacaccagtataatacagttgaatttagataaaaattcaaaataaaataagcttcttaactagtggagcttattttcagagagaatggtattaaagaatctggttgtcatcaacctttttatagtgagagcattacctgggtgaaggtaaaatcttaaacccaaaccctctcccaccaccctttttttattgcaagggaacgtgacatcggtttatctggcataaggttgtaattaggtccaaagcaaaaagaaaaaaaattatagttcctcttccttagattttctaaaactggcagatggaggggctgcctgctgccatgtggcagtcaccacctgcacacttgctgtccttagagaagacttgctgagagagagttcttgtattagcatactatagtgtttatacttgtacctctgggatttctgtttgaagaataattggtctttgtatgaaaaactctaaatagatgatacgttgatgggccccattctctctttagaaggaaggtgggtgcagaagagagtaaaaagcctatgtaatggattgaggccaggttgttctggacagtttgtgacctccacagccatgtaggggacatctaggctgtccagagctggcctcacaccctctgttcatttggcagagctgtcattttcatccaaaggaaagttgaaggattctttgctcttcttgggaatttttgcaaagccttcataaatttctaaaagacattttttcctcaaagacatcaaattgttctcaaatttcttgtttctcaaggacaatcataaatattatataaaccagctgtgtttgctgtcatctttggtctcattccagtagagaatcaatatgggtaatttgtcagtcttcctaatcttcggtagcagtgaggtgatgttgtgttgttgctatttggcttttgtttttgtttccttggtattttttagctgccagatctcttggtatgtgtagaaaaccagattaaaagttacatcatattttagaaaagtcaaagatctaaaaatatgagatagagtttcatcctagaaaatgttagtccttttttctttgaaggaaagcaaattcttgattttctagttatgaattttcatacaaagaacttattcattctaagaaataactctatttcattgtgaggtgatgcaccctgcaacctggccaaatgctttcttgcagctggatgccaagaccttaagaccaaagtggaggactcctaatagatgcccagagaatatgggtttgagggatcaccaaacaagccagatatcatggtggttataggcgtagactttaatactagagagaaccagcttcaagttccaaatttacctcttattaattgtatgaccttgagcaagtgcttcactcttttcatctgtaaaatagacattaaaatagctagcttataatgttgttctgagagtgaaatgagataatgcctgtgaggagtataacacaatgcctggctgtgagtaactgggtagtaggtgtcagttattattgtattccaagagacctgaatttgttcatgttttttaggattccagcagactcagtcagtgtatctagagtcttccttgacttctttcttatggaatattctgaagtttctagtggcagccagaaatttcaagatacaaatgaatgatacttcaaccacaaattaaataagattctttaggttgtgccttctaagtcttgtggaaccatccaagaaactcagaaatgtctctgagtttaaaatacagagtaggaatgaactggaggccaactccccgttgacgaatgtgatttgttagcggagagccctatgctcatatggtatcttctctgggacaatctttggagcattggctccagtatacattttgcagacttcacgttttaatgcggccctccttttttgtctttgggcaaatattaaaactaacttccttgcagacttaaaactttttaacttaaaacaactttaacttaagctaagtgtgaaggatttgagacctttcactacaccaaagggatgccccttctattctgggtaccctgtgttcctcaacagtttatgatttttaaattgggtaggtctcaacttaagccagggtttctcaaactcagcactgctcgcattttggagcaataattctttgctctgcaggagagggggtcatcctgtgcatggcaggatgttttgaaatatccctctcctctgcctatgagatgtcagtagcagctctgtctcacccccagttatgataacagaaatgcttctaccccatggagcagctaagctgaatgttctcactgttctttgtgtgggagtctcttcagttaacagaattaaaacttgagatgttttttccctctattgaacggtctgttagaaactctttgttaccttttaatatgtccttatacttaagaaatatgaatatccacacaacttttctcaaaaatatcaacagtgaaaatcagggtctaggtggcaatgagtaaagcagggtgactaagaacataagtgatgaagtcagactggatctgaattcaaccttccctccctgctacatgtaagctttgtgatcttggtcatgttcctttaggtctcttaacctcaatcttcttatctcctgttatgatagattaccattaagaaataatgtgttcaaagtgatcaatacagtgcttagagtgtagaactcaatataaattggttatttgtattttttcattttaattgtcaaagaaaaacccctctctttaagtgaatttcatctggaaggatttcaacagaatacccagaatacagacatagctacttgctgcttacatatcttactgtggtggagtcagaaaggaagccaatgaaattggacttaactttaatatatgctcttttaaatgatgtgcgatatgtgtattgattgtcctttcagtaactttttgcaataatttgtatgggtatatcgaattataggagtagaatcttctttgtagtgaatgttagtattcttaagtgtgtgtctttttctctgttaggacaattttgtttttctgtagaagccactccccaaaagtgtaataggaagtaatggaaaaactaatacattattaaacagctgtgaaattttggggaatgcatttatttaatatataaggtatggctggtacctagagtggagtttaagtataggattttgttagtcttaggctgtgtaatttggtgaagagttaatgatactttttggtggtcttggaactacttatgaagactcactttttccatcattgttcaaatccagataaggcttgaccaacagcatatccatataatggaaagtcatgttttaatacagttccaacatttttgcaatcatggatctgcaaatctgtttattagtaaagcacatattacaacagagctttataacagtgcatatattgttctttatttgccctgtaacccacattttacatttcaaaagtttgcttaattaactaataaatttaacagtgcctttaattcagaaaaggaacaaaaatactttataatcttttcagaataattttctagtatttttagaactttaaaaagctgatagttaaaaatgtgcagaagctaatgaaccaattaattagttcccaccaatataatgatataccctgatgtaattgtgtgtttcatttctgttcttgaatatgattgaaaaccattaagaccatcaaataagtgtcttgttaatacgttgaaaataccatttctgtctttataatgacaatcaattacaaatgaagaaagctgacatttaccaatatgggagtttttattgttgtttaaaataatccagaaacaactacaaaggctttcttaatgttgacattttgaagagtggatcatatcaatttagatgatgaaatgtaatttctgagataatggatttgatatcaaaaaaagtatcttatcaaagataagatactgcagtagcaaaatgacatgattaaatagataccatgttatggttctacatggctatttctgttcaagacacttggtttcctggtaaacaaattgttaccttgcttattgccgaattagctggaaaaattttccatactttatttgaagtgtgtgtgcatttggatgtgcttttggcagagtttttaaagaagaaaagtattaatgaaaaggttttattttctcctcaaaatttatcagcgggaaaagtcattgcttgcacagatacttagaaacttttggtagcattagcttttcaattgattagggagaggaatagtgagctattttaattttctgcaccatttgcctggtgcagtttaatgaatattgattcatacagattaatttgaaatactaacattgtaggtggtgcacagaacatagaaaagctcatttattaatgatttcttgtctccctgattaggttagttttcacctggtattctgaaatcagataaagaagaaagaagaaaattaaaattcatttagtttcatttacgtgcctggcactgggctaggacctttcacataaaatatctaatttaatcatcacgacaatcttagttgtggaagattatgatcttcattttttttgtatataaaggaactctaaacctcattcttaatctcttttcctcttaagacttaaactttctaattcttttaccccaatgtgcgtaggaggagctaaataaatgttagcttggaaaaagcgattttctgtttggcaatatttagacaaattctgccatgtttttttgaaaaggctcattctcagttttttaaagtctgcagccagtgacagcttcttctgctagataactgtcacctgagatattgcgaagggctgcaatgccatagccacaatactttgttttcttcagaggcaggttggaaatctaggattgaagttacagagggcacaaaagagtttatcattttgtttggctctctaggcaataatttgatgctatttttaattaatgcaggaagcaaaacagaccaccacattttattcattaaagattgcatattcagggaactcaaattatttcatgaccctaagcaaacattaccaataataaagaggaaattgacattccctcaagggctttccaataatttctaatcacatcaaagctttgacatgtggcctaatactctaatcctttttctccagcctcccttggccattcctgctccacagtaacggggcaggagatgtcgccagtcccctagggaggataaaggatcagctcagttctttttctatgaccatcctttgctgtttcaatttgaggtactttgtgatcaccactgtcccacttaactgttctcaacatttagtctcactccacagacatttgcccaggaggcttagactgacatttgcaaacatactttgagttgtaaccttcttttccttcttttcttcttctaagatgagaacacctgaggtgactttttcttttaactctgagcttctgatagatgttgagtgattgatcttcctctagctctgaggactggccccttagctttaactggatgtttgaagaatgtgaagatgcacggtgaaggctcctctacaggcgtagagatagtgtcatgtttgacctgcaactgcgttatttgtttaaatcatttgttttaaaaaagagttttcttaggtgacattgtggttatattagaagaaaaaagggataggagcccatagtacctcagtgcttttctggcattgataaatcaccaggagcaagcaatctataatttcaattaatattgcattttcaagaataggaatagcaacattctaacctgtttcctagctatttaaatgttctctgaaagactggttgagaacaaaaccagaacacgaagtgaagacatttgacctctacactaaaaattgagttgtttttgtaattgtatcctaatatattttgaggattaagagcacataggaattcgtcttgaaatttctagctggttcaagcttctctcctttgtttttgacccaaaaacagaatgcacgaaaactactgaagaggcattaaaaataataataataaaggacatgggcttggaaccgaagacaccatgggcttctgatacctgtaagagggactaaatattaatgcatctgataagaaacaagtgctaggagactttcttcccagaaattataggtcaggctaatgtagggactgaaatgtgctaaaaaatgaatgtcaaatttcacagttacattacatagtgatttaaattagttcaggttagtttaaggcaaccatttgttcctagttagatctatatagtgaactcttatttcaaggagtatattgttaacttccctaagtacacaactgatataaaatcacggtaaagcctatgttttaagaaagaatttgagttttcttagggcaataagcaatactcattcgttcaagcttagcctgtagaaagtgttttataatacagcatttattaaataaataaagtgcctcagccaataattgtaacacaaacttctatttttaacatgtttcagaccctacaaagagtttgaacttacatgatccttataatgagtccatgaggtagataaagcatatgtgattatgcccctcatttgtagatgagtaatctgatggtcaagtaggccaaatgatttgtctgtggtcaggaccagcttcatgggcatgtgtcctgtacagccccacagattcctctgctcaaaagggctctgcacttggtttaatgctctgccatggccatgttgaaattttaataatttttgaacaacgggccctgtattgtctgaatgcaaatattacattttgttttcaaataaattcagaatcctaaagccggtggagtaatatgtaaaaaaaaaaaaaaaaaaaaaaaaaaaaaaggaaaacaggattaaaaggctattttttatcggactgtataaagttaggttgctaaaaaagaaaagcagatttgtactacatgcgaagagaatggaaacacttgatttaattgacacaagttgcttaatccctttatacctcagcttttcatttatggcaagaaggtagttatgactagtaatggttggtttgtggaagtgtattacataatttagtaaatgcattaggaggaagtgtgttatctatctatgacacaaaatggcttactaagtaatagcctgaaaaaggtgatcagaatttccatatttggatttaaagttggcaaagtgtatggctaggtggatcacaattctttatgatccacatggctgtgtagtacccctgtgcctgtcccataatttgtcaggtaataaaatcccagatgtggtttctgttttctgagatgagtaaagtgaggctcattcaatactgtttataaagtataagactctcttaagactgattgccatagcatagccatgtggaacagttgttttattccctaatgactttattatctaagcgggagtgaaagaaaatattattttggggtggaaggtggggttggaggtggaggaactaacagagtggaaataccaagctctgataccagtcctaggcaattcaacttagacaacactgtccagaaaagcagtgccacttctaattctaggaatgtctcttaaattgtaatgaaatgtcgctaatgtcacttctggccttaatgaaagaatcagataattgtgttaataaagacagaattggctatgactcctggaaacaaatacaaatatttgacagagctgacagagtaagtatgaggataatgaagataacaccttaaaatctaaatagattagaaaccgtataattttatcagtcttatgatgcaaatactgttgacaaagatggaaaacagtaagtagatgtaagtggattctttgttgtatttttatttttcttttataacaatattcttctctcctctcttcctcccttttcttccttcccttcttagaggatttaagacattgttatgatagagctggtaaggagttattcattcaatttattttaaatctccaagccagtattgcaggtctactatatgaaagacactagcttgtcacaggccttcaccctcaagtcacactggagagacacatgcacacaattaactacaattcaaggcagtgtgcaatatgctctgtaatggtggggtcagctttctattctagaaagatttgttccaatagtagtagtgattaatttatcaattgaaaaagtgttaagtttttgggacctttctagatagacttccacaagagactgtgtgtcttagtgagaaggcctgagacacagcagtcttggattcagtatcagcttttccctttgttaactatgtctttttgaacaagacattaacttcccaaactgtgctttctttatcagctgtatatcataatatcccttgccttttttgttgggttgttgtgattattatatcagatttctccaatctgtaaaacatttcttgagctccagttatatattccaggctgtgtgctaggcacctgggacatagatcagtaagatgctctgtgaacgtgatgagttcccagtgtataatgaaaattgctaattctgatgcttataaagggcaggcctgtgttgtaaatgagtgagaagatacattaaaaatcatggggactgttgggatccctgatacaatgtagaaagcatatccagttttgatgagacagctactgctacctttaactgattgtggttatccaggaatgctagtactacatttctaggctttgttttcttaaaatgtaaaatgtgcctattgttaatgttgacatccaattaaaaaaaactgtctaaacattttgtatgcaagatataactgaaaggtggaatcaacttatgagatggctgtttgcaaactctagtctagataggcatgtatgtgaatcaaccacagaggagatattaggtataggagtggaaaaagcttaacttccaatgagtctaggatggaataaaaaagaatgtgatttatgtgccatacgagacggtggttatattggattcattaatgcctaaaaccttgttcatcacaaaattggaggaggtgatgtaaacaaaaagagaagcatgctcaactcagtgaatctgatactgctagggagaaaagggaagacagaagtagataagaccagaagaaagaatgagcaagatggcacatggtctcacatgacatgctgaggaaactggatttttcttatcatcgtggggatagtgagcataggggagggtcatggtcagatttccattctagaaagattgttccagtagtacaatggaggaggactgaaggggcataaggctagagacctggagcctatttaagaaagctatggagtagaaacggaaatgatagaaacagaaattaatttgtaacttagaaagcgttaatgtgtatgtagtactattcatatatgatattgcccttttttgttgttgtttgtttgttcgtttgtttgcttttgagatggagtttcgctcgttgcccagggtggagtgcaatggcacaatctctgctcaccacaacctccgcctccctggttcaagtgattctcctgcctcagcttcccaagtagctgggattacaggcatgcaccaccatgcccaactaattttgtatttttagtagaggcggggtttcaccatgttggtcaggctggtctcgaactcctgacctcaggtgatccacccgcctcggcctcccaaagtgctgggattacaggcatgagccactgtacccagctaatattgccatttttaattgatattcaagtgcattgtctttcacattttaacatctctgcagtcaagatgcatcctgcagccataactatgggctgtcacagttaaattggttttagcttttctcttttatagtgatcatagcataatgacatttcctaatatcaacattgtctgatttgtgaaatggaataattatggactcctaaccactagactgaattataaagaggtgacatgaaataagctctaataattgataatcctacctacacccctggaagtgagcctttcaacgtttctctgctttggttaccaggaactcccacttcctgggtgttcatgagattagaggaggcaaatgtatatgtcaacaggagctgggaggtggtataaatgtgtgaagctgctggctgtcaaaaacagttgctgctcaggtctcaccaatgctgctggacacaagaaggagttagtgttgctgtattcaagagaagctggaaatctgaattttggtgaaatctcccaatttttatatgttggcaaaacattcagcattttttaaaaaccctgttcagaccaaacaaaacacatctgtttgctaaataagccaccaaccttgcctctgctaagcctcttgttgaaggagtaattttctgaacttttaatttatacagtttcttaatattaaatgctagatattactgaatgtcactgacaagcctaagtcacagctgggagatatgaactctcttccatgtctgtatcagccatctggtatagctctcagccacatgaatcctttagaaacagcagtgggtgtagtctcaaggcctgtgatctaaaatgggtagttattttgtcctaaaatatgtctgtttgatcatctattcaacaggaaaaattcttgagtgcagtgttttgacatagtataattatatctcatgcctcaaaatccttttcttctccagaaacaataacagatgctgttgatgtttaaaaagctgcctggaacaccaaagggaaatttcttaattctgcccttaaatagatttatcatttgttaatctccttcaatcacaagttttgtcaacattttcaatttactcttaataaatgcataaagaataaacatattattttcccttctgtaacaatcatgactgaatcaaattcaataaggtgataaaaattaagactatgggggaggacttctgcttgtgagaatcaaaggtactacacttgcccttcttctataaacaacctagactatagttataagacagttgttttcaggcattgagaaatgggcaataaagggctgtgatcattgagagaagggaaacacaggtgagtaccatattcacctggattctctaactgggacaatgaatgatgagattttttgagacgaagtagaaacaaatgtggagaagctgagaggtaacagagatctttgagggtaggtaggcatgtacaactggaagacattagatctctggccaggccagggtggagaaacattgctgatcacctcagatatttatttgagacctcaaaacgatcacacttaaataagaaggatcacgtcctagggcaaggaccatgacacagaatcaatatcaaaattcaaatagttttatcctaataacaaataaaaccaaacttgataggatcaaaaggatttatcagcaatgtaactgcctgctactaaaaaaaggtaaactctgtttaaaagtagataacataatccagactctctagtgtgtatcatttaaaaatatctatcatacaatttaagaaattactagatattcaaataagcaagaaattgtgacctagaatcagggtggggtgggtgtagggagagtcaataaaatagacttggagataatacagatgttggaattagaagataaagactgtaaaacaaattattaatatattcaagaacatgaagcaaaatatgggcataataaacatagagaatgtttcagcacagaaatggaaactatgtaaaagagcctaatgggaattttagaattgaaaagtacattatatgaaatttaaaatgaataagcttaagaatggattaaaggctgcaaaagaaatagtgaacttgaagacaaatcaatagaaattgtccaatctgaagaatagagagaaaagcaactggtaaaaaggaacagtcttaacaacttgtgggaaaatatcaagaaggctatcataaatggaatatatgtctcagagggagtggagagtgataaatgggcagaaaaaatatttacagatgtaagaggaaggcattttccaaagctggtaaagaacattacagattcaagaggcttactgaacagcaaacatggtaaatgcaaagagaaccaaaggtaggcatatcctcaaaagccagaaaccaaagataaagagaaaatcttaaaaggaaccatgaaacaaagatatgatatacagacagtcctatacttacgattttttttactttatgatgggtttatcagggcaaaatcccatagcaaactgatgatttctactaaatgcatatcatgtttgcactattgtaaaatcaaaaaatcacaagtcaaaccacttgtaaattgaggaccgttggctgtgttgccagcattaaatgcattttccacttatgatattttcgatatacagtgagtttattgggaccctgtaagtcaaggagcatttgcatacaggaaaacagtgaatatgaatgatgactaatgtcccatttgaaaaaaaaatgaagaccagaagacaatggaacaacaccttcaaagttccagagaaaaaataaaataaaacctgtcttcccagaattgtatatcttgttaaaatatgtctcaaaatgagactaaaatagacattttaaaataaatgaaaactgaaagaatctattgtcagcacacataaaccacaagtaatgccaaacaaactttttaatttgaaggaaaataacactaaatagaagttcagatttatagaaatcagtgaagagcatgggaaatagaatgtaggtaatatgagagacacatttttattctgcccttactatcttttaagtcaattgatcgtttaaagcaaaatcaagtccctgaagtaaaatataggataataacagtccaaaagataggaaagcaagaggaggtggttaaatggaattactgttttaagatgtttatattttacagtgtaaactgagaaaaataagatatatactataatcctgaggacaaccactaacaaaataataaaatatcccttaaagaccaagagaattgataaagtagaagattaaaaaataataaaataatccaaatgatagcaggaaagtagaaaaaatgaaacaattttttaaaataaggatgacttaacctaattatatcacaaataataataaatataaatgaactaaatactccaattcaaaggcagagattgatacattgaaagaagtttcaagattatctataggagatgcactttaaatataaagacaaatagaatgaaaataaaaggatataaaaagaaatattcaaattctaaatataagaaagttgtcttttatatttagctgatgataaaatagttcatgctatttttagtatgatggaaaacaaacttcaattaaaaatgcattgccagaaatgaaggggcatttcataatgatttaactagtttaatacatcagaaagtcataattctaaatgtatatgcagctactaacagataaggcaaaaattgaaggagaagagaaaaatagattcacaaagctagagattttaacacccccctctcaaaaattgttagaacaagtgaacaaaaaataaagaatatatatgatttgaatattaccaatcaccttgacttaattgacacttacagaacatcagattaaataactgcaaaatatattcctttttgagaacacataagcagttcttcaaaatagatcatatattgaaacataatatacatctctaaaaatttcaaactttatagtatgtattttttttcttattttactttaagttctgggattcatgtgcagaacatgcaggtttgttacataggtatacatgtgccatggtggtttgctgcacctatcaacccgtcatctatgttttaagccccgcgtgcattaggtattttcctaatgcgctccctccccttcccccaaccccccaacaggccatggtgagtgatgttcccctccctgtgtctttgtgttctcatcgttcaactcccgcttatgagtgagaacatgcggtgtttggttttctgttcctatgttagtttgctgaaaatgatagcttccagcttcatccatgtccctgcaaaggacatgaagtcatccttttttatgactatattgtattctgtggtatatatatatttatatatatgccacattttctttatccagtctatcattgatgggcatttgggttggttccaagtctttgctgttgtaaatagtactgcaataaacatacatgtgcatgtgtttttatagcagaatgatttataatactttagatataataccccgtagtaggattgccgggtcaaatggtatttctggttctagatccttgagggattgccacactgtcttccacaatggttgaactaatttacactctcaccaacgatgtaaaagcattcctatttctccacagcctcgctagcatctgtcttttttataattgccatttttctgactttttaataatcaccattctaactggcatgcgatggtatctcattgtggttttgatgtgcatttctgtaatgactggtgatgatgagcttttttccctatgtttcttggccacataaatgtcttcttttgagaagtgtctattcatatccttcgcccactttttgatggggttgttttttttcttgtaaatttgtttaagttccttgtatattctctatattagacctttgtcagatggacagattgcaaaacttttctaccattctgtagattgcctgttcactctgatgagtgaaccatgggataaagccatgggataaagaaaataattaaaggagatctggtaaatattttcaactaaatgataatgcaaatacaacatatcaaaatttgtgggatacagctaaagtagtgtttaaaggaaaattttagcattgaatgttttttaaaaaggtttacaattaatgacctacatttctacattaagaagctaaataaatataaaagaagagagatacaattcagtttcaaaggaagtagaaaagaggaaataaagataatgtagaagtcaataaaattgacagcaaataatgggaaaaatttaaaatgctaaaagttggccctttgacatgattaatgaaatttacaaacccctagcaagactgttgaagaaaacaagcaaaaaaatgaagtccaatattagggataaaagggaatatctctataaaccctatagatattgaaaagatattatgaacaaataacaattttgggctaatacattcaacaaactaaattaaatggaaaattttctaaaataattcaaacttccaaaagtgacataagaaataaaaatagaaataaccttatatctgttaagtaaatacattttctattaaaagtcttcctcaaaagaagactccagagcccagatattttcactgttgaattctacaaaagccttaaaaagtaaataatgccagtattacacaatcttttgcagaaaattaaaaaaaaatcttccaccttttttttttaaatagaaggaaattttttattaacttcggtaacaggcaaactagaaaatatatgctttgcgtgtctctctgtgtgtgtgtaaagctataaataaaaaaaaagagtacaaagaaacattctgtgaatgttgccatttgcagataaggacgaggctaagcagttgcacaatacagggaaggagtacattggtaggtatttcttatagatactttttgagtcattggactggattatctacttaataaattattatgtaattaatattaaatagggttgtgcatggaccaatggcaacagtgtgtcatgaaacagggtgatgactaatcgaattctctgcacattgttattatatgtttaattaaaataaaattccaaaatagaaagctgagtgctttctaagaaactgttttttttttaaattttattattattatactttaagttttagggtacatgtgcacaatgtgcaggtttgttacatatgtatacatgtgccatgctggtgtgctgcacccattaactcgtcatttagcattaggtatatctcctaatgctatccctcccccctcccccaactccacaacagtccctggtgtgtgatgttccccttcctgtgtccatgtgttctcgttgttcaattcccacctatgagtgagaacatgtggtgtttggttttttgtccttgtgatagtttgctgagaatgatggtttccagtttcatccatgtccctgcaaaggacatgaactcatcattttttatggctgcatagtattccatggtgtatatgtgccacattttcttaatccagtctgtcgttgtgggacatttgggttggttccaagtctttgctattgtgaatagtgctacaataaacatatgtgtgcatgtgtctttatagcagcatgatttacagtcctttgggtatatacccagtaatgggatggctgggtcaaatggtatttctagttctagatccctgaggaatcgccacactgacttccacaatggttgaactagtttacagtcccaccaacagtgtaaaaatgttcctatttctccacatcctctccagcacctgttgtttcctgactttttaatgatcaccattctaactggtgtgagatggtatctcattgtggttttgatttgcatttctctgatggccagtgatgatgagcattttttcatgtgtcttttggctgcataaatgtcttcttttgagaagtgtctgttcatatccttcgcccactttttgatggggttgtttgtttttttcttgtaaatttgttttgagttcattgtagattctggatattagccctttgtcagatgagtaggttgcagaaattttctcccatgtcgtaggttgcctgttcactctgatggtagtttcttttgctgtgcagaagctctttaattgaattagatcccatttgtcaattttggcttttgttgccattgcttttggtgttttagacatgaagtccttgcccatgcctgtgtcctgaatggtattgcctaggtttttttctagggtttttatggttttaggtctaacatttaagtctttaatccatcttgaattaatttttgtataaggtgtaaggaagggatccagtttcagctttctacatatggctagccagttttgccagcaccatttattaaatagggaatcctttccccattgcttgtttttgtcaggtttgtcaaagatcagatagttgtagatatgtggcattatttctgagggctctgttctgttccattggtctatatctctgttttggtaccagtaccttgctgttttggttactgtaaccttgtagtgtagtttgaagtcaggtagcgtgatgcctccagctttgttcttttggcttaggagtgacttggcgatgcgggctcttttttggttccatatgaactttcaagtagttttttccgaatctgtgaagaaagtcattggtagcttgatggggatggcattgaatctataaaataccttgggcagtatggccattttcacgatattgattcttcctacccatgagcatggaatgttcttccatttgtttgtatcctcttttatttccttgagcagaggtttgtagttctccttgaagaggtccttcacatcccttgtaagttggattcctaggtattttattctccttgaagcaattgtgaatgggagttcactcatgatttggctctctgtttgtctgttattggtgtataagaatgtttgtgatttttgtacattgattttgtatcctgagactttgctgaagtcgcttatcagcttgaggagattttgggctgagacgatggggttttgtagatgtacaatcaatatccttgatgaacatcgatgcaaaattcctcaataaaatactgcaaaccgaatgcagcagcacatcaaaaagcttacccaccatgatcaagtgggcttcatccctgggttgcaaggctggttcaacatatgcaaatcagtaaatgtaatccagcatataaacagaaccaaagacaaaaaccacatgattatttcagtagatgcagaaaaggcctttgacaaaattcaacaacgcttcatgctaaaacctctcaataaattaggtattgatgggatgtatctcaaaataataagagctatctatgagaaacccacagccaatatcatactgaatgggcgaaaactgtaagcattccctttaaaaatgggcacaagacagggatgccctctctcaccactcctattcaacatggtgttggaagttctggccagggcaatcaggctggagaaggaaataaagagtattcaattaggaaaagaggaagtcaaattgtccctgtttacagatgacaaaatcttccacctttttatgagggcagcataacactaataccacattattttataaatatttaagagaaaataatattatagatttgtccctcatggttttatttttgcataggtataaaagtccttttataattattagcaaatagaacccagaagtataaataatacatcatcagcaaatggggattatcccaagaatgcaaggtgagcttaacattagctgcttgattagtggaagtagccacatttagatattaatgagaaaaaatcatacagtcatctcaataaaggtagattaagtatttgacaacattcactgtccattcataattaaaaaaagaaaaataaatctctcagcaaagtaagaaagaaagggaattttcttaatttgacaaaccacatctatgaaaaaactacagctgatgtcatttttattgatgaaaaactgaatgctttcactttaagatcaggaataaggcaaggatatctgctcccactacttcaatagaatattatatttgaggtccaagctagtgcaattggaagagaaaaaggtaaagtttgaagtaaaactatttattcagataaaacatattttttttggtagaagtcctcagaattctactccccaccacccctacaaaaaaacaaacaaataaaaaactctagaagactagtaagttaatttggcaaggttttaagataaatgtcaccatacaaaaataagttgtatttatatatattagaagcaaacacccataaaagaaaattctacaatattattataattacatcaagaaataaaaaacaatgaactgtaactttaacaaaagacataaaagacttttactaggaaaacttcaaaatattgctgagaaataaaaggaaacctaaatggagtgatacacactgtaaatggattggaggactcaacattaagatgtcagttctctccaaattgatctatagattcaatataatcctaattaaaatcctagcaggatctttgtttttctttttttgttgttgttgttgtttggttttttgttgttgttgtttggtaaacatcagtgaattgattctaagtgttacaaggaaaagtagaataaccagaataccccaagttataattaattataagtaatctagagatgatttaaagtataagggggaatgtgcatagattatatgcaaatactataccattttatataagggacttgagcatccatggagtttggtgtcaatagtggatctgagaacaccaatcccccatagataactactgtaaaactacagaaatcagagtagtgaggcgttggcataacaatagagagaatagagtcctggcacagatccatagatcaatagttagttgatttttggcaaaagtactgaggcagtgcaatggggaaagaaaatcttttcaattaaaggtgctggaacaactacataaatacatggaaaaaatataccttgatacatgccttataccacaaacaaaaaaaattcaagatatgtcatatacataaacataaaagttaaaactagaaaactactagaagaaaactaggataatatctttatgacttgaggatgagcaatgatttcttagaacacaaaaaagcactcactgtaaaagaactgataaattggatctcaaaattaaaagattatgattatcaaaagacaccattaagaacaataacaaagcaaactattgactgggagaatacacatatataacaaataatcttgtgtctggaattttaaaaaaacataaaaataataaaaacaaagttatattttttaaatgggcaaaagaccaaaatgcttcacaaaagatgaatgaattacatataagtccctgcaaaagtactcaacatcattattcgtggaaatgtaaattaaatcacaatatgacaccacctcatacccactaaaatagcaaaaactaaaataattgacatttccaaatgttgatgaagatgtggagcaactagaactctcataccctgcttgtgggaatgaaatggtacaaccacattgaaaaactatttgacagtttttacagaagttaaacattgaggctcgagtaagatcatttgtgtataacacctgccagtctattcttttgcctttgttagtccctatccatcttgaagacccacttaaatttgccctcctacaagacggctccccagttttctccctcctttttagtcaccagtagtaagggattacatatctctgtttaccaaggatagtcctgatttatatatatggttttgacataatcgattaatcctactcaaaaacatacaggcttgacaataaattataaatttgtgctacccaaagttccatagttttgatcttagtatttagcctactttgaaaattatatatttatttatagattttttcttattttcatattatgttttaagttcattaggggccagaaccatccttatattcccataaagtgcctagcacagtgcctaataaattttcacttgatgaaatctaactccgttttaaaaatgaacagtgatttctgctgcttttaaatatacgactaaatattgctcacacccacacaatttaagcatccttttcttttttattattattatactttaagttttagggtatatgtgcacaatgtgcaagttagttacgtatgtatacatgtgccatgctggtgtgctgcacccattaactcgtcatttagcattaggtatatctcctaatgctatccctcccccctccccccaccccacaacagtcccggagtgtgatgttccccttcctgtgtccatgtgttctcattgttcaattcctatctatgcgtgagaacatgcggtgtttggttttttgtccttgcgatagattactgagaatgatgatttccaatttcatccatgtccctgcaaaggacatgaactcatcattttttatggctacatagtattccacgatgtatatgtgccacattttcttaatccagtctatcattgttggacatttgggttggttccaagtctttgctattgtgagtagtgctgcaataaacatatgtgtgcatgtgtctttatagcagcatgatttaacctcagtcttaaggagagtgttcgctgcaatgaaataacttttctagtacttcaaaattaattacattttattcttgatgctatttgagaatgcaagcataaagatgcagggtgagatttctgtgagctgctggtctagtgcatttgggtgttatgcctgacttcagggattacaacattggtgcttttacttctcaattaaaaagatttcccatagacagcaggaaaaattgcagggccattagaaaattacaaccaaattgtggaaaaacttagaagaaagaatattcattaaattttggtttgaaatagttaaaaaccgaaatgtccatcaaagtcatactgaacaagtaaaatgtggtatattcgttgagtggcagcaattaacaggacttattaagaactgtgttaatcaacaataatagatatcaacatcatgttcagtgaaaaaatgcaaattgaggactgaggtatatagtatagtaacacttctataaaatctaaatagtatataaaaacaatggtatatattgcttattaatattaagcataattgaaggtatggagatggaattgtgtagatacacattaaatatagtagatggtatggaatagaaggaaagaggactgggaatggaggataaaggttaaaaaagaacaatagctgtcttcattcatgtattataacattaaatggttgatcaaaaattcagttctgtgtgctgcatgcatgtgcacacacccactcacagaaaaaaaggaaaataaacttttcgcaagatgtttgattagttgatactaatagctaacaatatgatgcataaaatattttgaagcaaacaaagaggactgataagagttattaagaccctttattccatagttttattgttattaatgtattttgtgattgagaaccaatactcaagctatctgataatttgaggctgtttttgctttaccttgtggtagctaaaattcagcatttgggttccagagcttcttacgcttttactttatgttagggcagaagttttattaaatgtctgaaataagaggagccatatttaagccaatgcttatggagatccaagcactaggtccaaagtcacaactggatgctgttaggcaacaacttaaggaaattgttcaccaggcaagcaaggttttgagaaactggagccacaaagtagagaatataataattcatagtttgagttgatcagagttgaagagttaatagttagttgccaatataaggtcttgaaaaagggtttgtaggtcaggaatgatacctgtaagacagtggctgtagaataagctgacatgaggctgaaacaacaaatgaggactctatctgggagacagaccaaaaagttgacgtaaggcaccaagtaggaggacatgagaagactgaagtgaggtgcttacgcttgctttctgcaggattcagcaagtaaatgaacctgataagaaagagtgcagttgtggacagactgatgccaaaaccttgggcttggacttttcttaacatctggagtttagtatcattagtatcattccttgacatgatatatttgagatttattttaggagtgtaatatttaactgacttgggaaacctccagatctaacggcaacttctaaattctaaaggttagccattcttcacgttgtagactgaaaatgtcaaatcactaattaaatcaattaagtagctttcctccagttgtttgttgattttaaggttcagacttttttccctcttggtgaccaaagaacatcttgaagcattctagtgttgaagagcattgatgagttgcaggctaacagagatagagactgaaacaatgaaaagctgtcccaagaatgggccaagatgtatactgatattaaatgcttacagattttgacgttttttaggttcctgctctttaatatgacacactttcacccctaagaagaatcaattttgaggttataaccagtcttctttaataattcatataacctaaaagtcaataaaaagaagagcttattaaataatagcaagtcaatcatgtaagagtaatgtgatgatatatagagttgcacacattatattttcaacctatgattgacacttcttttaaatcacagctttgcttttaaaccttttccctaatgagcattaagaggatctttccagtaagcacatagattgaaaacaaaaactttaacaatcaaatgcaaaaacaaaagaataaaatcaaaccaattgaaatgttaaaaaatgattaatattttgacataactatactttgtaaccaagcatcttcaacattagaaaaagataacaagattttttgatttcatctcaagatacctcccatttaaaaaaaaaagtgaaactctttaatagcttacgtgacctaataacctcagcaaagacacttttacatggccatgaagcatatcattgcagagatccagctggagcggagaaacatggtagtcagcagtacttccagacttctgtgtgataagagattccatatctgaatttcccttgcatttgcaaggagtacattgtagacttgatggcaagggaagtcaaactttaatgcttccctcaaataatcacaaacatcccactatgtcctctcctagaagagacaatttctgatttataacctcccttaataggagaatgcccttgatgctaaattgtctgaacattgtgcaatctcatcttcattcccaaaaatattaatatgaacccagacttcctaattccattttgaatcagatttgatctgtatttggccctttgaatccatatgggtatctgtctctcagctagtgggtgaatagttatgtcaacactcctgcattgttttttggaggaaaaaataaaattaaaccaatttatctttttttaaagcaagaaagaagacaggaagaaaaaaatggtgagattatgggagaaaaagaaagaaaagttattccatatgaattaggcgtgaggagcatgttaaggccaactgacagatgaagagcccctttctacactacgtagtcctaaatgtggtagcagtgggctttatacttgaaacatattcaggaaaataaatattatatctggagccttcccctccatccataagtttggcatgcagtgccaggtatcaacatcaggtgttaatagctttacagaacaatgtgtggggatataatatatattttgtatatgtatgtacacatattatagtttatacgtagtatttcagttataatgtacaaatactacatatgattttacaaacacattacaggtttgacaactctctctttttgtgtaatgaaaaatatggtggtctatatttttaactttttgcctttaaatttttaaataaacaactaaccatattagacaaaactagagctcaaaaataatttttctagaattcctgttaaaactaatgtaaaagaaagtagtagaaatcaggctcaaagtattagtttcatttctcatcaaattcatggcagaaaaaattataaatggaataatttctataattctttggtctttttgctgaagaatatgttataaatggatagacatgagcagtaaagctttatttttttcagttgaatgactccataaatataatatcctctaatgtataatctccttgcttcttttgaatctcaggcaattttgtggtagttctctctttattccattttgaaatgaagatgcaacactgtacaagatgttctttctgtattaaaaattaactgttaatatgctttatgtcaaaatagtttttatttttatatgaacatgctgaaaatgtgattgctttctaaaattatatttacacacttaagtcaactatttaatttcaattaataatataggttatttttttgagaaactgttgaattgttatttccacataagttcttcttttagcttactctttcttgcctttaaaaatttatttctagtatacttgtgtcctgaagttgatcagccaaaaacgtatttattaattgtttcttaaaaagctttgctaagacaatgatttatatatggaatttattgataggttaattgaatgtgatgaggaaattaagaaatggatgccatttaatattttttatgtgaatttttgagtaacattaatttttcaattttattttccataagaatgaaaattagatttttagttttcttctgtttgaaaatctttctcttatattttttcttttttttaaaatttcaccacttactgttaaatgaacatagaatgggttgaatgctataagccacattttggtaatgtggtttttaatatttttaaacaatatagttcttttggaaatttttttttactgtattttcattgaactataatttctggacagtaaatttcacctattttattgcagttttacttgtttttacaattgtatatagttgtgtaaacaccataacagtcaagatataaaatagttctatcatgtgaaaaaaattcccctatactactttgtagtcaatccctctccaacctgtgagagtattataaatgagattcaaccaagttgttttgtgtaccctcattaattccttttttatttctaggtagaatttcaccatatggatgtatcacaaattgttaatccacttcacagttgagggatagtgaaactgtttctagcttttggtgattactcataaacctgctgtgacaattcaggttcaagtttgtgagtgaacattgttttgatcttacttgagtaaatacctagaagtgacatacataggtcatatgatatgtttaactttataaaacatcgtcaagctgttttcaaaagtggctataccattttgtattcttaccagtgatgtgtgagagtttcagttgctttgcatccttgccagcctttttttttttttttaggtcattcaaatagtgttgttgaagtcacaataaaaatataaagacacatctctaaatttaatgttttatttgagaagaaataattgcaatttggggtgtactttcagactaggtggtcttcagtatgtcaaaagaacaaagaggttggaggttgtataaaaagtagaaatgttatatattgctttttgagaaaggtcattggcactagtaaggttctgaggaactgataagctctgatcggtgagtgacagcagtgggccaaattagtactaaagttgcagcagttacaaagaaaactggtctctagttacaacaggcaagtttcagcagccggacttgtaaagaactatgtttttggagcaatgttatgtgtccctaatgtcttgccctgctgcctctagactgttttagttgggtatgaaaaggataatccaatctgtgtaatcagctttcacaatgtgtagttgcatcttcatgtgattttagtttccatttcccaaatgactaatgatgctgtggatctttgcatgttcttgtttgccagccatacattttctctggtgaagtatatggtcaaatcatttttcattggaaataattatatatttttatagtgtaaatatgatgttctaaaatatgtatacactgtggaatgactaaatcaagctaaataacatatgaattacctcatttttaatggtgtaaattaaaatttacttagaacttaagaactactcagtaattttcaagtatacaatacattattattaactatattattaagagctcttgcatttgttcctcctggctaattaaacatttgtatcctttgagtaacatcatatctccctagtgtctccactccaatcctctggtggttgtaggttgtctgttaactctgttgatactttactttattttgctgtgcagaaattctttagtttaattaggtcccatttgtcaatttttgtttttgttgcaacttcttttgaggacgtaggcaaaaattctttgccaaggccaatgtccagaaaggtggttccttgattttcttctaggattcttaaagcttgaggtcttacatctaaatctttaatgcattttgagttaacttttgtatatggtgaaagggagggtccagtttcttctccatatagctagccagctatcctagcaccatttattgaatagggagaacttttcccattgcttgcttttgtcgaattgttgaagatccgatggctgtaggtgtgtggctttatttctgggttctatattctgttccattggtatattgtgtccatttttaataccagtactatgctgttttggttactgtatccttgtagcgtattttgaagtccagtaatgtgatgcctccggctttattcttttttgctttggctattcaggctcttttttgaatgcatatgaattttagaatagtttcttgtaattctgtgaaaaatgatgttagtagtttgataggaatagtgttgactctatagattgctttaagccatatgctttgcccatgttttaattgagttacttagttttttactattgatgtgtttgagttccttatatattttgcatattaaccccttatcagatgtatggtttaaacatattttctcccattctgtaggttgtctgttttattctgctgattgtctccttggctgtgcagaagctttctagtttgatataatttcagttatctatttttgcttttgttagctgtacctttgaggtcatatccaaaaaattatttcccagaccggtgttatagagctttcttcctatgttttcacttagtagttttacagcttcaggtattacatttgtatttaattcattttgagttgatctttgtaaatggtgtgagataagggtcttatttcattcttttgcttttggatgtccagttttcccagcaccatttattaatgaaaatattccttccccattatgtgttcttggcatctttgtcaaaaaccagttggccataaatgtgtggatttatttcagggatctctatttgttccattgctctatgtgtttatttttatgccagtatcatgccattttgactactatagctttgtagtagattttgaaatcaggtagtgtgatgtttctagctttgttctttttgctcaagattactttgactatttggggtcttttgtgattccacaggaatttcggaatttttttttacttgtgtgaacaatgttattggaattttgatagggattatattgaatctgtagattgctttgggtaatatggacattttaacaatattaattctttcaatccatgaacacaggatatcttttcatttttttgtggtttcttcaatttcttttatgcatgtttatagttttcagtatacagatctttcacttctttgtttacatttatttctaagtattttatatctttatctattgtaaattgaattattttcttcatttcttttttggacagcttgttatcagtatagagaaacccaactgattttttaatgttgattttgtatcctgcaactttactgaattcatttattatttctaactgtattttggtgaagtcttcaagggtttttgtgtatataatcatatcacctgaaaatagcgacagtttaacttactcctttttgattcagattccttttatttctttgccttgcctaattgttctggctagggtttctactactgtattgaatagaagtggtgagattgagaatctatgtcttgttcctgattttagaggaacagctttcaactttttaccattgagtatattagctgtggaattgtcatatatggcctttattgtgttgaggtacattctttctatacgtaatttgttgagagtttttgtcatgaatagatgttaaattttgtcaaatgctttttctgcatctattgagatgatcatgtgatttgtctttcattttgttagtgtggtatgtcacaattactgatttgaatatgtttactttttcatcccaagggtaaataacacttgaccatgatgaatgagcctttcaatgtgctgctgaattcagtttgctagtattttgttgaggatttttgtatctgtgttcatcagggatattttcttttcttatagtggtcttgtctggctttgatatcagggtaatggtggcctcataaaattcgtttgatagtattccctcctcttcagtttttgaaagagtttgagacggattggtattagttttttttaatgtttggtaaaattcagcagtgaagcctttaggtccaggcttcttttttcttttctttttgttttttgatgggaaactattacaatttcaatcttcttactcattattggtctgttcagattttctatttcttcattattcagtcttggtaggttgtatgtatctaggaatttattcatttcttctaggtcatccaatctgttgatgtatatttgttcatactagtctcttaagaccctttacatttctgtactatcagttgtatgtgttccgatattttgcctatttttaatgtgttattttcttatcaagttttgagagttatttatttattctagatacaagtccttttaagatatgtgattcataaatattttctcccacactttcaaagagcagacattcttaagtgaagttcagtttatttacttgttctttcatttattgtatttttgattttgtatctaagaaatcattgcctaactaaagatcacaatcctttttttctatgttttttaagagaaattttacagttcctggttttgcatttctatctgtgatccattttgagtaattttttaatataaggtgtgaggtatggagaaattttgtttttatctttttacatatggatatctagtcattcaagcactaggttttagaaaaacttttttttgtcaccgaattgcctttttaccattgtcagaaaataatccatcatatatgtgtaggactatttttggatccttttttaaaaaaaagtaaatataaaaataaaattacactaggaatacaccaagaattacatgaagaatatgagtattttcttgtaaaaattataaaaatttagaaatatgtaacaattacagtaaatgcttacatagaccttactgtgccaagtatcactctaaatgctttaaatagattaacacatttactctttacaattcatgagataggtactgttattttttccattttacagataggaacactgagggcacaaagaggtcatgtaacttgcatggggtcatgtagctagtaattgttggagctgccttcttaatcaccttattattttgctcacctctaccccaatccaatgccttatctcgaatatgacaactgttctttatttcgtttgcaactttagctacctatatgaaacacatgcaaaaaacatttcatttgtattcatgtctattctttcttcaacaccgctctctcgattactgtagctttatagtaagtctataaagtatgtgagtcctataactttgaagagaatatgtattctgatgttttggtggagagtttttttttctaaatgtcacttagtataatttagttggtagggctgttctgttgttctgtaatccttcctgagagtttgtctgcttttgctatcaagtgctgagacagtgtattgaagtttccaagtgtatttatggattttttatttctccttttagttctataagattttctttcaggtattttgaaaccctgttgttaggtgcacacatatttatatttattatgttgttttgcatagttgacgccttcgtaattaatgtccccctttatccttttgctaaaatttacttagtctgatattaataagctgttcctgctttcttatggttagggtttgtgtagtatctcttttaccaggtttgcaccaacctaatgtatcattttattttttaacctatttatgcctatatatttaaaatgagtttcttgtacacagcatatagtttggtgttgatttttttttatccaatctgctctttaagttttaattaacagtttataatgtttacatttaatgtaattatatgattagaataaaaaccaccacattgttagctgtttcatttttaaatctattattttgtttttgctcctttgcaatccattcttgaatatttcattttagctccattattgaattattgttgatttttctattaaagaattagtcattgccataggttacataatatgcatctttaatcagtctatatttaaataatattagactaccagacatgtagtataaggatttaacaacagtatttcccaatttcttccttccatcatttgtgctgttgttgtcgtacattttttatttttacacatgctagaaacacaatgcatttttaatttttttaaattttaatatttttgccttagttatcttttaaagcaatttaaaataaggaaatgaattttatattaccttcatttattctatttcttgaaccctttattactttgtgtatatgtcataccttaccaaggttttaaaaatacatgttaatatttttaactatttgcatttacaacacaccagtctttgacttctcttggctctgttaaaaatgtgttgcctttagatagctgggaatgtgttttatttttataattctttgtgctcacttggaatttcaggaccatgggaccgagtataagaggtcctttggcctaatcttcaaagtctgacaagtttactgatcttaagctgtttctagaagttctctttctgaagttgaagtgtaagcctgtttggtctatatttctcttttatctctcttttactcttttgcttctcatgtggtgtttggagcatttggaccacgttgtcctgctttttaatgctttcttattaataaccctgtacatatgtgaaaatagttattgaatgccttcttaccatctgcttcacagattaccatctcctctacacgttaaaaagtaggaggggtgtcccagctctcttgccacactgtggaagtacagactatatagagtgcttaacctaaaccctctccctgaagtcatatggtttgttttattccagacatgtacctttaggaaagctctgggattctgaaattgggtgggtttccttcaaaaacaacattcacctgaggacctgatttattccagagccttctcaatgcagtagccctagttatgttacttgtatagggataaggcagaaggaaaagagcaagctggaaaacctagaattttttgagcaaactgtgttcaattgtgataaaaaaaaaaatactcttgacagctagggctggtcctataatagaacttataataagcacttgtcagttatgtgggttattgcaagatacacttattttcaagctttcccctttaattcatgtccaaagcataacattttctttttgtctttttccccctcaaggggtgctacatccattgtgtacagatgcaaacagaaggggacccagaagccttatgctctcaaagtgttaaagaaaacagtaagtttatttcttatataatggcatctctaaggggcctgtgacctggagaaggcaggaacctgatttgaagaacaaaggggccagagagctgctgtgtgcaaataacccatttgactcttgattacgggagtgcaacccaaataggttgttgtctggtggaaattgcatgagtctttgaaagcagctggatctcagattggatgtggttctggggagaagattggcaaggaaaaacatttagaattggcaggtagaccttattttgcatatcaggcatgttcttggagattttatatatatatatatgtatatacacacacacacacatacacacacacacactatataataatttcaatatttaaatattaaaaccacattttaatattagaaaagcttgctattgaaaagaatttgaaataaagcacaaatgtatttgttaaaggagtcatcagattctaatttgccttaattttcaaatgttgcacttgcttcagtagagtataattgaattttattgagttaatttttctgggactgaacctgctcatctagaagtttgtacttggaaaaaaaggaaggtttttgttttgggggttgcttcttttgccctacactcatagataagctgaggaggcaaaagtgacttaggcttatctctaatgagtaagaaacacagtagatgggagttcaaaatataaatgccaacacctgtgtaatactgtctatacccccagagagtattttgccattttaatgccctacttggattttgtgttcttatgcagtttctactcataaaaccacaaaaagacaagatattcttttataacacattcattttcaaatttcatgtgaacaaatatgtgaaatgtatgtatatatatgaaaacccagttgtaaagtatgctgagaagtatcataaattttgaagtcaaatacatttttaggccaaggaattttttttcctcaaggcagcttaaaattaccagctgtttatgtattgtctggcacagggaaattttagaatctcatataatgaagagcataatactacaaggttttcagctaaatagaaatagaatgatatttttaaacaatctgttagaatttacagtcatagcaaaataacaaaaacaatttaatgaaagtcagtaataatttcaatggcacttgctactaatgaattctatattctgaattttctgtttggtgtaggcaatgatttaacttattccagaatgtagaggaatctgttgattgataagatttggaattttcccttaatttagtttcttacagtcataaaatttatctgaagtaaggattattaaaacttttatgaaatagaatttcctgttaaatatttagtttgtatgaaaataaaacggcatattttagcagtagtcacacacaagatgttttaggacttgtttgtacgatttcttattggttaaaaaactgtcagtaaaatttgtgaagggctatttgtttttcatagttgaggaaactttgagagggaagagacatatgaaagtctaggaaataaatacttagaaattacatgtgaatgctcaagaatccccaagggcaacaggctggtttaaaggctggcttatgtcaaaagtctttggataaattggagaaggaggtcagtgaagccatttggtgggttcatgacgtatattcgttgggcaagtgccgctctggttcgtccttactgtcttctcgctgttgtgaaaacatctccctcagaagacaggcaggaagagcatgtgaacgagaatgaagtgtcagatggagctgcagaatggtgctgtaaggcagatgttgtcaaacacagttactactgtgccaaatggaatgagagaaaatgccctggaaaaacctcagctttgaatgtgaattagatagaatccccagtattgtctcctaggataaatcatgcacagagatgtgtaaacgagagaaatagcagacaaaacctcaaagaccagttgcctctagcgtttcattccatataggtcacggagactgaaacttccttgtctaaaggaaatgaatgaagcctaagaatctgtttatagaggaaaagtgatgtggggaaaatgttttcttagagaattcagccaaggggtctgctcctgaggaaaaaaaacaaaagggttcagaaaacttgaattatttatgtaatctattaagctcaaccacataaaattgcctttattaatgcaattttttacttatttcttggccttcaaaaatggcaattttatgtggtccaactaacaactttgggactactatattacttcaatggatggtttcttcagtcctcattttatgactagccctaagcccaagaggcttgaaactttatctatctatctatctatctatctatctatctccatccatctatctatttccaaccatcttgtttttctagagctggtccaataaactaccacaaactagatgacttaaaagaatataaatttattctcttacaattgtggaggcaagaagtccaaaatcacagagctggcagggttggttccatcttagggctctgagagaagatcttttccatgcctctctcctagcttctggtgacagccagaaatctgtggcattccttgacttgtaggtcatcattctaatatctgcctccaattgttactaaaccaaacttgagtcagctcacccagtgtgcaaaacaaacaaacaaacaaacaaaaacactaacaccaggacttgtagtgagagaaagtgaggcgtttattgcagggtgacaaacaaggagaatcaggcaactcacgcttaagacccaaactccccgatggcttatgagcacgggtacactatgaaaggtaagggtacatttcaggaaagcagaagtaacaggcaaaatcataaatcaatatatggaggttatgcattggtttggccccaaaaggtgggagtatcttaaagtagaggcttacaaacaggtgggttctaagattctttgatttacagttggttaaggaagcaatgttttgtctaaaaacttggggtcagaagaaaggaatgttaagatctagcctttgggcatgactctacaggctttcaaggaagaaatttagaataaggacagtagtcagcattcacttcttagttcctccttatctgaggtctacatgacagtggttggcatttttcatctggtgagggtcaaggtttctgaataacagctcaaggatatgagatgctatctttaatttctataaggaaccaaacatcttgtgactctaacttacttgaatgacaatcgtttaagctattattacctttttaattagtggattatttatatttacttttcaaattgcttgtggcagggctagctagatgcctgaaatctccctagaaggaactcaaaatttttcttttatctccatgctagggggccaggggagactggcagtcccctaagtggggtctctgctccctctcacaatgtcacatggccatcttctccctgtgtgtctttatatcatcttacctctgtgcacatccctgtccagatttctctcttcttataaaaacaccagtcctcttggattagggacccaccctactccagtatgacctaatcttaattaaactaattgtatctgcaacaacacaatttccaaataaggtcacattctaaggtactgggagttaggataatgtctgttttgagggagatttaattctactctgtctgtaagggaggacctctaagatgaatttcaaaatattccattcaatattttatttgaagatgagtgaaacatatcacatttaagaaagttaataaggaaacccatctaatttataaataatttaatgtataaatatttttaagtccgagaaagatttcctcagactgtctcagacttaaagtgagagacttttaaaattctcttttacagctaaatttttgataacatgaatcttctttgtcaggatctgtttaaacatttttccatgggagtttacccaaattccattttgcggcaatatgaaggtcttctctcatagcttaataaaataattaggaagaatttagtttacactagcaatgagacatatttttccataaaaaaccctgagcttcaatgagattccattaagtactcaaatatctgggttttagtagatgaatgcgctgacttatccataggaatacaggttaaagcaccagctcttgtggagaaatcttatggtggtcaggtgcaggacagagtcaacactgataattaacatacagtgaattgtcatgtttagataactggatactatggatagtaaaatatccttgtgataaattaacaggtaattataacatgagacatgttttaagttaatatatattttataaatgggtataacatcatgtatttaatatatagagacctatatttcaaagaattggaatgcattaaattacatatcagccagcatcataaagtctgcaatttactttcaaatggttaaacaacaacaaaaaaaatggtttgtgtatgcacaggttgggggagagaggaaaatcaaatatggcaaaactaaacaattattgtagtatattattattcattctggtatttcaacatttcagatacgtgagctttctcataatgagaagtctgtggagaaacataattcaacattgagaccctgttcgcataattgagcatttcttctggctattcagaaagcatttcaagatcttgcactctctaaatgttatgacaaacatcagtgactcactgttataaatgtattgaagtgccagaaaatagaaaatgataactgaaccactttttattgtattgaaaaaaccctggatatttcctgtaacaatatccatttgtctcattgtgccattaatgaggataaagctttcatggtgttaactgtaaacaagagaggaaaatggattgaagtgccttttgggttgtttgtttcctttttttccacttagtattagtgattcttgtactgaagaagtcatcaattccctagacatgacattcatcctctcctcttgtgtggggatggcctaagtgccatttttgttccccatgcatgctacattatcttgtatatattgtctaatttgcttgtgattatcggtggaaatttaactttgtagtttgtaaagcatgaatcaagggtgaaggaaacaaggctaacttttttctttcatgcataagcccttcagtatatccactgtatgtgatatttgaagtagagtagaaagattttattaagttactttgggtctttaagggattttgacagacatggctagtggggacaaccagtgttttataagatgtaacctttttattgttgttaaatgatgaacttaaaactatatcaaaggaaaaaaataaattcgagaaagtgtcaaaatttgaacaaattaagcagttggaaacttcaaactggactgaactctgctgagttaaatagaatgccagcttttgaagaatgacatcattatgatgatggagtctctatttcaggagtaattcacatgaattatagtttatctttcttccttaggagtatatacctcagagtgtatctaaatgacatgtcagactataaatgtgacttattttcaaggagaactgattgagatttaagaaaattatgctccaccaataatttatagtatctctagaattttggaaacagatatttgaacttcagaattcagatgaaatttctaactatgtagctcaactcttggaaaagcttgtattaatctaactataaaatacatgcctctcatgaaatacctagtattgagtctgagatctaatctccgtgtgtaaaatcataatttctaggtattctgactctccttaaaaattgctatgtagtagtggggtgatgttgtggtctgtggtgccagacagactgagtttaggattacttctgctacttactgattgtgtgactttagaagttatagaatatctctcaatctgttttttcatctttaaaatgggtttaagagtatctaggtcagagtgttctactaaagattaaaataaatatttcccaccacataggaagcatgtaatatacatgatgaacattattcttattaattgcaatgtgttcacacagatatttcataagagtaccagttcattctatataattttaatgttctcattagcttgatttaaagtcaaacagtgagtagcacagacgatttttacatacttctctatgaacaaaattaactacattggttttggagtacttttgaaattactgctgaaaatggatacatattctcttattgctatcaataaaatgtaatgtggcacacaataaggatttcccatcctgtgaccttctacttaggtacatctcggatgcctataatacctagatttagaacactttcaaccctaagctcttttctgtgtgattcttactttggagcagtgtgcctagatctacaatagaaaaacggttccaggtctaatttttgtatattttagttattataataccagtaaagttctggaaaggttttgcttgagtaatttaatgaacattcacctagcaaatgtctcaaaattctacaaaattttccataaatgttggtttgatttttttattctcttctcagttaatcaaagaagcacacattgtgatttgttaatcattctgtgagttggtttttaacttccatttatttgtccttacattcttatgagttagcatttgagtatataactatgatgttgcagggcaatctgaagattaagttacagactacataggctttgttccaatttcttggtagatgaatctccaggatgtctccattagagattttcagatttctcagttttaaaatggggataacaccatttataccactgggtaaactgaggattacttgaagttttatatatttttatatatgtgcatgtatattgcctggcatatattaggcattcttcaaatgtgggctctgttctctgttctagccttctttttctttgtaacttttacatctcatgtcaacttccccagaagatttctttaggaagaatatactacatttgtatagagaactatgtttgaatctagatgtactgtattaactggccaagtgatgagcactggccaattgacagacattagctcccacatccaccagtctttttacacacaggtacacatgtgtgcatatctctttacaaggaaactggcaacttggaattttctttttctttttctttttttttttttgagacagagtttcgcttttgttgtacatgctggagtgtgatggcgccatcttggctcactgcaacctctgcctcccaggttcaagcgattctcctgcctcagcctccttagtagctgagattacaggtgcatgccaccacacccggctaatttttgtatttttttttttagtagagatggggtttcaccgtattggccagactggtctcgaactcctgacctcaggtgatccacctgcctcggcctcccaaagtgctgggattataggcgtgagccaccactcctggccacaacttggaattttaagtcacttcatgattttaaaatggtactcataaaaataatatgtcatactttgtgaggtaggtgctatcattattttatagatgcgtctccaagagattgaataacacgaacttggtggcttatacgatagaaatttatttttcacagttctggaggctgagaagtccaaggtcaaggtgacagcagatttggtgtttgatgagggcactctttttggcttacagaagactatcttctcactgtgagttcaaattcaaaagagtagagaggaagtaaactctcttttgtctcttcatataagcgtgctaatcctatcatgagggctctaccctcattatctaattatctccccaaggcccatctccaaatgctatcattggggatttaggcttcaatgtgaattttcaggggacacaaatacttagtccatagcaatcaccaacttgccaagtgttgatagccttaatgatataaaagtatgtagaaatcaattaagaaaagcaccaaagcccaaataaaaaatgaaaatagctattatttattgaatgtttataatgtgtcagagactggtggattctcaatttcaaggtgagaaaactaagggtcaatatcttgttcaaactcatgctgttcacaaatggcaaaatatttggaaagatacttcttagaaaacattaaaatgatattttatagccattaacaataaaaataaccttaaattaataagacaatactttttactactatgttagtttgttttgtgctgctataacataacatcacagactgaatcatttataatgagcacaaatttactggttcagttctggaggaggctgagaagtccaaaatcaaggggccagcatgtggtgaggggcttcttcctgtgtcaactcatggcagaatagcagagagagagagagagagagagagagggagagggagggagggaaggggagagggggaaagagagagaaagaaagagggtaccaaactcatgcttttataagggaactactcttgcaataagagcattaatccattcatgggaatggtgcaccatcatccaaacacctccctttaggccccacctttcaacaccacagcattgaggatcaaatttccaatacatgaactttggggaacacagacaaaccataccactactaactaaacaaagaataaaaatatctagctttgcccaggatttgggaaaaggattccctcacattctatggatgggagtgcaaaattgacacagactttatgaaattgttccccattcctcattttgcatcacctgctataggaaacagtttctcagtgataagggtaggtgcggttggaggtaatgcacagagtatatggtttatagaaagccaggtacctaaatacagaatctgaaatggtaataactacaatatattgagcaatcactgtgtgccaggaactttacatacactattgcaataaaaatgtgttgcatgcaaaaataaataatctcatgtttcctcacatggtctttgtaaggtcagtcttggtttctgaggctcagagaggctagctacccacaaccaccgagatagtaaatacagagcgaggttctggaaatggatttgtctgatttcacttttttttttctgtctcaccaagtgaaaactacatatattaatatgtgactgcttgaggtccttgctatatggatgttattatcatcctccaaggaaagtagctagatgtgtcaacgaataaaggaggaaaaataacagtaggaaaaaatacctgtaaatagtttgagcagcatttaaatgagaattcttggtagaagtaaaattgtctctgtagattatatgattttaaatatagaaaactctaaagactccacaaaagaactacataagaactgataaatcatttcagtaaagtttcagaatatataaatgaggtacaaaaataagttacatttctatacactaacaacaaactatctgaaaaagaaattaagaaaacaatctcttttatgacagcatcaaaaacttaaaatgcttaggaataaatttaaggaggtgaaagatctgtactctgaaaactgtaaaacattgatgaaagaaactgaaagcacacaaataaatggaaaggttagttcatggagtgaaagaattaatattgccaaagtgtcagtactacccaaagtgatctacagattctgtgcaatccctatcaaaattccagtgaatccaaaggaaataaggtcaatatattaaagaggtagttgtactgctatttcattatagcgttattcacaacagctaagatgaggaaacagcttctgtctgtcaaaagatgaatgagaaaatgtggtatggataaccttaagaaggaaaaaataatcctgccaattgcgacaacatgaatgatcttggaggacactatgctaagtgaaatatgctggacacaaagtcaaatactggacacaaagtcaaattacaaattacatgtgtaatttaaaaagttgaactcagagagagtagaaggatgattatcagggattgagtgcaggaggaaatggaggtatgtaggtcaaagggtacaaactttcagttgtgtaaaatgaataatttccaaagatcaaatgtatagtatgggaagtataattaataacactgtgttggtatacttgaaattttctaggagtaaatgttaaatattctcaccacaaaaaaaaaaaaactacgtgaggtgatggatttgttaattagcttgattgtggcaatcattttgcaatgcgtacatcagaacgtcacattgtacactaaatgtgtgtaatttttatttctcagttttaccactataaagctgaaaaatagctacttgggaggctgaggcaggagaatcacttgaacccgggagatggaggttgcagtgagctgagaactccagcctgggcaacagagcgagactctgtctcaaaaataaataagtaaataaaaattacaaaataaataagactcctttgggccaagaggaggaagcttatgtagcctctcacaccttagtgagtaggaaccaccaacctctccagggagatcctctacactttgccactgtgccctcaaccaggcagactcaggatgcagaatggagattccctgctctgtctttttctgcctaaactttggaaacatggaaaactgacaatgagccatgcattttctaattgctatgatgtacataagagggatggatggttcaatctggatgaaagatatgcatctattgtatgctgctattggccacttttaacttcttactgatgtgctctggaagtacaggcagggtcaccttggtcagtgatggataagagaataataaatcaccagctcaaatagactttttggggccaattgagatctcagaacacattaaggaaagtagctttcagacaatgagccgtgtcaagtgaagtgaaacttcttcaaggattctgtcagttggaacctattgattttcatagggactatcaaaccaggtctcctggaataggaacaggaatatttctatccagtttgtgacaagaatatgtatataagagagcaaaggtgacagggaggaatgttaaatcttggcctgatttgtatgctttaccattcaagaatatacttgaaagtcagaacattcttccagagcattgttatgatttgatgcattttctttattgacataaacattggtggaatttattacaattctgcattctttttatttatttatttatttatttattttattatactttaagttttagggtacatgtgcacaatgtgcaggttagttacatatgtatacatgtgccatgctggtgtgctgcacccattaactcgtcatttagcattaggtatatctcctaatgctatccctcccccctccccacaccccacaacagtccccagagtgtgatgttccccttcctgtgtccatgtgctctcattgttcaattcccatctatgagtgagaacatgtggtgtttggttttttgtccttgcgatagtttaccgagaatgatgatttccaatttcatccatgtccctacaaaggacatgaactcatcattttttatggctgcatagtattccatggtgtatatgtgccacattttcttaatccagtctatcattgttggacatttgggttggttccaagtctttgctattgtgaataatgccgcaataaacatacgtgtgcatgtgtctttatagcagcatgatttataggcctttgggtatatacccagtaatgggatggctgggtcaaatggtatttctagttctagatccctgaggaatcaccacactgacttccacaatggttgaactagtttacagtcccaccaacagtgtaaaagtgttcctatttctccacatcctctccagcacctgttgtttcctgactttttaatgattgccattctaactggtgtgagatggtatcccattgtggttttgatttgcatttctctgatggccagtgatgatgagcattttttcatgtgtcttttggctgcataaatgtcttcttttgagaagtgtctgttcatatccttcgcccactttttgatggggttgtttgtttttttcttgtaaatttgtttgagttcattgtagattctggatattagccctttgtcagatgagtaggttgcggaaattttctcccattttgtaggttgcctgttcactttgatggtagtttcttttgctgtgcagaagctctttagtttaattagatcccatttgtcaattttggcttttgttaccattgcttttggtgttttagacatgaagtccttgcccatgcctgtgtcctgaatggtattgcctaggttttcttctagggtttttatggttttaggtctaacatgtaagtcttttatccatcttgaattaatttttgtataaggtgtaaggaagggatccagtttcagctttctacatatggctagccagttttgccagcaccatttattaaatagggaatcctttccccatttcttgtttttgtcaggtttgtcaaagatcagatagttgtagatatgcggcgttatttctgaggcattcttgttcatcttctcattatatcaatctcgtttagatattttgttgccttttagaaaacaaacactataattcaaaagcaggctgatgagagagacagaaagacagagagagagagacagacagacagacagaccatgagctagagcaccaacaggcctgagtgctgttgcccaaaagatgaatttactttgctggtatgccatccactcaaattatgacatttaaccccttagtacttttataagcattgggcaattggaactaaagtgattttcactctttaaatggaatctatggagcagaaaaaggagatatataaccaactaaaaacagaggaaacctcagaaggagagcttatgttacttcactctggtagaagcaggagtttaagaacttctcagagagctcagtggtaaatgccttgttaccaaaggggagctgctggggcactaggaaagttgagagaagctcagggtcaggagatcaaagctggagagtgctgtccaatggaccacaaccaggagagctgagagagccagaaggacacaggctatcagcctcaaagcagacttaggattcataccttagtgagaaggggaaagctatcatcttagagttaacagggaaaaatgtgttaataaattttaatttgtatttttttatggtacaaaaagttgaatggtggccagagttgcatatatccagtcactgtaaacaggacgaaaagaaagctaaaaagatcaagtcatggaactccaaaaccatttattttctagaagaggggaaatgaactatgtacagaggatactaattaaaagagatccatatagttttcagtactgaattagttttcaacgttttttaaaattaagtactcacaactcaccatatgtcatgtcactcactttaacggtaaaggagcataatgctaataagaatggaacccacactgaattgttaaacactatgtaatgtagtgccgctttcacatgttaacacaaagctccccaaggaagtatttttcttatgagagtcttagagaagtgtcatgttcaaaatacacaatagcatgtattctagaactcagggcttttgaattccaaatctgggcattttttatagatgccatgaaggccctgatagagacaaaggcaaaaaagaattcaatcaggaatgattttggtccagatttgggactaaaactagatgtttctccttatttacctgataaaggatgattaagcctttattgacacaggcacagagaagcggagtgctgcttgtaagttacactgtgaagaatgggcaaataatattcgatgtgtgcagagaatgcaagcaacatgttatctttgccaaattctgttaaaacctgagtttagtgagtctcacatacaatatccactggcaaatgaaggaaaaacaactgggaactgtgagatatacagactacacacatggcttgatgtgattcttaactctttgtcttagtggtaggtgggatgcagtatgaacacaggtgtggctatatgggtcagattccaatttccttcctactgtgagaatatgtcacaggataaattcagttaaagttacctatacttatctctaccccaaagttgaagagtatcagatggatagttatatctaaaagaacacattagatggatgtttttccccgacacaacctaccaatctgtcactggcaggatttttctttttttttttttaacttttattttaggttcaggggatacatatgcaggtttgttatgtaggtaaactcgtgtcatggggatttgttgtacagattatttcatcacccaggtactaagcctagtactcaatagttattttttctgctcctctctctcctcccacccttcacctccaggtaggccccagtggcaatatgtgttgtttgtgtccatatgttcccatcatttagctcccacttataagtgagaacatgcggtatttagttttctgttactgtgttagtttggataatggcctagggataacagccttcagctccatccatgttcctgcaaaggacattatctcattcttttttatggctgcatagtattctatgtatatatgtaccacattttctttattcagtttaccattgatggacatttaggttaattctatgtattagctagtgtgaacagtgctgcagtgaacatatgtgtgcatgtatctttataacagaatgatttatattcctttggacatatacccagtaatgggattgctgagttgaatggtagttctgttttcagctttttgaagagttcctttctacaatggttgaaccaatttacactcccaccaacagtgtatgagtgttccctttcctccacaaccttaccagcatctgtgatttttttgactaatagtaaccattgtgactggtgtgagatggtatttgattgtggttttgattttcgtttctctgataatcagtgatgttaagcttttattcatatgcttgttggccacaggtatgtcttcttttgaaaagtgtctgttcatgtcctttgcccactttttaatgggtttttttgtttttttcttataaatttgattacgtttttaagttcaggatattagacctttgccagatgcgtactttgcaaaaattttcttccattctataggttgtctgtttactctgttgagagtttcttttgctgtgcagaagcacagcaaagagcttctgctctttagttttattagatacatttgtcaattttttgcttttgttgcagttgcttttggcatcttcatcatgaattccttgccaattcctatgtccagaatggtattgcctaggttgtcttccagagtttttatagttttgggttttacatttaaggctttaatccatcttgagtttatttttgtatatggtgtaaggaaggagtccagttttaatcttcactcccagcatttttctttgagattttaggatcagaacaatctagaactgtttttaccatcaggacatatggagtgtcctgatcagtttcaaggagtggcatatataataaagtactataaactgtatatgataccttttattgataaatcaaagcagatccaagattatcatcctcatcttttaaattttgatgtatttttatggaggggaatgtgggtgagtgtcaaatcaaaatttacccaccacacttacatctgcaaaaaaatgtatcagtatcctctattttctacaacagcatttactctgaacctgaattcctcttgctatcactggatacctgggaggaaaacatactaaaaatttccagtcaaagatatcttagtttattcctgtttaagagtctcttttagtttaaaagtatttctttagggtgaagattgagttcatctgtctctcagagcaatgttttccttaccctgttatttcccactggcctctggcttagataacccagggaagcgtggtgagcatgaagaggccacataccagggccactgccagatgctgtctgcagtagagacctggataggtcaggaaatctacagctacagatgactagggacagatcatgtgctcactggctctatgggagaggccaataaatactgaacacacactcagagaccaaaccagtccaggggtcacaagccccttggccaccatatcctttgaaaccggacagtcttggaaaatatcagagatggagaaataatagggcataaacatggaatgtgtgcatactacccaattaactcttacaagcttttaaactgtgagcagttttactcagaagaagagacttaacagacatgctgatgagagagtgctttgaggatgtgcacaccactgtatggagaaagatgctgggaaggactgagctgacacacttttgtttatctggtctttcagagaaaagtgaagctctgggttcaattcatgttaaaatgctacctcagaaaatctagacttctacatctagaaagaatatattgctatggggcaacactgacaaagaaattttttttatcaaacctcaaatcattaagatctctagaatctctgtctttcccattctaaaccaagagtatgattatattattttttggttcaacattaatttcttctgtacttttctggtcatgaataactctagaagaaccatgtgagagcctctctttccaccaagtttttagcattcatgaacaacattagccaggttctttgaaaaaggtctgaattgtccttgaaagaataggcagtgagctaagctttcttctaagagcatccaggtttttattttttccattgaaccctaagatgtaattgatgaagcttaaaatgttaatactttcaggagtattatttttatttttattatttaacagtatacaaaatcataagcttttttggctttgtaactaatagaaaatcacttagttttaaggatcaaggaaaagatcaaaggaatatctcagggtctctgagtgtatataatattgtgcccctttaatcactcaaattaaagtttgggaattgtgcacataaatcattgttgtttgattgaaataatatacaatgaaaacctatatttcattattttcatggcttcttgataatttaaaaatcttggtcatatgaaatggtcataaaaattaccaaaattactgtctttaccatataaaaattactaaaaggcactaagaagaaaggacggagtatattacacctctgtcagacttgaatatataaaggacatggttgatacccaggtttatggtcaacttagatgtgaccctggtggttgacagtgattagtaaacatatgaaattgtcttaaaacctccctaaagtttaaacaggacagtgcagctcttagtcttcagaaaaggtgagagaaggcatttatttaagtgaaaataggcattagttttctttttgattaacctcaggcaggaagattatattaggatacagtttaggattctgatgaagttgtcattcacttttagaaaattttttagaataacaataaaaataaaattgtgtttcatgtttagtagatactttctctgactggggtggaacattttcataaatccctatatttctaaatttagtatgctgcaattgtagtgccttctctgttaagaattaaaaaattggaaacagaagattagaaatgctcactttgatttgaaaagtcattctaggaaaggcactgacatttagtgaacgtttcacagggactaggaaatttcacacatactcttattcaatccttaaaacaataatattccagaataacaattatccccattttacacatgatgaaattgaagcagtcctcatatagattaagggacttgattaaagactctaaatgatcaagccaggattcaaattgaattctttaaaaaatgtacagacaaggatgctgattatagaatatattagtaataaatcttaaggaatcattcatgtctaacattagggctaggcattgatgacattgggccttaggaaggtgttttacattctgcttatggatattagatattcataaaatttttattatgtttttgtgtaaaagataacaaaatttcaaatatttttatatttgaaaatgtaaaaagaagtatacatacatatctgaaaacaaataaaccaaaatgctaatgattagttgtgttacaatggtggatatattcctcactctttttatattttctatatttttaaatgtgactatgatacttctagaaaaatatataatatgtgttgatttccttctatccctgacaacatgaatcttaaaaaataatttgggaggcttaacattaattctctctttgttaatcagtttctttttcataagaccatgctgatgctggcaccttcttgggaaatatgaggagtaaagacccagccaggctctgtgcccatggagggcacagaggcaagtcaaaatatccacagctacatccatagaattcttttctgcttaccaaggatatcatagttgcttctttgagaatggatagtacattccaattctcaccattatcattttctaatctctatcatttcattctcttttaatcactctggttgtgtttgatacaaatgatggaacactcaaattaaacgcaaggtgtgctgttggaaggaaaagtacgggatttctatctggcagctataaaagctctatagcctgaaatgggggagaagagtgagcaggagtatcagtacttgctgcagtggatttagaaggtcagtaacttcacctgtgcattaataatttatatttttccaagtgttcttcacttaccttgaaagagaatctagaggctctttgaaacagacattctccactccactggtgtcaataacatgaaaaaatgtcatgtagacttaagtggcaggatgagaactgaccaaccaattctaatctcatctaactgaagcttaatgttaaaccagaattttttttctttgagctgccagcattttgtattcaatcaccagcctccatacctcattcattcatttaacaagttattaaatgccaggtattggtaaataacgccaaagatagcatatgtagaaaacagacaagatcctttctgtcatagaactcatgctccgatggaagaaatagatgatgaattagtaactaaatgataacatagctttttgtgactgttataaaaaattgaatggtatgactcaccgtgtgtgtatgtgtgtatgttgtatgtgtgttagtgtgtaactacttttgatggagtggccaggaaaggcctctaggtgactctcaatgaaccaagtgaaaaaagaggcctgatggaagagggaacagcaaatgcaaaggccttgaagcttggtctagttgaatggcctgcatatgaaggacagtgacatcagaccaatagggtgaggccaagccatcctgttttaaggtctatggcaaagagtttatacttactctaagcacagtgggactccaacaaaggcatttaagctgagagtaacatgatctgatttacattttaaagatatcattctggatgttgtgtgtagaaggactgaatataaagggtaaggatcaaagcagtgaggcaagttaggaaatattataacattgctgttgcctttaaagtaggagagaaatcagaccagaatggtgacatgaaataatccattttatttcctctactcccaggtgaagaagtgaagaaagagtgcagaggcaacaatagagaggttttctgtgaagggaagcagagatatgctttggaagtgggaggggatggtaagggactgagagacctttttaaagatgagagttattaatcaggatcatgctcgtgtgttctagatcccagggagatacagataaaagaagcaagagaaaaaagtgctgggtaaagacatgaagattcttcttctgctctatctatcaggttcttttcctcttctccctgcctctgctaagcccaacctctttctgttgagagtcgggcatcagccaaattctttgtattaactttgtttagcttgttatatctcccaggaatattttaagcctatttcattcattgcaaaataaaaagactgtttcctgtgaaaagaatttctggtatctgcaagcacataggtttgtatttagaatctaagaatgaagggagagaggtaactccctttggagatgctgctctgttctgaatctacgtgtcttacaaaggcttcaagttctgaaatagaagtgtctttctgggttaagcttcccagaggcactcttgttttgcctagactcttatttcaatcctgggcttcctcctctattggaaatcccttcttttttctttttgttcttcccaatgtcttagagtctgcagggaataggaagtggctagtaacagagctataaaatattgggttttacaatgctcaaagacaagcttatctgatgattacagcctgtcttcccatactgatcagaacaaggttggcttcatgttagtcagtgttaaatgtaatatggagtattggttttccttacaatatcagtctccttcttgttccagcacaccatatccaatgcttgctgctgccctcacctctaaaccgtcacccaccctgtgcagtgatcctttccattctcttctttgttgagcctaaactcacactgaaaaatctgggaaaagagcatctgagacagagtactatcaagtgccaagtgaaaggacccaacagtggagactatcctggcttcctggaagatgagcagtgagccggtgtaaaagaagaggaagaatactaggagagttcagcacaatggacagggccaaggcattattagtatatactagtggaccatagaatctaagccaagtaggagctttaaagataggtagtagaaatcagagagtgtaatgtttgaaatcaagatttgtgatgtggttcagttgatggtaacaagaaggcctgagatgttgtcatggaaatgagttgctaaggaagaatcgaggaagtggtaaaagaactgagaggcaagaatgttgaatgaaccatccatgtgaaagttgaagttgttaagaatgattatggagaataatggttgagatggagacatacatgctaaaatgttcagtataggaatgtgtaatagtgaaagggaggtgggaaaatgactacaatgaggtagagttgcaggatgcatttgctgatggaagacatttcaaaggagctgggattttggaggaagaagggaggagaaatgatttgggcatagcaatgaggagcaagaaggatgtctatcctgcttccaggtcttggggtacatttcttcatggaccaaaaacaagtcactccttgagaacgctgaaaaatgtgagacagtcataagatgcccaggtttctggtagaacaagaggataaagataaataatcagacttgattaaaattctgtacttattggaggtaccagcctcatgtaggaaaacctcgatatttgtatgtgtcctgcatttgattttggggtgttcaaacagaagttcttagctttcaaattcttgtagactaaaactgtcattcttgaatttaacaaaactccagtggtcaagatttttcaccaagcatgttagtgccaacatatacttgttgaatgtcaaaaaataggatgctaaattaagcagaagttatgcatagggaatcattgggaaagcataaagatgtttggttgcttatttatttatgcattaatgatttatattgtgcttgtttccataaaggatttgaagagcacaattatgtacttagcataatatctctggacatcattcataccaaaaataagtcaaagaagccaaagacagaatacagagacaaaacaagatttatagtcttaatctctgcaaggaaaataagataaggctgagcattttctgtggaaatgctgctttacttgcctgaatgattaaaacaaaaagagcagcagtctttagttgcacaggtcaccccagttttccaagagtgtttgaacttccagagtctggatataggctacatctaagatagccaggttgttcaaatctaacagaagtctggttattgtcctctctattctccagtttattcaccccctttctccatttgtaattaccacaaagcagaaactggttttcctttaagccatcattgcttttttcttcatatgtttttaattatttctcttttcctcatcaacagtcttggtcccagcacaagagtgtttatttgctgcatatcttagtgaaggatctgtgtttcatcaatcccattccagtgatggagcctttttctctggtgttactctagaattatacctcttatctacttctttctcccctaccatggggacagacaggaaaattgggatttctttcagttttaagaaatcttgagtgtcatggagtcttgaaactataaaaacctgtataatttcttttattaaattttaaatttttttctgtgtataagcttcaaaaagtatatcaaagaccattagaatatttagggccgtttaagtaaaggagctaggacaaggcattacagaaaaaccccaggtgcccaatccatttgatggctatccacttcatgttagtaacaagagcaatgacaaataaatggagacaaggttctttctgatgagcaataatacaccataaattagagaagcaagactatgagtccactgctgtcaatttagtttacctggtgtcttagtccattttctgttgctataaacagaataccgcattctagataataaacagaaatgtatttgactcatagttctggaagggggtcatcccatggcagatgggcaggatcctgaagcaagtgcttgtgtcacagagagaaacagaactgaacgtatcctttcatcaagagccactcccatcataactatctcactcccaggatgacggcaataaatcactcatgagagcacatacctcatgacttaatcatctcctaaaggccctacctcttaatactgatacaatggcaattaagtttccaacacatgaacttttggaggatgcattcaaatcatagcacctagtaacagataaaaactctagaatgcactgtgattggacaaaactctgatgggccaccttatatttttttctgcctacttgctacctaagccaagggaagtgaatgccctttagctatttcatgcaggttaggccaagcaagcatatgcctaaaatttctggctgttatagctacttttgggtttaaatgagataggacatctcctgtggaggaatataccatcacaaatgactgccaatgagaccccatatacctcccagaaaaatggaaaagttaacccatgggccaaatttcagcaatgggaaacaaaggaaattactgggtaggtgaattcccccttcttccttcttcctatggacttcttcaaggagtagtagcctggtacaatgtctctggagaagtaccatgtgcccattggatgcagctgcccatatgacctgctgtatgtctttatagctcattaggatgtttggtgctgaatgcattgtgtctccgacctttctgcatttccctttttcctcactctcactgtgttgggtttcccaagtaaagcacggaatgttgatccatgcctcatgtgttttttctagggaacttgggctaattagcccaagttaagattttagtaaaatatatatttattgtaaattgttagtaaggaaaaactgctattcttcaaggtattttgtagatactaaaggtatgtcttatgggtttcagtgttgttgtcatgttggtttcttaaagccatctgttgatgcttctcaagatgttaattatggtcacacttggaagctaatttcaagtggcaataatgactgctcagatagctgcccattgacttttgtggtttgcttgacagttattttctaggaaaatattattcattctgagtggtaatgtgagagctccccaggaatttggaaagggaatttagaagtgcgaggaaaacaccaacttctgtaatgagaagaatattggaaaggttgaaaggagatggctatcaagacccacacttgtgtgatctccaagacatgatacctttaaagagaactgcccctgagagtatggctatttaagaagctctcagacttctttccaaaaagcaacaggtgaccctcagcttatccttctgggaaggatttcctggcttcagtatggtcttatccttggcttcttagctatatagctgtccatttccattttgttcaaaattaccctctgctggtttccttggtcatcattacttagactcgtaaatcaggttttgttgcttagtttactctctttggattgacagtgttttagccttacttttctccatgttccttcttcggagattcttatttgcttcacccttctcagcctccaccaaactatgccctgcacattatttatcctgggccccagcattcagagaagcagaaatgagactatattgacatttttctttcatttaaattatttttactagaatttttttcttctttttattctgttttcaaatgtataatgttaaattttttggagtactgactctcaaagttttgggctttaggagccctttctactcacaaaataataataatataataataataattattattattattattgagacagggtctcattctgttgcccaggctggagtgcagtggcacaagctcagctcactgcaacctccacctcctgggttcaagtgatctttctgcctcagcctcctgagtggctgggattacaggcatgtgttgccatgccccgctaattttgtatttttaataaagacagggtttcaccatgttggccaggctggtctcaaactcctggctccaagtgatccacccaccttggcctcccaaagtgttgggattacaggcgtgagccactacacccagctgatacaaaattattgagaattcaaaatagctacgcatatttgctgtatgagagattaaaattgatatatttttaaatttactaatttttaaaattacaataaacccattatattttaacataaataacaattaaattaaaatgtctatatttttcaaaataaaaaatatttaatgagaagagtatcattgttttgcaaatctctttactatctgatctaatcgaacacagcttgattctcacaaagttttgcattcaattgttgccatttgttgttttgtttgaagtacggtcattcctcagtatccatgggagattggttccaagacccctgcagataccaaaattcacagctgtttaagtcccttatactataaaatggcatagtatttgcacatcatttatgaacgtgctctaatattctttaaataatctctaggttatttctgacacctaatatgtaaatgctatgtaaacagttgttatactgtatttttatatgaatattttaattgttgtgttattttttattgttgttgggatttacttcccaaatattttccatccatggttagttgaatagaagatgccgaacccacagatatggagggctgactgtatgtggaaaaagtctcactttactcagatatgcagctggaaaagggagaaccctacgtataccctgaaagggcctcaagaacctgcagtcaccctgagaccatattttaaattgagaaatgatgatgtggagtatcgtggaaaaataattacctttttaagaaatgttttcatagaaaaattaattctgaattaaaagcaaatgattttaccagaagtttgctagcccagactttttgcagtctggcctgttctgagtattttttgagtttagatcattgaactttagatcatttaactctcaaagagctaaaaagaaatagcattttaatatgtaatatgccctatacaacatggtaataggtaaatttgttcagaatgcatatttgtgttagaaaatatttgtttaatataaatatataatgtgaaaaaattaaaggattctactatcacactttacattgatcagaaatatctgaaaaatggcgggtgtgggagtgggagaaacctgtattacaaaaacccaaatatatagtgagaaaaataaattctagtataacaatcttaatttaggaacacctatgtccttaaaattttctttaaagcattgtgcagtagtgacaaatacatttatttgatattagcaaggaaatccttgttgacctgaagagaagatggtgatcccagcactttgggaggccgacatgggtggatcacgaggtcaagagacagagaccatcctggccaacatgatgaaaccccgtctctaccagaaatacaaaaatttgctggatgtggtggcgcacacctgtagtcccaactactcaggaggctgaggcaggagaatcgcttgaacttgggaggcagaggttgcagtgagccgagactgcaccattgcactccagcctggtgacaaagcgagactccatctcaaaaaacaaaaacaaaaacaacgtgtatccttatgttttaatagcatctgcagaaactgaaatagaagatgacaatgccatttgactgttctagtaacgcctctctttttcaaagatctctcatttgtcatttggtataagtgtttgtctcttgcttgataatttttacaaaatgtatgcttttttcactaaacgaaagaacttttagagtcttttgctgccattctattacctcctagaccatgctgtctataccccatgattgagctgcctgacaccactgactggctaccagcaacccatatcttacactacttccatgtacctggtgcacactctagcaaaacattctccattttgtattagcaacagtgtgatttcttaaagaactggtaatgtcaaaagtcttttagaataagcccactgttttaatattagcagcagttgactcagaaaagctatcttccactgaacaatggaagttttaaaacaaaattcatttgtaacttgcattcttccatctttcactatcttctgataacattatgtagatgagttgcatctcccaaattagattgtaatcttactttaggaaggaccatatttcgtttgttttttcctgtgacccaattatttaacatggggctgagtgcataaaacctattttagacccatccttactgtgtactgtgcattcattacatagaaactaaagaaattactcagacattctaaaatttccagttcaataaaacacattttttggtttttaaattttatctatttaatattctccgatttagaagttttgacaatatgatggaggttatgattctcttctgcctcacaaagcacatagatgtcagtaaattatttatcccagtttctattccaaccattcatattggctacagccatcattttcttaggcttctttactttccttcaaattatatcaccaatgacatcaaaacaattgacaaggttgctgcccagaagtagagaaaacagcagaattgaggtacaaaactaggtagcctgctaggttcgttcaccagctaagtgattgctcctacatcagctttcagtatggattcaaaagagtttctaggcaaaattctaaattgctatttggtagggcccatttgggttactagtaaatggtcaaaactttgaatatgaaataaactgatggcaagagttcttatgaatgaataattattagttactgatcgattagtctgggacatggaagaaactgagagagtaatacttcaggatcttaggaaaatgtgaaatgaagggaacaaatactaaaagcaaacaataacggagtcctcagtgtctgacaacattcactatttgagggaaccaagcctcccatctccctcaaccatggtcaaaggagagcgcttatgacccattcttggccttgtcatggttatatttctcctacatccaggaataggcacataaatcaagcaaggctaatgataatactatttgagattagatagatgttgagagagagcatctctcttatcttagaaatacagacttggagcttctgtggccatgtttcatgccgtttggaaaggagagacatagacaaagacacaaacgtgcacaggggagagagagattatctgagtctcaacctctcaatttggttatgtctgcagatagatctactctgacttcccagttacatgtgccaataaattaccatttgggacttattacgtgagtttgagctgcgtgtttgttacttgaaactgaaagagctttgatcaatacatggtctgaatcatgcagagtagctatggtttagtgtccgtggaagactgctgaaacagcctccaaagttcctgggttagcactggatgtatcaagatgtgcgtcttcctttactcctttgctgcaaaagctccagagcctatcaatttgatgtacagtcactagagttaggttgcttttctctgctcacagtgagtcttccctgttatataatggcctcatattaactgtcaggtattaaaatgtacagatcatatattcatcctctcctctaagaatttatagctgatattgcatttttatgtgggatgtttgtaaatattttaagaagtatgctgggttgcacagactggcatccaaacaacaaaagtaaaatacatttttgttttgtaatattgcaaattgattttaatagcttgactttctttagcaagaatatattaaaacatcccatgcctcttgattgcctgtatgaataaccaaaacttttattgcagtttaccatgactttatggcaatttaatgttttattgcgtatacgggtgaaataaactctggagaaatctctcattgggctgggaactccttaagatctccttgtaaacatttttccatctcataaaaactaaaggcatttagaaatggtgcgtgctttctttaaatgaggtactctagggtctggcaaaattatattttccagataaaataaatgtaaaatatatttatatgttgcaaccaagaaaaagaacatataaagttggaaaaatttttttgagtattcattcctttttaaagattgcatcctttttggttactgttttcattaaagaatgaaaattaaatgactggatgttgttctctgtcgtcttgaaagttgtgattggttatcaccattgatatgcgcttggatttctcctgaggtcaaccttttcttcctcaggagaagtaactgaaaggggagaacccatttcccatttgaagcagtctcttggatatgcctatagagtttggctgtgaattgcacataaacttcttcacttctaaaaccatgtaaactcttgctagttcaaaggttcgggacagctcaaatggcagaaaccatagtaagagtgcaggtatcatatctatcgattgttttgataaattttgttggagaggaagacattaaaacgtttatgtctactatataacttttagatctctgaaatgccaactcattgtgattaaaggggtcaatcactgggctagagagaatatccctaattttggaatatcctgaactaaatcgccattgtcccaaacaaagagaccaagtggtgaactaactaggattctttcatggcaagcaacagaaactaactctggataacttaaacagaaaaaggaaatgtagtggctcatataattagaagttcaaaaggcaaaccagcataactgaatctaggggcttaaattgtattaacagtcctcttcataactcagcaatattttttcctgtgttggcctcattttaataaagtggtctccatatgctatcaaaactgttcactattagaagcagactgtatcctcttttgctctcataatttcagagaaagatggaatacctatttcttgattgtttgagcaaaatttttggagaggctcctgactgggatgacttgggtctggtgaatattcctaaccctatcacaatggccagggaacaggatactcttgttgggtaggttgggttttgtgctacatccgtgtgagaaggacaagtgaagtgattgacggctccactggggtttagacagacttccatataagaaaggaagacaaagaagaaggataggttgaaatgagcttgggcattagttgtgacagtgatgacttttgataggaaagtggggaagatgccatgttaggagtctgacaagttgtgatgcatactagtttctggctgtatgttacgtcagaagcagagagaaaggatgtgcagctgaaaaagaaagagaggaaggagacacacaaaagctaaggaattaggctctgcgaattgcctgattcacccaggtagttattgctgtttctatttctctgctacaatgaaggggggagtttctttcagtttatctcttttattttgccttttaggtggacaaaaaaatcgtaagaactgagataggagttcttcttcgcctctcacatccaaacattgtaagtggtttttaacctactatttcaaatgattgccagagctagagaaagggacctttgtccttcactgtcagtgctgataatgagaagggattctcccaccactgatagctactatgtgctagctcttgtcctcatctcatcaccttttcaatcctttggctgaataagtcttacaagtaatacctctgaaaaagttccaaaatagacaaattagcaatatacgccatctttattttcattcataaaaggataaaaatcgaagagttttgtttttctccaacaaaacactggctttttccttcttttgtgtgcctatcttattaattttccattactgaaaaagcctgtgaagaaaatacattgctttcccaagtaatttcagtctgctttgagagaggatctgcttcatgaacaatgtgaagatgcaaataaatgatgtacttgaatgcagaaaataaaatgtcctcagaagctctgcttcaggctttgtccagacagcctctgaggcaaagatctagtaaaaagcgttcttgaactgatgaagtgaaaaagaataaaattattttccaggttgcaagttatttttatgaattaagccatctacttcaagaaagcatttttgcccatttctctgaggaagttgtgatgtccagggagatggcctgcaacgcttagactccaggcaaagtgctcaaaacttaacatatgagttagggaagcattcagctgtaaatagcagaaaacttgaataggatgatttaaacaaatattttccatatgttgcaagcaacaaaaatcaggcagttttctggctcagctcgccggtgctgctgttccagaacccaaataccatccttggttctgccatcctcagtgcattgactttcatcctcatgcttttccctcctgggcctaacatggctgctccacaatttttgcaagtcatcacatctatattcaaaataggaagaagatggaaggatctcagctgccagttctcataagaagagtaaaagctttctcagaaactatggcagtggaagtctcttcaaattttattggctggagctagtcacaagattacccttaactgcatgggggctgtgaaattagtggctaagaccattcatgatccacaatttggggctagataccatctctgaacaaatcagagttctgtttatattaaagtagggagaaaagggctttgggtaagcagttaataaaatctcccacactccatcaccacttttacattatccatctcttctctacaaagataagtcaatgtagaattttcctcaagtgtagactagtcctggctactagattctcgtatatatggagaaaaatatataaaactgcttggattagctgaatgtgatgaagaccatggtatgctcaatcaagtcactgtcaccactgcttttctgaggattccttcacccactgacagctttttaactattgattgatataccctttacatataggccgactttaagctggtcctaccctgccgcagacccctaattttaagttttgtaattcccagaagaaataggcattttgtacctctagccaccttgatgcctcaaatggtttaggaagttgtgttgtttttgtttttgatttttgaacaattcagaagttgggatgttttagaaaagttagaaagtgtttccaaggcagacatctttcaactgacaaaaggaaaaatgtaaacattttataggaactttgaaaaaaatgaggtaactgataaaatcaacaacccagaaagagagtgagaaatagctagctgataaaagaatgaggaaactttattaacagtgatccaacatattactactgcagaatgttgttttagccatagtattagctatttccaagaaagatggaataagaaatttgtgatattcttttttttatatctttccctagataaaacttaaagagatatttgaaacccctacagaaatcagtctggtcctagaactcgtcacaggaggagaactgtttgataggtgagttggttctggaaatataaccacagaaaggtttgcttttggccaccaaaaaataatctaaaggacatttctcctgaaactttttataatgacagattatacttgttgataaatactactaaaaaaagtcttaagaagaatgttgaaggaaggtgggtagtggtaagatgtaggtacatgaaaacttgagatatttagtgagtaaaaagaggaacactataatatctatttatctttgcaaatatttgtctcctcaataaaaagatagaatgtctaaaatcaaattaaatctaaactaaatagtaagatttatgagaatatcttaagaaaatatttgaaatatttgaaaattataaaaaattaaacatgtactctgtcctctgttatgatccaaaagctcataaaactcaataatcttcaaatgattatttttaagcttattttctttagaagtctgtgtaaagagttccatgttgcaaagtaaacatgttctgttatagccaattattgccaactttggtttcctgttcatatgttcatctttcaaagcagaggagtgagaatggaggggggtgggggtgggggttggagcctggaaatctggcagagcataatatatgcaaactatttgtacaagacacacaaactttatgtttctatagttgttccatcttccccaccctcttaggagaattctgtatttgtcctgatgggctcttgagagccttttgctgtgttcatcaggtaatcaaaaaagaatggactttaaagaagacaaagagactaagtaggcatatattagaaatggtaagaagccatgcgtgaatggaaaagttttggttaaaaaatggggcaagagacaggtagactgcagtttatggggaagacagaagagactgagggaaccattgatgtaccctgagtgcctggatcacagcaaatgctccataaatatttgctgaatgaatgaatgaacaactgctacaatgaatggactctgaggagaaatatctaaaggggattagttttgaatgcgttgagagaggaacactccttcacttttgccagggtctgaatgtttgtgtgcccccaaaattcatttgccaaaatcttgatccctaagataatggtattaggagatgggatctttgggaggtcattaggtcataaaggtggagccctccagaatgagattagtgccgttataaaagaggccctagagagctgcctttccccttttactatgtaaggacacagcaagaaggtgccttctatgagaaagcgggccctcaccagacacaaaatcttctggtgccttgatcttggactttccagcctccagacctgtgagaaataaatgtttgatatgtataagacacacaggttatgctatttttaaatagcagctcaaatggactaagacaccttccttcacacccatactctacccagttaaatttgctgcctcttcaagagctttcaaaagtattcatattgtttttcaaaggttctgtctctttttaacattacccagtgaaaatttggatctttaggtgagaaggagcaaaaggtctagcttcattgcaactacatatgtatgtgtaacagatacacatctgaattttgttcatatatatgttgacacttccttagagcaggttcaacatattattagactttaaacattataacattttgactattttcacattttaagaataataagtcagctgaaggaagtaagcatcagtagcttaaagccatacagttctggcagcagttgtttttttgaaagactcacagttgtgaatcctgactctacaactgaaagataactaactaacctagaataatttacttaacttctctgaaccttagaacaaatttgaagtggctttatgttgctaataaagcttagatggctctaatccactatgaagatactcttgttcacatgttcccatgtcctcaagcaagagtctcctggcctagctaatttgggtattgccacaatatgcctataatggctcctttttcaacacctctttagctgacttttttatggatgtattccttctttagttacattaatagagcagtttatagtcagatgctgctggttttggagctatgagctctctctaaggagaccttgcatatttctctgctaattatggtctatcagtgagaactctcatgtttttaaattataaataattgcaggacaggaatgccacactgaagcaatcatctactaatagtgtttgctgtttacttacctacctctattggcttgagttaattgggaatcatgggtttctccttctcttcttcccaacctttcttccatgaaagaatttaggatgaaatttaattcagctatagctaaaaatggaaaaagtaaatgctattgataaatttcatttggagagataagtggatgaaatattcatatttaacagaaaacctctgaagaatggcatacagccagtaaagcactcaactcttagtggttttaaaagatagactcttttcctttgcatgttgtggtctacaacattgacctagctgatatgaacttggtctctccattaagttacttaattctgcagttatctttaaattttatcaagctgaaaatacattctgcattattatccaatgtattgatttctttcttgagagttaaaaggtaacatgatctctttttttgtacttaggtcaaaacaaatttacttaattgtgatgataagaattcattcctggtctaatgatgactctaatagtacataatgaatgaactaggggagtaattgctgaagagataatcatatgagtcaattatactcaaaaaggttgtatttaattagcaaaaaatctatttataatgcttataaaaattaaacatagtcaaaatccaagtagaatctgctattttatgtagaatttaaatagtaaattacataggacagtttattagaaattttggaataaaatccatgatttgttgtgcccaggaaaaatctaaaacataaataaatttgcacaattatgacatcatgagaagaagaaagctcccatgaagtttctgtttaaccgttctcagtttggtctcaactcttaaaacctcaacatcattttcattgaattattgaaatggacaaggtgtgagttttgctttaagagcaagtttcgaagtttttttccctcaaaaatgactatattttaagacagcaaatttagcaatatccttactgtcttctaattaaatcaaaagtattttttcttgatttttgtcagataactccagtatctaagtatagttttgaattttgtaaacattgtcatgggttttttttctgttttctttttctttttttgttttatcactttttcctaaagaattttatttttatttaacttttaagttcaggggtacatttgcaggtttgttacataggtaaatgtgtgtcatggcgatttgttgtacagattgtttcatcacccaaatattaaatctaatatccactaatccattagttatttttcctgatcccctccattctcccaatttccacccttcaaaaggccccaatgtgtgtttttccccactatgtgtccatgtgttctcatcattaagctcccacttataattgagaacatgcggtatttggttttctgttcttgtgttagtttgctaaggataatggcctccatttccttccatgtccctgcaaaggatatgatccatttctttctgtgtttttgcttgcctgtttaggcttgttccaatgccaaacattatgtgtaaaaggttttagaatttgagacctggaatgctgttaccttccaaaaaaggagattttcttttgttgtggtgggcatttaaggttaacaaacagatcattttaatgcaatcagatattaggctaattcaaagctgggcttcctaatggctggtatacttcttgtcaagtcttattcacaaggctttgctctttgaaggtctcaactttaagccagggcattataccagggctattcttacttggcagaccctcaatgtcaacttctgtacccttagctctgtgtaattgccagaaactttattcaccttctccgcctgtcagctgctgtgttggaataagtaaatgacttcagaaggaaatcagaggcatcagatggcaggtttgctttgctgggtttttcttctcttctggatcttgattcctaaatccttcccttccttagtgtattagttaaggatctgtaaagggacagaactaacaggatagatgtatatatgtaggggagtttattaggagaattgactcacgcagtcacaaggtgaagttccacaaaaggccacctgcaagctgaggagccaggaagccagtctgagttctcaaacctcaaaagtagggaagccgataatgcagccttcagtctgtggccaaagacccaagagcccctggcaaatcactagtgtaagtccaagagtcggaaagctgaagaacttggagtctgatgttcaaaggcagcacaggagaaagatggagaccagaagacttagccagtctagtctttccacgttcttctgcctgcttttatcctagccatgctggcagctgattgagggtgggtctgcatctcccagttcatcgttaatctcctttggcaacgccctcacagacacacccaggaacaatactttacatccttcaatccaatcaagttgacactcaatattaccatcacacctgataactctctgatttgttcaaatagattttttttattttattgagtttgtttttatttttcttacctggaggcttgtctgacccaccattgctgagagcaaaaattcacatacggttttaaatttttttcacagacactaatgtattttcctgatttaaaaagtcagcctatttgagcaagcagggtgaaaagcagtatactcactatgcaaatatgaaaacagaattagtaatgatcttcccagtcgaggcaaccagactgtcttctgatccaatcctttccttcttttagggcctcactttctttcttattaagtccagtttgtctcttgcacatcatttccaagaaaataaatatctgtttatacatggaaaatccatgatgtattgattggtcctgtgcaaacctatgtatctatatagcccactcaataactctctcttcaccttttttgaggtattattatccatatctttccatagcatacacttaaaaagttattaataggtcataagacctcacctccagtcctactatatgagtcctaatagtaatctgtacttcagcatttctagatctctcattcttggtggaaacaaattgaattttcagggcattgctattagaaaaaggtttgagaaatggaactgaggctgtttcttgtcccagtctttctggagttgtagtatggttggtattaggatttaacaaacttagaaaaagtctgcatttgtgaagacctttgtatcagaaattagtcatcaatgtaattatctaatgagtgattctgtaaaatgtgattgttcagaaaggataattagtgaatataatgaggaacatttttgagatcctattgggttgctggcagagtatgcagggcaatttattaacatgatactatttaatcattagagcaacacatatataaagtaggctttgatatatacattttatagacaagataactgaggatcagagaggtctgttaacttccgttaggtcattcagcttatatatgatctaataataattaaataagattggactcaagtatgtcacattccaaagtatataattttgctaccatgtcatgctgctgcaaatgccagaactcttatgcttaaaaataaaacttgagattagtaatctaatgtttgtcctacttgagtgttggcttaagctgacctttaatttgtatatagttgcttttcaaccatggatattttaaatacatctctttatgtggctttatctggctatatgtaaagaaaacttatactttgatttggactagacttatagtttactttttctagaagcttggccataaaatgaaagatagaggtgaggtagtagaacacactggataaatggaagtttattattttaagctgtaggtctaggaacacattgatttgctgatgggaaggagctcataagaaagagaagcaggagagatttgtatgagagggacctaaatttggaacaacattctagaaaaggcatgaagggaatgagatctagagtcagataaacggatttggtttttagaaaaaactcttcttcctctgaagcagaaagaaagagacaaagggtcaaaggagctagattaatcaaagcaattttgaaaaagaaagacttttggaataagttggaagacactgttgggactgagatgtaattgtaccttgcttataaactaataaaagagcctattattcttttgtggatgctggaaagcacacgattactgaatcagagacaaagggccttattactcatggcacagcaaacgttatgggcattagcaagtctgtcagttccccttgccctttgagttccatggaggcagtacagtggggccagatagatgcctacacctggaattagatgtgttacaagaggggagataattttttttttttttttgtatttttagtagagacagggtttcaccatgttcgccaggatggtctggatctcttgacctcgtgatccacccacctcggcctcccaaagtgctgggattacaagcatgagtcaccccgcccagccaaggggagataatttaaatgtcatcaactggagaatgcacaaccattcagcaatgaaaaggaatgttcctttgatacacactacaacatggatgaactttaaaaagtttatgctaagggaatgaagccagacatggaagactatatatgctatgactctatgactttataaggaatttccagaaggggaaaatatatagacagaagcaaaacagtggtttcctaggtctggaaattgaagtgtggtgggttagaagacgtttgggtagttcggtcttgatagcctctaattttccagtattgttaaagaagggaaattgatctcctaatattaactggtaaagaatggaatagggcacttgaagaaggaactggtgaagattttaagtgagattgtgtgaacagacaagggcaagaaaaagggcttttgaggagcactgaaggtctgctaatgctgaaggctatgcatatttggagactctggtctctgtagcattatatattactggcttactccttcatatcattcatggagttttggacagcgtctctttttctcttggctttcgtccaacttttcagccgtctccctcttgatctctttcctgagttcctcttcccctccccacctcttaagttccctttaaacttcttctacattcttgttagatgaatttgacactcacctgtggcttgagccacactggtggctacagtatcagctaagatgaaaactgtattttcagcagtctactaggcttctcaccaagtcccattagcacctctaaatcaaatgaactcagcatccctctctcaatctcactccccttccctgtgaactgattcaccaactaaactaatcaacatgaatttctcccttttcctttagattctccttctctattccctataattcttcctctgagcagctttgaaatctgttcccttttccctttcccagtgcttctgccctgttgcacctttgcattgtttcccattgcagtagactcctggagagtattactttcactcctttccatccatctgtatttaagcatagatttgatcaggtcagcccaggaagctactcactactttcacttaaagtcaatacttttaaacatgacaaaaaaaagcccacttacaatctggcctcaccttaccatgctggctttaccacccactttgttctcttcccaccaatgtattaaccactgtatattgtctccaccctcaaggagctcatagtctaaagagggaaagtaaaaatgtgacatagacgctaatattttttaagcatcaccttccaagtaaagcatattagggattataatgactacaatatcacaaatttttttaatgagggctaggaaataaaaagaaataaaaataataatcaggacataaaagagagatcatcagatgttttgtgtttgttagagattggccccatattcaactctaagtattcatgtggggatgataagtgctataattagggcataaacacagtgtgtagagtacaaaacaagggggttttgtaagtcagaaattgcttcaggaaggagtaaaatcttttgagctgactcttatgtgagaaattggaaattagcaggcagaggccagaaggaagggcctattgtggcaaaatgatgttcaaaagcacaattgtacactgttgggtaaaatatgagcatcttagtctcaattttaaaagctgggctaggtagaaagcaagcagggactagatatttgttaagtgaatgattgaatagtgtgctcctgagcaatatatatatatgtgtgtgttttgtttgtgtttgtttttgagacagagtctccctctgtcgcccaggctggagtgcagtggcgtgatcttggctcactgcaaactccacctcccgggttcactccattttcctgccttagcctccccagtaactgggactacaggcacacgccaccaggtccagctaattttttatattttcttagtagagatggggtttcactgtgttagccaggatactctcgatctcctgacctcatgatccacctaccttgccctcccaaggtgctgggattacaggtgtaagccaccacgcccggctgcaatatatatatcttttgagtcaggccttttatctatagtatgagagaagtagactgggaatcttttaggcccattcccagatttgcaatttgatttgacctcctctttctcttgtcagctccctggccagcacccacattgatccacaattccctgactttcttcttagtatttgaatgtaacaggtgctagtagtatctttgaaactacttttttgaaaagtatatgaacttgacattctttggcaagaaagtttttacagaaagcaccaaaacagacaatgatgtcatcaataaaatgagaagctgtgattgaaacttacaaagaagtggtagatttacacagagtacagcagatttcattttaatataattttgtatgtaacagcataatggtgtactggcagcccttaagacttggttcctgaaactttatattatttggggcttttactctctgtcatttgatccttcagtacacattctcatcagaccattatctttctcacataaacctagtcatctacagttattatgcagccatttgagaaaaagctgcgagtggtgggcagagcagcagggctcccaatctatgtgccaggaagtctggggcctcaggatatgatcagattagagctcttcagctgctgtgcgcgtgttaactgcctggatggagatgagctcaattcaatttgtggcaattagtgttacagaagcaaatgcaccagagtcatatgttacagcagctccatagagagaaataggcattgcctgtattttttcatcctataaattttaaatgatgggaagaaaaacacaccaactgaggagaagagcacgggcaccagcacagcgagcagtggaagtaaaaggcacagttgtggtgtaagagagcctgttgaagccagacgctttcagtggaggagcttggggaaatgtaccaccttcgtgcttccttcccagatctccagatgtctgctaggccccctggcagctgagggacctgtaggaactggagtctcagggcagccttttgggtcagtgttgtgattaaaatcctagaagacattttgttttgagctctgagccctctggcctagcccacaatggaagtctgggaaactgtgtggcacagaggcaaaccacagggccctgggcctgtgacaattatcttaaaatgctggtagcatcttaactgcttccttattatttttcaaatcacgaaacagaaattagtttactaaatctcaagagaaatacagcaataactatgtttaaatatgaaaaaacaaaaataccagccaaaattatccctctatttttacagctttaaaacccctacaattattaaatatttcgttgcttctaaaactcagagtcatgagtatatttcgtataaagctataaaaccttgagtctctacccatggttcaatttcattggcaaattttttgagatgccagctaaattgtataaagaaattacgtgtcacctcatgaaacaaataccccattttaaggaatttaaattactttgattttgtctaaaataagtttctaaaaagattcatgttattccagcaatatctaaaactatgtaactctgagtttcttcctaaagccagcagtaatcttttcacttattgcattgtcctctgggaagcatccacacagctgttcttcctctggagtcatggccaatgtacttgtgatgggaatcacttctgagtccagtgcttttgttccccatgatagtgaacataggcaaaagtattgtccaaatgtcctcaatctgaaatttttctgacgtccattcacttggcaattggtattgattccataaatatttacttactatgggcaagttttgcagctaggctctgtgggtgatccaagcaacaatctaatgagaaggctaataattttaccacagtgccctgcagaaggttctggacaaacacatctactgatgtcatacaactgaaattaagagaaataaattgcaagatttcattttcctttgcttggtcactagcatcttcacttgcagtcatagttctaagttgtaaacctgcatttatgacttgagttcattgctattgaacttttcagtcagccatggatagcctgaatggcagctcaacttataaaatatttaaaatgggatgtctgagtttcagaaaactaaccctgtgacaatctgtttaaggaatcatctgggaacaaagctccttttagcagaaactgcctggaatagaagtggtcgaagggtgatggttggccaagatgcagtgtgcggagttcacactgaaatgaggtggggaggcacttgagttttgtgcccttgccccacatatctactctatggatgctgttctcactacagaattaataaatcccttggttgtacaaaccttacataacatacattacatctatgataatgttttttgtttgtaactttctttactccaccatctgtggtctcatctcaggcagagcccaaatcttattctgtttatatccagcaagtacctggctcacattagaagttatgaatgtggatgaatatcaccactttcttcttccatacctatcccgacccccaactgccaccctccttgcatctgaaaaatttctatacacctttcaggtgtgagctgagatatagctatttctggaatcctttcctcacccttcatggcctccagaatagattacctgcattttctcagagctctcaggccattatttaataactctatcacatcatttagcacactgtgttgaatgttgtctgtctacttataccaagagaaagcccatgagtgcagaggccatgtccagttcactactgagtggccagcacataacagtctctccgtaatatttattgaataaataaattagcagatacatctgttggaatgcatcctctggttaagagaatgaattatttcactaacttaacgtatgttggggaaaatcagtaaagtttccattaactattcttcatatacctactactcctctctccctcccacatgaacacagctcccaagaaaattcactcttccatcaagccaggccctagacattcccacaagaacatattctgaaacacaggcactatcttagacctttcagtctgatgtaacaaaatttcttatactgagtggcttataaacaacagaaatttatttctcatggttctggaggctggaaagtccaagataaatgtgtcagcagattcaatgcctgctgaggggctgctttttgattcatggatggcactttctagctgtgtctgcacatggtggaagggacaaagaagctttctagggtgtcttttataaaggcatgaatcccattcatgaaggttcatccttcatgacagaatcacctcccaaaggccccacctcctaataacatcacattggtgattaggtttcaacatatgaatttgggagagacataaacatttagctcacagtaggcacttaaccctaacttagagccaaatgaaaatacagaagatatttaggctgaagcttgagactacataataaaccaaaatatagagaggagattgtagtgggtgaagcacctactttatgaagagtgatgatgcctctaagaactgtgtctttaatagacacctaagggagacagctcatggttgtggaagttggctctcttcaaccacaaggagtgccatttgcatgagtagtgccctctggaaaagtactgcaaagcagctgtggtaaagctctagcctgggtgagtgactatggggaaaatccacactgtttgttgtaggccagaaggtaattgattttattcccttctggagataatataaggttgcaaagaaatttaacagctattcttctccatcatctttgtaacaactcccctcttttaacaaaactggagaaagccaagctcctgaggctataggtacagagcacagaggagacactaattacatttgtgctggatgatagagataccacaaaatccacgtttagagtaaaatgcagagaatgatgtcatggtagccaaagtcctgaactttctctgtcacagtagtacttcttttccccttccctcatacttaaaatgttcagaaagtatagtcccatgaagcatgtcaattaaatttttataagtagaccatttaacctaatcatgaattggaaaatttcataggtttgtaagtaaatatcataagaaaatgatattcaagaacaaatgaataatcattccctagatattgtaatctattttctcctttcatttgaccctagtgctggtaaagtatcccaaaaataaaaagaggatgaatttgaattgcttgccagtgttctaaataactaaataaggaaaatgaggtaattgaaatttttgcctcaatatattgtttctgaattttaaaaactataatcattgaggttttttgatatattttatacttttgacatatctgttttgttctgctgcttctcacccccgccccatcccctattttggaaacattttacagattttaaattcaacttttaataccagctactttgagaacttaaaacttcttgtcacaatatctaaagaaaacagaaatcaaagaaaagtactttctgaaaaatatgctatttgaggtaccatctaagaaaagtttctatttaaaatgacaaacattgttgaaactgtcctttatgttttgaattgaccattttcaaactttgtgccagctgaagtcatcttatgcagtgctattagaaatgttttttctcctgaaattatggaaagttagacatagcaacaaagtagtttttcagtcctccaaaagctcttcataagactagacagcaacttgttctgaaaaatcaaaaactcaatgacaatatctacagcaaaaccaggtggccgggtatccccatgaagcctaacatacaagtgagtgaggaccaactaatgacaacaggaagagccatgtggaatgatcacctgtacacgaagaagcaagggaagcaagaagacaaatgagagaccccaaagcaggcaaacactcaaatctctcaaatcttcaagttatttggaagaaggataggtcaatacaaaaagagaagctgaaattgggagtgatttttaccatccaaatttctgaaaagtacaaggggtgcacctgcagtaaggtctaaaaagctaattcattgtcaaggccttgtgaactcctgaaacaaaaatctaaagtcccttggggaaaaggttctacacttaggaaaaactgctaggaagagaatccaaattaatcagtgtagagacggtaaaggcaagggaatgaagttccaggggaggggaagagatctcagaaagaatgagggcatatttttgaacgcttcatgaacataaccagaaacttaagagccatgaaactagaaaagatatcctgaactatcactctgtcaaaaggttaagtaaaccaatttggcttaaaaatggacggcaacagaaaagtatctgatttagttccaatagagaatgattatgggacgtggatggagctggaggtcaatagaggacagacaataaggagcagaataaagttcctttaggcagtgaaagcatgtcaggaagaacacccataaaaaaaaaacatgaaaataagacagtgttacaaaataagctaaaattaagaaaactgtaggacaacaatataaatcaaaggtagaaaaattcttacatatctataattgcacaccccaaagaagaaaaccaaggcaatggaagaaaacaaacacaaaacattctacttcaagaaaatattcctgagatttaaaaagaataatgaaagcactctaaattgaaagattatgccacaaatctgaataactaaacccagaacaactaccgtgtttttcataaaacatgtcttaaaagactttaaattaaaagaaaaattctttgcccacattcatgcaaaaagagcaagtcaattatttggagaaaatcaggttgtcatcagattttttgaaaatcacatcatgtgtcagaagaaaattgtcacctacttaagataatgaggctctctttcctcctgctactttgaaataatattcttttacttgttgctaattatacagcaatcaagaagtttatctttttcaagctgttcttattcttcgtaatttttgacagctatatattgtatctgtattgtaagttcatactagctggattgctagtgtattagtctgttctcatacactataaagaactacctgagactgggtgatttataaagaaaagaggtttaattgacccccagttctgcatggctgcagaggtctcaagaaacttaactatcatgacggaaggtgaaggggaagcaagtcacatcttcccatggcagagcgggagagagagagagcacaaagggggaagtgccacacacttcaactataagatctcatgacaactcactcacagtcatgataatggcaagggagaaatcctcccccatgatccaatcacctcccactgggcccctcctccaatttgacatgagatttgggtgggaacacaaatccaaaaaatccaaaccatatcagctggttaatgtcagtattgctgagagtacagaacaaaccaaaaaagaagaaactaatgttaaaaacatgaaaacataaatacaaacactcctaaatggaaaaaaaattaaaattaaagaggaaaagcacataaaatggaccacatagtaaaaacatatataaaacattttgtacatattaacctgataatattgtttgtctaggaaatggaatatgaacatatgtacatatatatttattttttaattcaagaataacatgtaaaattagaaaaatactacctgccactaaaagtgtacttctaggagacaatgacttattctaggtctgaggcagcaaatgtacaaaataagtctcaggtattatattatactggatagtaaaataaccaccaaagacttcaaaagccaacttgcatagcctattactgacccaggaagagctagagcagattgaaacgtatcaaatatggttaaatccatacttccaaaatgataccaaaaaatgaacaaaaacactaactggtcactgaaaatgttggtgaatgaactcattattttgaaaactggtaagttgaaaaactaataatttatcccctctttcctataagaattgtattactagaaaatttttagctaacaaagaagcagcaatgatagattttaccaacttgaaactgctaatgacttgatggatgtaggcattgataatcaattactgttattgtcaacatgaaatggagcataattgaacatgcaacttcttgtgaaaatacacaatactccctataaaacgtatttgctaaaaattcaacctgagtctaatcaagaccctaatgctatccattaataaaaagtagagagggcaggaaatagctccaaagacatcaaggtatagaatgaaatgtaatcctctagaatcaaatgtgattctatccccttgatgtctttggagatatttctctgcccctttttttaattaataggtaatgctggggtcttgattaggttcagattaaatacagaaaatgtacatatacaccatgcaatactatgtagccataaaaagaaatgagatcatgtcctatgaagggacatggatggagctgtaggccattttccttagcaaactaacgcaggaacagaaaaccaaataccacatgttctcactaagtgatgagaatacatggacacagagaggaacaacacacactggggcctataagagggtggaggttgggaggaaggagagagaagatcaggaaaaataacttatgggtactaggcttaatacctgggtgatgaaataacctgtacaacaaagccccatcacagaagtttgtgtagcaaacttgcccatgtacctctgaacttaaaagttttgtgttttttttttttttttaaagaatcacattaccaagcagggaaactctaaagatcaagtgaccagctttccaaaaagaaacgcagcaaaagtgaaacagagatggagaagggatgaaagggaaggatggaaaaagagaaagagggttggcggggggaagagagagagagagggagaaaatactcgttaaaaaataataagagatacgctaaccattcaagtttcatggaccttatttggatacttattcaaacaagtaatttaacatgtttcagacaattagaaatttgaaacactgcatatttgataatattaagaaattaattataggtatgatattggaattatgactgatttttagagggtcctttatcttttagagataacctcctcaaatatttataaatgaaattatataatgtctgatgcgtgcttcaaaataataaggaaggagtagaagtaattaagcagataaaacaaaacttcatgaatttacagataaagctatgtgacaattacatgggggtgtttcattgtataatatctactggcatatgtttaaaatgattcacaaaacaaagcttaaaacagacaaagtgttttctcctcaaatgcaatggatagttcaagccaaggaaaaataaaagtatttcattttcctaagtaaactcaaagatttttagagtgtcagtttgtggaaatctttcccatggtagtatggtagcttgtttcaattgtttatgtgcaccatctttaacattaatttacttaacttcttttaatatccattcttctgaatgaatgtgcctgagaagcatttcctttctttttgttccaggattgtggaaaagggatattacagtgagcgagatgctgcagatgccgttaaacaaatcctggaggcagttgctgtaagtatgaagtaacagcaatggtgtaactcttagtcatctcttccttttacagaatcatcatttaagaaatgcgcatctgtgataagccatacattttacagcataaagttgtgaaatatttattagaaaatgtgtggaataaggtgggcatggtggctcaagcctgtaatctcagcactttgggaggctgaggcaggcaggtcacttaaggtcaggagttccagaccagccttgccaacatggtgaaacgccatatctaataaaaataaaaaaattagctgggtatggtgacgcacacctgtaattccaactacttcaggggctgaagcacaagaattgcttgaacttgggaggtggggagttgcagtgagccaaggtcacgccactgtactcaagcctggacgagagagagagagaccctgtctcaaaaaaaaaaaaaaaagaaaaaaaaaaagaaaaagaaaaaagaaaagaaagaaaatgtatggaataaatttgtattttctattgatgactcaaagtctgaaagatgcaatcctctatataatgccataagtgtgttaaattaatttccattctattattgtgagaccaaatgagattttggtgcctttatttgttctttaactctttctttcccatttcttgagtttgtttgttcattgcttttttttttttaatttggtagagatgtggaagagggttgaatgtgatgtaaaccttggagcatagagattattgacttttctttccagaaaagaaatgagttaattggaaagaaagaatgtatcagtttttttaaggaagaaacataagttaatattttaaattggaacacaagttttgtaagttaatggtggaaataaatacatacacatttacaaaaatatatactgttgagaagcttttttggattgcattaagcaggtaatatttgcctgtataaatcagactcaactgactaaaagcttcccatgtatttgatgttgtctaatatgtgctggaacactttggtgattcatttattgaatatgaaaccagaacaaattattatttgaacattcaagacagggcccagggaggggtatttatcaggatcagttaaagagacaaatctataaaatatatccagaattaagatatactctattattcggagttagttatttaactaaaatcattatccaataccttgagaagtcagccacagtgacagaagcacaggtcctatgagttttacccacatcaaaaacaggaaggagggaagaaaagaggaagggagggagagaggagggaggactctgatatctaactagcctctgtaccaatgatgaaaagggaaaaaataacctttgcataaggcttctagaaatagccaattgaaccaaatttgttattgagctattaatgccaattttaattggctttatagcccagtccttccaaattatttattccccataaaagtgttttgatctttttgctatggtgagggatgaaaagtttgaaatgtgagtgaataaaacctggagaggatgccaacacagcttctgattatataaatactgaatatcaaattcatcttctcactgtacccaaatagccaccccatttcagattttcatcacacataacatatttaccaattctggtttcctaggtttgcacactaggtaatgggtttcaactcttccattttcttatcttacatagacctttccaacttcagttgaatctttcttcaaatgtgcataaacttaatcctgttctccatcattctgtgactgttgctggcatgctttaaaaaagaaagaagaagcactttaattgccattaactcatattctttttttttttttttttttttttttttgagatggagtctcgctctgtcacccaggctggagtgcaatgacgtgatcttggctcactgcaacctctgcctcccaggttgaagtgattctcctgcctcagcctcccaagtagctgggactataggtgtgtgctaccacgcctggctaatttttgtatttttagtagagatggggttttaccacattagccaggctgacctcgaactcctgacctcaggaaatccacccaccttggcttcccaaagtgctggaattacaggcgtgagccaccgcacccagccacaattcctattcctaaatatataagtctagaatcatctcttgcaatcactatttttattttgttacttctccatttaataatggcaattttatacttttcttaaatacccattttaaaacctcatttcttgttattatacataataaattaatcaagtaaacttgctggccatagcccactatcactttacctgaatcagtcaggcagctgatacagcagttaagaatactttggcagtgagacagagctaggtttggtttttagatgtgtgaacttggacatgtcactaaatatctttgagcctcaatttagtcttgtaaaataggcatagcaattaacctaacaggattgtggaaaagattaaatgagataacttgcggaaatcatagcaatgttcataaaatagggaaaagagggtaaccaacttcatactcagcacattcatttaaagatttattagatgttgtagatgtatgcagacacacttactccccagctaagtacaaaaaacaaaaacaattgtgtaatattatactcattgatctaggtgctgattgcacagaaaagttcagtttgtaaaaattcagtacacttacatgtacttttctattcatatattacaccaatagaaagtttaaaaaggaattgtgctgaaattttagtatgtttgtatggttataacaggtaatatcctcaagtcagcatgctgtgtgtgtgtgtgtgtgtgtgtgtgtgtgtgtgtgtgtgtgtttgcagtttacccacctggattcatgtactttttcatgtttctagttctatcacatactgttgtctaacagatttcttttttcctttctgggacagtagcacattattctctgatatcacatgtgacagtgggtagagaatgtgacaatgaggggagagggacatgtgcccctcagtctaccgccctcctctttttatgttgttctactgacaaaacgttatatcaaaatgaagtaatcttcaaaataattgttctgagtgatctctatttgcttatctatatgcgagtaacagaatgcatatatcaggaagagtgtactgtaaggctacagaggtgtgtaaagacagccagcagcctggacactgggcagaactcttcccccactgctgcttttttctcatcacctgcttccctctgctctcttccaaccaatagtctctacttcttagatccacaaagtgacatacggttaacttaaccatcttgcattagcatattaaagtaaaaacctaaatctgactcaaaatgaacacaaatatcgtttgatcttaatttcaaaattcagaacagaagccacatgtggctcaacttgactcaggcttccttccctagtccagtcagctgtggatggggtgtgaattgtgcagtataaatgtggctggccaggactggggataaggggggttgttctaagggaaagacaatagtttcttttgaactaggctgccacaccaaaaggcatacctttttctactatctgttctggtggtttttttgcttttactgtttcttcatgtttctctcaattcctaaagtatcattgcatcctaggtgcggttttgaatgacagtctgttgtttgtcagaaaaccatgattttacttggaatatgatttcatttcggcggaagccctacttgtttatcatgtaggaattaacttttctattaccaaatttagtcactcctcacattcccacatttccgtctttgtaattcaagctgttttcagtaggtgtatattcctgattctctcattcactgataccagcaaaaaactcttataaggttccctccatcttcttcatcttggtaaatggcactaccattcagcaattgtctgctaaaacctagaattcacctcacgtccaaataatcccaaataataatcaacaggtccagtcagcctatctccaaattataacccaaatttgacaatttttcttcatctgcactaacccattgccctagtttcagtctgcataatctctcactcagactgctatgaaacctacttccactccattcccctcacattagccagttattatttaaatcatacatcaattatatcatttccatgcttatagcagcagtggcatcacattgaaagtaaaaaaaaaaatcaaaatgccttaacatatcgtaggatgtcctgcatattcaggttccttctcatcaccccaacatcactgactacactacacttgagctacactggccttgttttccgacccttagaaaggtctcagttaattcccatctcagagtagttgtcatttcctgcctggggagctcttcatgtctttctatggctcatttctctacttctttcaggtctctgctgaagtgtgacttctccagggggaccttccctgaccactctacctataataataaccaccactacctctccaagccatcttagtttctattaccatgtggtatgtctttttgcacttataattatttaaaattgaacagtattttgtctgttttgtgtttattatctctccataaaagtaggaactttgtgctgttcacctttatattcccagcgtccaaaacagtacatgacaaagtaggagctcaataaacacttactgaataagtaaatggaaattgatgaaaacatgaagaaagagccatcattctgtattttttctttctggataacgagccatgtactaaacatctttactgttatttttctactaatttcataggagacaaagctttataacttacttttgtgaatgagattctttttatttccttactactgtttcattctttcctgtcattcaaaactcaccttcctcggtatgttctttctttacctctgtccgttcagatcagctcttgattctttaggaggcttattacagtgggtatgcctcaatatagtaatacctcatgtagctgactgggaaactctcttattcaattggtgaaaaatggatgttctcagcatcagaattttccacctgttggagttataccagttaagaaataaaagagtccaagaagggatgttccagataggggtgccccacataacacagaaggataagagttcctagaactctgactcaagtctgcaaagataaattaattaacgtatagctaatcctacatttaaaaagaaattgttgagggtttgtttttttttgtcactaagttccagtttaggagctaacacattcaaatcaaatgttccttaaaagaagctttataaaaatcagattttctctgattattgcaattaagggttaacttaaagaaaaaaaattaatttccctaagaattccacaggtagaaagcaaagcaatttaaaacttgccagaaatggctggcatttatgaaatagtttattgtcaattacacagctatacatagctataaaaattgggacaggtgggaactcagagtaatcagtggtacatctcacatttcctctagataacttatatctaggctggttgttgaaagcatagaagcagaaaacttaaagattgaaaagttcttgggaaatataatgaaagtataattatactccttacgtaacatatcttgcaatccctccctccctccccattccatgctaattcttgccccacatattttacagtatttctctgactttaaccttgctccttctgcttttctggctttaaatagcttttgtgaaagcttttaaagtgtgtttgaaagatgtttccctctttggatttgaattcattcagtcagtcctcgagagcagacccttaagtcctcttgagtattctctcttcttgaaatgaattccagtggtccaaagttaaatggtctaggtcagtctggacattctggaagggtcatcctgtagtagcacaataccaaaccccttttccatggacttgtagggataattagggaatattccctctcctctgatacttaattctgctgccaccaccttcagttctttctttgtcaccactgacagctgagtgtttctctgtttccaaaacatcatcatcccctacattatcccccactgatacagcctttcttccctttttctagctacagttctcttttgtatgtcttaatttcaaagtgtgactttggagcctagagaaatttgtacatatcgaacatagtactgctctgctcttctctcttctcttctcttcctttttttgagacagagtctcgctctgtcgcccaggctggagtgcagtggtgtgatcttggcccactgcaagctctgcctcctgggttcaagcagttctcctgcctcagcctcccaagtagccgggattacaggcatgcgacaccatgcctggctaatttttgtatttttagtagagacaggatttcactatgtaggccaggctgtcagtactgcatttcttcaggaactacaaggaaatgggtgagtaactattaaatctatttgctgttgtataacatagctttttggttaggtttgtgttaaagactgtgatgatggtggtgaagagttacaaccagaagaatctaaccctttaaaagtcaatatggtatctgagcatcaaaaaaaatagaaaatggacattattatagagaggcaagaaaagatgaaattgcaaaagctccttttgattaaaaaaattaacctgtaactcactctctaaaacagaaacagatttagctttttacataggaaatcaattgataatgaattggtgactagatactcaaaaacggaaaaggcaaaagaggaacactaagctaagttattgtgtgtggaggacgtgtgataacttcaggaaacagctacccctaggactgggggaacaaaatgaagaggttaaaattattaaaacatagaggattgaaggaggttctctatggacttgtgaagagggctccctgtttggctggtgtaggtggctcggacctcagaggaatttcccatgaagctggacctcaggtctctgaggatgatgctccagccagccagtgctggtgttgctgataagaggcactgagactgtttctgtttgagttgcaaaagctgcaaactggattcaactgttgttcctggaacgacctgccactgcaggatgaaagagtgcttccagagagacataggaataacaagcagaaaatcagagtcagaaagcaaacaggaaggagcaatcccttctttctcttctagcctgccactctctctccctcatgccctctcgtggcagatccaaatggagagccaactggagaaggaaaaatgtggcttgaaatttcaatctcagcatcataaagtggaagaatgggttttaggtttggagacaatagcttaataaattgtacaggatgttattcaaaaacaaaaataaattatcagtttctgcttttattcagagtcttccaaaatgttcatagtctactaaagtgcatgaaatggttctagagttcagtgaaatcgaaataagagaagtaacacaaaaataaattactgtctgtatttagtactgagtgttatgcttaatgatgtttatccatttaacaggcattatattattcaaccttacattatctgacacattaaaacaatcttccactttgacctcttattcctcattggcagaaagccgatctcccttgtaggaagatggaaagtaccagaacttatcctcctagcctcccttgcagctagggcaaggtcatattacctgactgtgcccagtgagttccttgggacagtttgctcatgagttttgggaaaaattttcccttagtaaaggagactcaagggaagaaaagccatttctccttttcactggcctggttgggtctgcatatgatgctgggaaccgcttttgctatcttgtaattatgaagagaaacataagtcatcctgaggaaggcagggaagaaagatgacaccattggaattctccaacttcttgatatctcagggaggataaatacagtttctcaatgtttcggttttaaattatatgccctgttacttgaagcaataagatactgaaccgttttttcaataaactttttgagtatatgctaacaacttttctgtggtcagagcaagctgtataattttccatccatttaaacataacagaaagagcatacttctaaataaaaagattctggtcccacaaatttctaaaaactgattttcactgaatatcaaacatacacccacatattgctaaatcaggattaagtatgatttgaagggacaatgaagtttaagggttttgaaaataaaattgcttttgacacttgttttttgtttctatgaatgtcattcctgcttgaatccacttcttgtcaattaataggttcagagagttcaagtacgtaatgaaaggttaaaacagaaaatgcaagtttttttgttgtttgtttgaaacctatcagttcctatggtattttcatttctttctctggagacttttgtttcttgctgctcaggtttgagcactgatctttggaggatagattttaattaatacaaagttttaagagttgaagcactaaaatgataattttacctgtaaaaagtaaaagtggtttaattcatattaagaattgagagatcacagttcccagagaagaaataacaagctgttctcttaatgttataatattttgatttatagacatagaataaagtagactaggggcccaatcagagcatagacattttatcagaaattttggaacagaataataatcaacattctgaaattacagtgcaatattgggacacagaggatctaaaaacaattcctgggcaagggaggggatttccttctcattaaatgtttctgcacaccattatcactaatgataatgatatcaaaattttaccgaattctgcctacatggacttccctcttttgattctcaagtgagccacaatagattctggagcatgtgtctaggaattttctgatcgtcttcgttaacttaaaaatcactcaatctataaatttggaaaggagcctctatttcttataaaaggttacaggctgtaaggtgaccctttgaaaggttgggaagtgcagccagtgcagcctgcagcagagcctattagcaggcattttgaaggaggaggggtcggggtaggaattttatgttgaatgggttggctaagcatacatatttaacatggtacagtaggagttatgaatattgatgaagacagtcttaacatatgcatattgaacaaacatgcatgttacatgtgacccatgttcactttgggatggagacttaacaactaaatgtattataattgggccctaaatgccaataggcacttgggacacaaggacactcaagtgtgcagcctctgtaaactgtctagaaccagtccatggtcagttcttatctggagaaagttactgaaatcagtctcttgtaattatagctggtgaaacaggggctgagggtcagttaatcagtgcctaggggagctgcagttgtttgaacattgcttatctcaaggtcaatgcttgtttagctgctagagaaaaagaaaaaccttgtggcagatagaacatagttcattatttaagtgtggggatacatgacttaactcttgtctgtcatggccttaggtcctgtttataagttggtatttcattgccacaaagagtctgtttttgtcagtcttaagatctctattttaacacgaatgctggtcagttgttgtgtctaaactgcaaaagggaggaagtataatgagtcatgtttgacctcccgtcccatcataaccaagaactccattgttaaggtttttctggggtctccttggccaaaaggaggttcgtttagttggttggggacttactatgttattcttagcttacaccatatataaaatattattttgatgattatagtctagatgacttttgttgtttgggggttttgttaatgttggataagatcaacaattcaattcaacaattactgattccctagtttattctagactttgttctagactttgagatacagaggtcaagaaattcaccaataaactgggtggatagacacataaacacatggctacaagatggtaaaagtgcacttagtgattcaaagtcatcagagagggaatacgctatttgatgtatctagagagaaactgagtcagaaaatatcttgccagagaaagttgtatctgaattggagtttaaaagaaaatttggctgggtgtggtggctcacgcctgtaatcccagcactttgggaggccaaggcgggcggatcacaaggtcaagaaattgagaccatcctggccaacgtggtgaaaccccatctctactaaaaatacaaaaattagctgggcatggtggtgtgcgcctatagtcccagctactcaggaggctgaggcaggagaatcatttgaacccggtaggcagaggttgcagtgagctgagattgcaccaccgcactccagtatggcaacagagcaagactgcgtctcaaaacaaaacaaaacaaaaaaaaagacgaagtttattgtttaattaacagccaatatgaaagaaaaggaatttccataatactccttttttccctttttagggaacataataaaggtacaaaggcacaaactctggtctttagttatttcttgaaagtaaggtacatattgtgagaaccaaggcttaaaaagacagggagactggcctggaggggctcaggtgacttactaaaatggttcacatgattctgcagatgaagaggtcctgagggacttttgctataagaccatcaccctgatggcagcatgaagtccgaaagcagtggagaggatattaaaaatggccggtcaagaaatgaaaagcacgaccttcccctcaaaaagaatagtttttgagtatgtgaatgaaatttgctaaccaactaagctcaaaatttcccttagatctttactgtcaagatctatgagtgttacatatatgaagagttgggtataatgaaaaataatttaaagtaggaaactgcagatagcaggacttagaggatcaatgagaacttttcatcaaactttctcacctttattaacacttagcattacattcttttttttttgtcacttctcttcctacttcctttataaggttttatctcattctcttctatctggtctagtagttcctctgattacctctttctcttccactcctgtttccttctcctaatttattttctctctctctctctctctctctctctctcgtttttggttttttagacagagtcttgctcttgtcacccaggctggagtgcagtggtgtgatattttggctcactgcaacttccgcctccctgggttcaagcaattctcctgcctcagcctcctgagtagctgggactacaggtgcccgccaccatgcctggctaatttttgtattttttgtagagacgaggtttcaccatgttggccaggctggtcttgaactcttgacctctgatgatccacctgcctcggcctcccaaagtgctgggattacaggtgtgagcctccgtacctggccaatttttttctttttacgctcttctttttcctttgctttatttgagaactaatgattaattaaagaacaataaaaataacaaactttttaaagacccactaaagcttctagaccagatgactctgggctcactttgcacacaacatgaattctaggtcccgaggagagctactgaaagtaaacgcaagacacagtctctttctgaaaggtgattaagaaaagaggataataaagcaacatctaacttatttatcttccttggaagagaatacctcaaggaaatgcctcaggattaagatgagtgtcttcacttttgcaaaaactcaattaaagtgccatgaatatgaggttatttaatagatatgacctgcctcttctttgatatccttggattatgatctttagaagttaattcagcagctattctgttaggtttcagttgatttaattctcagaatcataggcttttaagtaggagaattagacagcctcaaatcaggatgagaaatatgtctagttaatagtggcagcatgaaagaaaaacacaaggccgggtgcgatggctcatgcctgtaatcccagcactttgggaggtcaaagcaggtggatcacgaggtcaggagttcgaaaccagcctggccaagatggtgaaacccattatctactaaaaatacaaaattagctgggcatgacggcagccacctctaatcccacctactcgagaggctgaggcaagagaatcgcttgaacctgggaggcggaggttgcagtaagctgagatcgcgccactgcactctagcctgggtgacagagagagactccttaaaaaaaaaaaaaagaaaagaaaaacacaaaaacaacaccccaaagtatactaatagagaagtactcacagtgtccttttgaggtccagaaaggcatgcactgtttctgattatcatgaataaagagaaggaaaaaagtgaggaatcaagctgtaaggaaataagcttttaagattacacattttaattacattaaaaaatgctcattccaaacaagtatatgtagaccatgacaggaaggatattatcacaatatcttaaacaaacaacaacaacaaaaacaacactttaccctaattgacaatttggcctgtatgtattctgttcttatgatattcaatgctctgaaaagctgaaatcatgaacaaggaattctgccacccacaatggcctccctcagaggacagtgttttctttagatatatagatatagtttatgtgcaatagcctctacctactgcaggccacaagagaagggcttaagaaagaatgactaggctgggcatggtggtttatgcctgtaatctcagcaccttgggaggctgaggtgggcagatcacttgaggtcaggagtttgaaaccagcctggccaacatggtgaaccctcatctctgctaaaaatacaaaattagccgggcatggtcccagctactcaggaggctgaggcaggagaatcgcttgaacctgggagccagaggttgtagtgagccaagatcacgccactgcactccagccttggcaacaaagtgagactccatcaaagaaagaaagagagagagagagagagagagaaagactctgtgggaaatatcaatgtctcatgacttaaaggtgaacagtgatcctttctttttataagtgtttccctctaaggatggtgtattagtctgttctcatgctgctaataaagatatagcccagagtgagtaatttataaagaaaagaggtttaatggattcacagttccacatggctggggaggcctcaccatcatggcagaaggcaaaggagaagcaaaggcatgtcttacatggtgacaggcaagagggcttttgcatcggatcttgtgagacttattcactaccatgagaatagtatgggaaaacccctctgcataattcaattatctctagctggccccacccttgacacatggggattgtttcaattcaaggtgagatttgggtggggacacaaagcctaaccatatcattctgcccctgacccctcctaaatctcatgtcctcacatttcaaaaccaatcatgccttcccaaaaattcccaaagtcttaactcatttcagcattaactcagaagtccacagtccaaagtctcagctgagacaaagcaagtcccttctgcctatgaggctataaaatcaaaagcaagttagttacttcctagatacagtgggggtataggccttgggtaaatacagccattccaaatgggagaaattggccaaaacataggtgctacaggccccatgcaagtctgaaatccaatggggcagaaaaatcttaaagctctgaaatgatctcctttgactccttgtctcacctccagatcatgctgatgcaagcagtgggctcccatgggcatgggaagctctgcctctgtggcttttcagggtacagcttccctcccaactgctttcatgggctggtgttgagtgtctgtggcttttccaggtgcacagttcaggttgttggtggatctaccattctgggtctggaggatggtggcccctgctcacagctccactaggcagtgccctggtgaggactttgtgtgggggctacaaccctatatttcccctctgcactaccctagcagacgttccctgcagcatacttctgcctgggcatccaggcatttccatacatcctctgaaatctaggtggaggttcccaacctcagttcttgacttctgtgcacccacaggctcaacaccatgtggaagccaccaaggcttggggcttgcaccttctgaagcaatggcctgagttgtacattgcctcattttagccatggctggagctgaagcagctgggacacaaggcaccatataccccagactgcacacagcaggggagccctgggtcaggcctatgaaaccatttttccctccaaggcctccaggcctgtgatgggaggggctgctgtgaaggtctctgacttgccttggagacattttccacattgtcttggtgattaacatttggcttctcattacttatgcaaatttctacagcaggcttgaatgtctccccagaaaatggggttttcttttctatcatgtcagcaggctgcaaattttccaaaattttatgctctgctttctcttgaacactttgctgcttagaaatttcttctgccagataccctaaatcatctctctcaagttcaaggttccacatatctctagggcaggggcaaaatgctgccagtctctttgcataacaagagtgacctttactccagttcccaagaagttcctcatctccatttgagtccacctcagcctggactttattgtccatatcactatcaacattttagtcaaagcaattcaacaaatttctaggaagctccaaactttcccacatcttcctgtcttcttctgagccctccaagtccctaggaagttccaaactttcccacattttccagtcttcttctgagccctctaaactctttcaacctctgactgttgcccagttccaaagtcacttccacatttttgggtatctttacagaagtgcccttctacctggtaccaatttactgtattagtctgttctcatgctgctgataatgacatacctgaaactgggtaatttataaaggaaagaggtttaattgacccacagttccacatggttagggaggcctcacaatcatggcagaaggggaagcaagacatatctcacatggcgacagtcaagagggcttgtgcaggggaactcccatttataaaaccatcagttctcatgagacttattcgctaccacgagaacagtatggggaactgcccccaagattcaattatctccacctagtcccacccctgacacaaggggattattacagtttaaggtgagatttgggtagagacacagccaagccatatcagatagtaaagagtgaataacactactgtatgtctgtgttattctttcattgattgtttattggaggatgggttgggaccataaaatttttttccttactctgtggtagtagttgtttgccaaaaagctgaagtattcccttagggaataaagttctgttttgtattatatgggcgtgatgtgaatttactatttatgatgtctttgacccataaaaaataaatttttatttggtaatggctaattcaggaggggtgttgataaaatgaacagttctctgcgataatcaggtaggatatattttatttctgggtcagaaggagagcttcaaggcaatgctataataatattctgttaacttcactgcttgaccgtggaactttgattttattattattaaacagtaatagccacacacttcctaggtgttggtagaatcatgtaaaatggtggtgttgaaatttccagattaaaaaagaaggtacctcctggtgcttcattttcttttctcagattttttttgttgtgttcaatgaaaacacacacacaaaagtttcaaagttttaatgcttctaggaccaagaggtatttgtcaacaatcttccaaactctaaaaggaatcagcattggaaaaggtaaagatggatcctaaggcaagacagaagaaccaagcaggaggagacttgtgtgttctcactcacacctactgagatcctttaccaagacatgggacacagacagagttagcatccagcatcttattttatgtgagtggctttctctgagagccaagtctgtttcaaatcctttttcttcccaccatagcaaagcttggactttaagtctcataattgcaaaagagtcagtaaaagcccctggaatgtgacagcagttgtaggttgggctaaaggcagcaggatctatggaagtattagttctaagagttgtcaattcttatgtaatgctttatgcaagagaaggcaacagattgctccaaattattcagaaataaattccgcatagtcaggtggaggaacagatgactcttccactgtgcatccaaaccacaacctgataggaaattgctggaggctggaaacatgacaagaactgcttcactggaacttcagcatagaaacaagacaagtggattctcctttgtgatcatcactatttacaattaaggtaaatgatgatttacaattaagataaatggtgatgatcacaaagaagaatccacttctgttttctattggcaaacattagacttgcactaatccctttttaattaagtttggtaaagaggaataaaaaatatgaacttttcaaaatatcctaaaatacaaaaacaggaagaaatttgtcttcaagatatagagtaacagcatacttttggaaaaagacattaaaagggtatggaagatatcttttaaaagcatctgctctgtttattcaaaaagattcatgtgttttgacattgaaacaagcttgatgtttaagaagttattaatcaccagcttgaaataaaaataaagctctgcttaggagcataaatgataaggaagcataatataataataaaaggttacagaaaccaaattaaaaaattaaaatctgaactaaaaatagtaaagtgcagaattgaagttgtaggtaattatttattcagatgcaaaatgtaataagatttacaaaaatgcaggaagaaaagagaaaagatgccactaataagaaagtcgatagtagatatggcaacagacattcagtctaaaaaaacagttttcccaaagaggagatgagcactctataaaacagagacagtagtcaaggatataataagaaaccactttttcatgcaaaaataaaagactccatgtctcattttagtcaaaactgagtaaactgataaacatccagatttaccctgttgtttttgaacatttcaaaaataatagcaacattttaaacagaatgccagaagaagataaacaatatactggaaggacaaaatcaaaccagcctcagtcctcaaaccagtatttaacactagaggacaatagagcaagtgtctacagggaagaatgcattgtaatccatgaattctacaaccactaaattgtcattcataggtaaaggcagcaaatattctgaaacatctgtaatatataagtaaggtagaaggtgggactcaactctggaggcagggctcgaacactggaccaaattgaggactagctagaacagagacttggtggaagctgctttccataagacacagctaccagtgtgtcatcttagtttatcactgccatggctacacccagaagttaccacctcttgccatgataataaccgcatgacccagaagttaccacccttttcctagaaatttctacataatccaacccttaatttatatgtaattaaaagtgggtaaaagtatgactgcagaattgcctctgagctgctactctggacacattgactatggggtagctctgctcttcaagaagcagtaattcttgtactgctgtacgccgctgcttcaataaaagttgctgtctaacatcatgggctcgcccttgaattctttcctcggtaaagccaagaaccctcccaagctaagcctcagtttgggggcttgcctgtcctacatcatcagtattcagaaaacctgcctaacattaattttctaatgggaaataaatattttaatgatatatttcagccaactaataaataaaaataggattttaaatggggaaattgtcatataaaaggtttggaggcagttattaaaattattatggagctgcccgggtgcagtggctcacgcctgtaatcccagcactttgggaggctgaggcaggcagatctcgaggtcaggagtttgagaccagcctggccaatatggtgaaaccctgtctctactaaaaatacaaaaaatagccagggatggtgatgtgcacctgcagttccagctactagagaggctgaggcagaagaatcacttgaacccaggaggtggaggttgcagtgagccaagatcgtgccactgcactgcagcctgggtgacagagcaacactccatctcaaaaaaaaaaaaaaattattatggagctaaagctatgaattgttgtaaaactgaatgcagttgtcaacgaattttgaaatagaaaacatgtaatgtaaaaaaaaatgcttaagcctaaaataaatatagccataaaagccaagagtcagtagatttggtttcattcttgatgtaggataaacagaaaatataggttcaaatattttgtaaaatcactaccaatacgcttaaaaactagagatatattttctaaagcactagagaaagcaagggcaaaatataacccaaaaagttcataaaatgtttttaaagtggaaaaagaataaatgtataaaaagtgtcataaactgataataaattagaaatttaaatataaatctatatatatagataactattataatggtcaactaaaattatctttaaaacttatgatagcgagaacactatatatcaaaacttttagaattctgtttctgaagcaaatttgtaactttgaataaaaactgctcccaatttttacaacccttcacttgctgtgagtcagactttggactaagtattcaggaccagggataattaagtgactgagatgctgctaacttcagaattgtctcccctgaaaaccctttgttactcccaaagcacagagtattgcctgatgctatcctgagaaaaaaatttagttctttgtaccagtagattctggctgccaaagctttaagcaaatatatctaaacctagaaatgtatcacttagactaaactgcagcatccccctcttctttccccacttctccacctctcagcagcagcagcagcagcagcaacagcagcaacaacaccatccacaatacattaccaggttaatgatttaaatcaacaccaaacatcagcatcttcagtaatatcaaagatacggcaaaaatgactccattaccactattagttaacataattttgctagcctgattcagggcaataagacatgacatagaaatagaataaaatagaaaaggataaaatgaaataattatttgcatatatgattgtgttcttggaaaaacaaaatctattggattgtagaagcagtgaaaaatattgtggtcaaataaaaagtattttaaaaccaatatttagcctatataacaggaaaaataagttagaaaatggaatagaaaaaagtctgtttatattagtactaaaattatttaataactaggaataaattatccaaaaatgaatgagacctgtataaataaaattacagcatttaaagaaagacacaatagaagacatatgtaccatatcccctaggttcaaatattttagagatattatttcctcccaaattaatgctgttagaatttcagcaagggttttgttttgggatccaataaagtaattgtaaaattcatctggaagaatagtcttagacaaaaaaaagaataaggaagaggacatttctctgccagatataaaaatgttgtacagtgcccctgtcatcataggtttcactttccactatttcatttatctgtggtcagctgctgactaaaattactaaatgaaaagttctggaaataaacgattcataagtttaagttgtgatctgtcctgacctgagtagcccaatgaaattttgcgcctctggctctgccccacccaggatgtgactcctccctctgtccagcatatccatgctgtataccctcatgctctttcatcacttagcagccatcttgattatcagatcaactgtggcagtatggcagtgcttttgctcagggaacccttattttacttaataatgtccccaaagtacaagagtagtgatattgccaattcagaatgccagcgagagctgtgaagtgcttcctttaagtgaaaaggtgatcattattgacttaataaggaaagaaattatatgctaaggttactaaggtctacagtaaaaatatgttctagccacaaaattatagatgggaaaagaaattcgtgcatagcatatataggtttcagtattatccatggtttcaggcatctactggaggtcttagaatgtattccccacagataaagggaactagtatgttgcaaagaatgatcaatggaatacagtagacacttgagcaagaaactctagttttatacagatttgatacagtgggtcctctgtacctgtataaatctctaggttccacatccatggatccagtcaaccttggctcaaaaatatttggaaaaaaataataaagaataacaaaataaataaaaaacaatgcagtataacaactatttacatagcatttacattgtactagttattataagtaatctacagatgatttaaagtatacaagaagatgtgtgtagttgtatgcaaacactacaccattttatataagggacctaagcatcactgaatgttggtgtctgtgtgggccttggaaccaatccctcagggatactgagagaagactgcataaaggcatctacatgaatagagagaaaaggatattccagtaactgctgttgggggagttagttaaatatttgctggaataaacgttaaattcttattatgatataccaaaataatttccagaaaaattaaatagaaaagtaactataaactatgcatatatatgaacaaactcccatatacatgcacatatataaacacacacacacacacacaaacaagactggaagcaaaaccattaacagtggttatttcttgccagaggaatattacattatattaatattttctgcattttagaatcttccacatctctataatgaacacatattgcttttaataaataataaatattgttaaacaacaaagatgaaattatccagagaaaggatgttaattacaaatgagtaaaatgtatgaataagaaagagttgtatgctttaaggttacaggaatattccaagatacatagaacctcaagatgttggatataccatcagactccctggattcaagattttgttccacctttgtttcaccaggtgcgagaaccttgggacctctcatttataaagtagaaataataaggatgctgtgaaagtcattgagtttgcatgtgaactatttccaataatgtgagacacatagaaggcattcaaaaaccattaactactgctatatgcaaaaaacttagctaaaaatttcattataatttgaaggactgataaattaggaagacactactattaacatattaataccataatactaatgttataattgtattataaattgttaataaattaatattattcaaatttagagtagaattttgacatcttccatatgttatgaacattcatagtcaaaagtaaggacaactgcttaggtgttcagccagtcttccaaaagactagtcatgatgttttaaagtgtgtaattggaactattttggtaaataaatattggattcaatttatcaacttaatttttttatttgtatgtatttgtttattttagaggcacagtctcactctgtcaccaaggctggagtgcagtggtgcagtcagagcttactgcagcctcaatcttctgtgttcaagcagtctcccacttctgcctcctgagtggctgagactataggcatgtgccatcacacccagctaatttttttttttttttgagacaaagtctcagtctgtcacccaggctggagtgcagtggcccgatctcagtacctccgccccccgggttcaaaggattctagtgcctcagcctcccaagtagctaggattacaggcgccaccaccacgcccagctaatttttgtatttttagtagagatggggtttcaccatgttgtccaggctggtctcaaactcctgacctcaagtgatccacccgtcttggcctcccaaagtgctgggattacaggcatgagtcactgtgtctggccccagctaattaaaaaaaaaaaattgtaaagaaggggtctcattctgttgcccagggtgatctcaaactgggctcaagtgatcctcctgccttggattcccaaaatactgggattacagatgtcagcccccatgcctgaccaatttatcaactttgaaattaacaagttagtatgcctgttcaactcaaaatgattataggaaatttccagatatttgactttgcaataagatctccgtgacaaatgcttttaaaagcatgtgtggttgtacacttgctaagccttgtattatctaataattcaaaacgtccatttattaccttaatttgctgacttctgatatcttttaccctggtgatatatttttgtatttgcactttaacctgttttgtcattggagactattgtaatattttattgtgatttttaaatgttaatttccatccatgcagttttgtgatacttacaactgatattttggaggttttttttttaggagaatatgagtcctggggattttcatttgggaaagtcctaaaaatatatctgttggggaatctgcccccatattcacgtaggttcttttctgttttccttaagcgttggccagcttgagaaataaagggacagagtacaaaagagagaaattttaaagctgggcatccaggggagacatcacatgtcagtaggttccgtgatgccccacaagctgcaaaaaccagcaagttcttattaggggttttcaaaaggggagggagtgtgcaaataggtgtgggtcacagacatcaagtactttacaaggtaatagaatatcacaaggcaagtggaggcaggacaagatcacaggaccacaggatggggtgaaattaaaattgctaatgaagtttcagtcaccattgtcattgataacttcttatcaggagacagggattttttttttatatactttaagttttagggtacatgtgcacaatgtgcagatttgttacatatgcatacatgtgccatattggtgtgctgaacccattaactcgtcatttagcgttaggtatatcacctaatgctatccctcccacctccccccaccccacaacagtccccagagtgtgatgttccccttcctgtgtccatgtgttctcattgttcaattcccacctatgagtgagaacatgcggtgtttggttttttgtccttgtgatagtttactgagaatgatggtttccagtttcatccatgtccctacaaaggacatgaagtcttcattttttatggctgcatagtattccatggagtatatgggccacattttcttaatccagtctattgttgttggacattttggttggttccaagtctttgctattgtgaatagtgccgcaataaacatatgtgtgcatgtgtctttatagcagcatgatttataggcctttgggtatatacccagtaatgggatggctgggtcaaatggtatttctagttctagatccctgaggaatcgccacactgacttccacaatggttgaactagtttacagtcccaccaacagtgtaaaaatgttcctatttctccacatcctctccagcacctgttgtttcctgaatttttaatgatcgccattctaactggtgtgagatggtatctcattgtggttttgatttgcatttctctgatggccagtgatgatgagcattttttcatgtgtcttttggctgcataaatatcttcttttgagaagtgtctgttcaaatccttcgcccactttttgatggggttgtttgtttttttcttgtaaatttgtttgagttcattgtagattctggatattagccctttgtcagatgagtaggttgtgaaaattttctcccatttcgtaggttgcctgttcactctgatggtagtttcttttgctgtgcagaaactctttaatttaattagatcccatttgtcaattttgtcttttgttgccattgcttttggtgttttagacatgaagtccttgcccgtgcctatgtcctgaatggtattgcctaggttttcttctagggtttttatggttttaggtctaacatgtaagtcttttatccatcttgaattaatttttgtataaggtgtaaggaagggatccagtttcagctttctacatatggctagccagttttgccagcaccatttattaaatagggaatcctttccccatttcttgtttttgtcaggtttgtcaaagatcagatggttgtagatatgcggcattatttctgagggctctgttctgttccattgatctatatctctgttttggtaccagtaccatgctgttttggttactgtagccttgtagtatagtttgaaatcgggtagcgtgatgcctacggctttgttcttttggcttaggattgacttggcgatgtgggctcttttttggttccatatgaactttaaagtagttttttccaattctgtgaagaaagtcattggtagcttgatggggtggcattgaatctataaattaccttgggcagtatggccattttcacgatattgattcttcctacccatgagcatggaatgttcttccatttgtttgtatcctcttttatttcattgatcagtggtttgtagttctccttgaagaggtccttcacatcccttgtaagttggattcctaggtattttattctctttgaagcaattgtgaatgggagttcactcataatttggctctctgtctgttattggtgtataagaatgctggtgatttttgtacattgattttgtatcctgagactttgctgaagttgcttatcagcttaaggagattttggggtgagacaatggggttttctagatatacaatcatgtcatctgcaaacagggacaatttgacttcctcttttcctaattgaataccctttatttacttctcctgcctaattgccctggtcagaacttccaacactatattgaataggagtggtgagagagggcatccctgggagacagggttttgagagcaactggtctgaccaaaattattaggtgggaatttcctcttcctaataagcctgggagcgctatgggagactggggtctatttcacccctgcagtctcgaccataaaagacaggcacacctgagggggccgtttataggcctatacctctaggcgtgtattctctttcccagggatgttccttgctgagaaaaagaattcagcgatatttctcccatttgcttttgaaagaagagaaatatggctctgttccgcccagctcaccggcggtcagagtttaaggttatctctcttattccctgaacaattgctgttatcctgttcttttttcaaggtgcccagatttcatattgctcaaacacacatgctgtacagtttgtgcagttaatgcaattattacagggtcctgaggcaacatacatcctcctcagccgatgggattaagagattaaagtaaagacaggcataggaaatcacaagggtattgattggggaagtgataagtgtccatgaaatctttacaatttacttttagagattgcagtaaagacagccataagaaattataaaagtattaatttggggaactaataaatgtccatgaaaacttcacaatccacgttcttctgccatggcttcagccagtccctccatttggggtccctgacttcccgcaacaatatctgcattcctcagcacaaaccctatgtcatagcctatgtacactgcgcctgtcatggaaacaggttaacctgattttctggttttagttactgtcttcaatcccatcccaagtatgtagcttctgaataagggatgcccccaaaagttttgtttttttactttgactaagatgcagaatttttcaaagggagcaataagagtgctagtttcatttgggcagggcaatttctttatagatgttcagcatccctggccccaacaccgtgaatgccagtaggaggctcaaaaactctaactgcaaaaatgaaaaacatcttcacacaattctaaatgcatccaagtggaaaattccccttaacttaatcttttttctctccatttcttagttagctgtatttagtcaagtagttatttctgttttgcttaggtttgtcttgtttttttgtttgtttgtttgtttccagaaggacatatcagcattatattccccaagttttttcatgatttttaatgattatgttgaaagacattgatgtggtttggctgtgtctccacccaaatcacatcttgaattctagctctcataatcctcacgtgtcatgggagggaccctgttggaggtaactgaatcatggggtcaagtttttcccatgctgttctcatgatagtgaataagtctcacgaaatttgatggttttataaaggacggttcgcttgcacacactctcttgcctgctgccatgtaagatgtgcctttgttcttccttcgccttcctccatgattgtgaggcctcctcagccatgtggaactgtgagtccattaaacatctttttcttataaattacccatgcttgggtatgtctttattaggagtgtgagaacggactaatacagacatcttaaaatatctgtgagacacttgattctaaccttagcagtctatacacattcctctatattcttctaacactgaaagttgccttgcagaaatatgacacaaacttgctacttcccttcatatagatgatctgctttcttctacctagaggtctaagaatgccttctttatacttgaagttcagtaacgagcaggtgcttgccagtttttcatggctcttttcctatgaggaaagtagaaatagtatttccccatgtcattatttatacaattatgaacaaactgaaactcagagatgggcctttgcatagttgctcaccagtgaaaccccaggctgttaaaactcctgttctaagcttaaccacaacaggtaggtatctatagaagtcttcttagcctttggagttctgagtcttttaagtctcattctgtacaaacgtccactaatttaagcagtcttgtgggattttgataattttcctaatttgtctgtttaaatcaaagcagatggaacatttggactatttttgtttctatggcttcctggcccatttcttaatgtctgaaagcagctatctttaatcaaaggtcctaccctctctttccttcacctataataaattctaaagctgaatgtatgtatttgtatttgtttttatctttttctcttcctgggagttagaaattaatcatttcaacaaattcactttcctgaaatcctgtggcattttatgctcagtttgtagcacttaccatgctatattatgattatacacaggcctgtctcctgtgataggttgggtcatctccagactaggaatgatgatttattcatctctatctgtcattcttttcctctaccatccaccaccacccccatacaccccacatacccttttgtgttcataccacggaacaggcacaataaatattcattgacttgaatctaattatttacaaaatcttgtttaggatcctagcattttgagtgctgggaatattttagaactggccttatatccatggtttctaaaggaaaacgaggctccaaatgtttaattattcaagaaactgttaaatcacattattttcaaaaatgatagtaccaatctaactctgcaggagagcactttccatggaaaataatggcttttaaaatctaaataaagatacatggcacattccactatattttgaaaaagaaatctaattttatagaacttgacatgatagatacaggggaaaatctaagttgaaaacataatttttcacaaatacactttgcattccagtcttggtttctacttctcacaatttaacattgaaacacatacatttctatgaataacatgttgaacgtgctataggttctgaccatctgtgcaatttatcctttgaaatgttcccttgaatgttggaaccattccagaaccttctacctcttgcctataaaattgctgttgcagaaaattagccacactcaagatttaatggctctcgatcctgcagatttccagaaataccatcttattttaagttgaatatcactgagggagagccttgttacacactgattcacaacatttattataccttcagttctttgtataaaatgggccagttaggaaaggggctaaatgcttttgctctattcttcttggaatatgtgtgactcaagacctaacaataacaatctcggtaatagtcccagacaacactcccatgacttattaagcacctactgtggaccaagctttagctaaaagccctaagtacatcattttactgaatctttacaccaataaggctatcaggctcattatacagattcattttacatacgaggagaccaagactcagagaggttaagtaacttttccaagatcacacagctggtccatggacgaagcaggattagaaccctaaataagtgactccagagtttatatccttaatccttttgccatctgtcacccactactatgccctgctatagactatattgggccaaaatctagagacacaaatgagcaggcagagacctaaccatggtaggaattcaggaggtaagactgaaattagacaagtgagatgcatccattttaaaagtcacatagcaggaaaaaaagtcatacacctttaaaagacacaggtgcattgcaccaggtgtgcctgtttacaatttcctccacttgttttgactcttgaactcagttcttgaaaactacttatttgccttagtgaaagagaatcacattacatgctgtaatttgtaaaattaaatgtctccaattaagaatatatgcatatatgcatcttctattcttttttttttttttttttttttttttttgagacagagtctcgctctgtcgcccaggctggagtgcagtggtgtgatctcggctcactgcaagctccgcctcctgagttcacgccattctcctgcctcagcctcgcgaatagctgggactacaggtgcccaccaccacgcccggctaatttttaaaaatatttttagtagagatggggtttcaccatgttagccaggatggtctcgatctcctgaccttgcgatccgcccgccttggcctcccaaagtgctgggattacaggcgtgagccaccgcgtccagccacatcttctattctttttagttcaggagtaggtgggaatagtaatagttccacaggcacaactcttccaggtgtgattagctgtgtaaattggtcaatatctggaatgatgaaagaatcaaaagttgaacatcccagctgggtgtggtggctcacacctgtaatcccagcactttgggaggcagaggtgggcagatcacctgaggtcacgagttcaagaccagcctggccaacatggcaaaaccctatctctactgaaaatacaaaaattagctgggcatggtggcatgcacttgtagcccagctacttgggagactgaggtgggaggatggcttgaattcaggaggtggaggtttcggtgagctgagatcactcgactgcactccagcctgggtgacagaccaagacgctgtcttaaaaaaaaaaaaaaaaaaaagtttaacatccctgacgtgagtcagtagagattgggtagaagatatatttaaatctttgtagccaattgcaactttcattcaattattatatttcttcacatgtagttgcacatttgtgccagttttgtgaggtcgtaaaatatagtgcagcccccatgggctgatgaatcagattggtctcacctggcacaggtggtgccagagcctatgcataacaaggctgacttccaggcatagcagcttcctgtgctttcaaaatgcaagcacctgccacctcctccttcaagattttgtagaacagatcctttttcctttgaattaagtctagccacaaatagaaagactaagagcacatagtttggcaggattcataactttcttcattcatttgcccaacttttttaagtaccaggaatgatgagaaagaaaagctaaaaggaattagcatggtttgttatgacaagtataaccaatattgtattaaaataatcattttggcattgaagaatttattaacttattagctttgcaaaatcttattccccataaacaccagaaaacacatgtatattcacatgaaattttcatgtgatgaacaatgtattaagatgcatttaatttggttttaatattacatttctaccttaataccatatcacctcaggaattttattaatagctttgaaatgtatcacgagttctaaaggaatagatactttttttaaactatgtcatttaacctgaattggcaatatcagacaatttaaagaatagtgtgatactgtatggagttcaagttcatgacagaacatttttgtatttttaatccttgaatccttgaaatcattaatatatcttatattcatgtgtaaagtacctgaaaagccataacaatttttttaagtattccaaattaaaaaaaaatctaagtaggttattttctctggttttgtatttcattgatcatatcaaatgatgcagtattggaaaggactgactttgagatctcacataagcaatgttaataacaaacaattctgcaacatgtttgtgggcaaatgaaaaattaaaattttattgtgtaaatattcataaggcaagagatgttatgttaaagtgaatttttatatacctcaactagagaaagtagacttcacagatgggtgataacaatacagttattcttcatatatgcattgcattatccaaaaattacactgtgaacataattttaaattacttagtaaagaatataagatttggggcagagaaagatggtgcaccgatcatctcctcttttgcaaagacgccaagtcaacagctatctacacagaaaaaagcaccttcataagaaccccaaatcaggtgagctctcatggtacctggttttaactccatatcgctgaaagaggcactgaagagattaaaaatcagtcctgaatcactaacgccacccctcccccacccccaatggtaccagcatggtaaggagagcatctctgggtgctgggggagggagaacacagcaattgtgaggcactgaactcagtgctgtcctgttagagcagaaaggaaaccccaaccaaattcagctgatgcctgcccacagaggggacacttaaaccagtcctagtcagagggaaattgtggatcccagtggtctgaacttgagtttccacaaacctcatcaccctgggctacagcactctgagcctccaggtaaacttgcaaggcagtctaggccacaaggactgcaactcttacaagagtcccagtgctgaattaggcccagagacagtggactggggagggcaggtgacatattgagagaccagctgaggcagccaaaggagtgctggcatcacccctcctctaaccccaggcttacaactccaaaagacaccccttccttttgcttaaggagaggagaggaaagagttggaaggactttatcttgcatctaggataccagctcagccacagcaggatagggcaacagtcagagttgtgaggtccccattccaggccctagctcccagacaacatttctaaacacactctgggccagaagggaacctgatactttgaaagaaaggacccagtcctggcagtattcatcacctgctaacggaagggaagggcccttgatccccgaaaagccaccagcaatacatgggtactacgtcaaggaccttagcctgtgaaagtttctggcttcagataccaccaccacctcagcgggggtagaacaccaagtgggttcttggcagctctgattccagaacttgaatcttgggtggcaattttggacccgccctaccccagaggggagcccactgccatgaagggtgagcaccaggacaggtaacattcacgacaagctgacataagttgggccttaagggaacattggcagtagtttggcattcctcgtggcctgaggtggtagtggctatgggctgctctgcttttcaaaagggatggaaagagtgggaaggactgtgtcttgtggtttgagtgccagctcagctgcaatacaacagaataccaggtagacttctaaggtttttgactgtagttcctgactcctggacagcacttctggacccagcgggggcctggggacctcactgccctgaagggaaggttacaagcctggatggctttgccacatgctgattgtagagccccagggccttgagtgaatgtaggcggtagccagagtgtagttatagcagggtttgggcaagacccagcgctgtgctggcttcaagtctggcccagcacagtcataccagtggtggccacaggggtgcttgtgtcactccatccccagatgtaggtggctcagaacaaacggagactctgtttaggagaaagtaagggaagggaacaagagtctctgcctggtaatccagagaattctcccgtattttgtccaagaccatcaaggaggtacctctacaagtctgcaaaaaccacagtgttactgggcttggggtgccccctgaagtagatacagcttagatcactacaccacgtcctttcaaatatctgaaaagattcctcaagaagaacagctacaaataagtccacacggtgacaactacaataaatacccaatccttcaatgcccagataccaaaaaacatctgctagcatcagcactctccaggaaaacatgatcttaccaaatgaactaaataaggcaccagggaccaatcctggagaaacagagatatgtaacctttcagacagagaattcaaaatagatgtgttgaggaaacttaaagaaattcaagataacacagagaaggaagtcagaattctatcagataaatttaacaaagaaattgaaataattagaatcaggcagaaattctggagcagaaaaatgcaattggcatgttgaagaatgcatcagaatcctttaatagcagaatgaatcaatcagaagaaagaattagtgagcttgaagacaggctgattgaaaatacacagagaagacaaaagaataaaaaacagtgaagcacacctatgggatctagaaaatagtcttaaaagagcaaatctaaagagaaggtagagaaagagatatgggtagaaagtttaataacagagaacttcccaaacctagagaaagatatcaatatccaagtacaaggaggttatagaataccaagaagatgtaacttcttgaagactacttcaaggtatttaatattcaaactccgaaaggtcaagaaatatcttgaaacaaatgataatggaaacatgacatatcaaaacctatgcgatacagcaaaacagtattcagagggaagtttatagctatatgtacctacatcagaaaagaggaataacttcatataaacaatttgacagtgcaccttaaagaattagaaaagcaagagcaaaccaaacctaaacttagtagaagaaaagtaataaatatcagagcagaaacaaatgaaattaaagtgaaaaaaaagtgcaaaagatcagtgaaacaaaacgtttgtttctttgaaaaaataaacagaattaacaaatcttttgccagactaagaaaaaaagagagaagatccaaataaataaaatcagaggtgtaaaaggattcattacagctaatactacagaaattcaaaggtaattagtgctactgcgagcaactacatgccaataaattggaatctagaagaaatggacaagttcctagatacatgcaacctaccaagattgaatcagaaagaaatctaaaacctgaacagaccaataaaaagtaatgaaatcgaagccatggccaggtggagtggctcacacttgtaatcccagtactttgagaggcccaggtgctctctatttgtttgcttgagtttaggagttccagatcagcatgggcaacatggcgaaacccgatctctaccaaaaatacaaaaaaaatcagccaggcatggtggtgtgcacttatagtcccagctactcaggaggctgaggtgggaggattgcttgaaaccaggaggctgattcattgagtctagatcacaccactgcactgcactccaggctgggtgacagagtgagacctcatctcaaaaaaaaaaaaaaaaaaaaaaaaaaaaaaagccgtaataaaaaacctcctagtaaagaaaagcccaggacctaatggcttcactgccaatttctaccaaacatttaaagaattaatatcaatccttctcaaactattccaaaaaaaaaaaaaaaatagaagaggagggaatacctccaaactcattctatgaggccattatttccctgataccaaaaccagacaatgatatatcaaaaaagaaaactacaggccagtatctgtgatgaacattgatgcaaaaatcttcaacaaaatattagcaagccaatttcaacaatacattaggaaggtaatccatcatgaccaactggaatttatccctgggatacaaggatggttcaacatatgcaaatcaatcaatgtgacatgtcatatcaacagaatgagggaaaaaaaccatgtgatcatttcaattgatgctgaaaaggcatttgataaaattcaacctcctttcatgataaaatacctcaaaaacactggatatagaaggaacatacctcaacataaccatatatgactgacccacagctagtattatactgagtggggaaaaactgacagccttttctctaagatctgtaactcaacaaggatgcccgctgtcaccactgttatttaacatagtactggcagccctagctaaagcaatgagacaagagaaagatataaagcgtatccagtgtgcaagttaaattacccttgtttgctgattatatgatcttatatttggagaaaaccttaagactccacaagaaaaccattcgaactgataaacagatttggtaaagtcacaggatacaaaatcaacatacaaaaatcagtagcatttctatatgccaacagtgaacaatgtgaaaaagaaatttaaaaagtaatcccacctaaaatagccacaaataaaatgacatagctggaaacttacccaaggaagtgaaagatctctataattacaaccataaaatactgatgaaggaaattgaagaagacaccaagaaatggaaaagtatttcaagttcatgggttcgaagaatcggtattattaaaatgcccttactacccaaggcaatctacagattcagtgcaatcactatcaaaatacaaatgacattctgtacaaaaatagaaaaaaacactcctaaattttatatggaaccacaaaagacctagaatggccaaagcactattctaagcaagcaagcaaacaaacaaaaacaaaaaacaaaaaaaccacctggaggaatcacattacctgacttcaaattatactacagagctataatgaccaaaccagctatagtgaccaaaccaaattatactacagagctatagtgaccaaaacagacacatagacaggtggaacagagcagagaacccagaaacaaatctatacacctacagtgaactcatctctgacaaaggtgccaagaacatacactgggaaaaagacagtctcttcaataaattgttctgggaaaactggatatccatatgcaaaagaatgaaactagacccctatgtcttgctgtatacaaaaattaaatcaaaaaggattaaagacttaaacctacaacctcaaactatgaaactactacaagaaaacatggggaaaatctccaggatattggtctgggcaaagactttttgaacaataccccacaagcacaggtaaccaaagcaaacatggacatgcaggattacatcaagttaaaaagcttctgcacggaaaaggatacagtcaagaaagtgaagagacaacccacagaatgggagaaaatatttgcaaactattcctatgacaaggaattaataaccagattataaaaggaactcaaacaactctataggaaaaaaatctaataatctgatgaaaaataggcaaaagatttgaatagacatttctcaaaagaagacatacaaatggcaaacaggcatatgaaaaagtactcaacatcattgatcatcagagaaatgcaaatcaaaactacaatgagatatcatctcacccagttaaagtggcttatacccagaagacaggaaataacaaatgctggtgaggatgtagagaaaagggaacccttgtacaacgttgttgagaaggtaaattagtacaatcaccataaagaacaggttcctcaaaaaactaaaaattgagctaccatacgatccagcaatcccattgttgggtatgtaccctaaagaaaggaaatgagtatattgaagagatatctgcactcccatgtttgtttcagcactgtttacaatagctaagatttggaagcaacctaagtgtctatcaacagatgactggataaagaaaatgtggtacatatacacaatggagtactactcagtcataaaaagaatgagatcctattatttgcaacaagatggatagaactggagattattttgttaatgaaataagtcaggcacagaaaaacaaacgttgcatgttttcacttatttgtaagttctaaaaatcaaatcaattgaactcatggacatagagagtagaaggatggttaccagaggctgggaagtgtagtagggggttcggggaaggtagggatggttaatgggtaccaagaaaaattaaaaagaatgaataaggcctactatttgatagcacaatatggtgattataggcaataataattgtgtgtttaaaaataactaattcagttatttgtaactcaaaggataaatgcttgaggggatagatacccccattctccatggtgtatttacttcacattgcatgcttgtatcaaaacatctcatgtacctcatatatatgtgtgtgtatatatatatatacatatatatatgtatatatgtgtgtgtatatatatatatatatatacatttatgtatttaagaaacatttattaagcacaaatatgtgctagacttcagagcaaattctagccattccttggtattttgtgtctatttgttgatatataccagagatactcatttagctcataattccagtcattcattcactcctttcatatattatttttataaacatttgtcaaaaacctactaaataccatgtcctgtgcctagattctaagagtacagagatgaataagacaaatcctgctttcaaggagtgtatttttactttgataggcaagcacacaaatatgatgacagcattaaaatatttgactatggataaaaagaatgtcatgggaggcagagaaaatgattcattttgcttatgagactagaggaagatttcacagagaagatggtattaatctgggttataaagtgttccagtcactgctgatatgttcacagattatcctgtttcccatgttaaaacaaccactgtcttatattcatatattctttgggtcaggactgctccataacatctagagtctaagccaacaagactcaaaggtttaaaagggcttgatgactgaggaaggagtaatctagagttgtattcattcacacatctggaagttgataatgtctgtcacatggaatctcagcagggactgctgattggagcacaagcactacacttgatgaaactatgttgcccagttttcttgcagcatgatagtcttaggatagtcatgcattttacaggacagctcagggacccagaaatgaatatctagcaaacaagatagaagctgtattgactatcaagacctaaccttggaaatcacacatcattatttcccctgcattctgttggccactaacaagttacaatcctacccagaacgaaaggaaggaaaattagactccacctctggatggggaagtggtaagattctggaggagcatgtgggatgagtaatcctctttcaagaatctctataaaatacatttttaaaaaatcattattaagtacatgaaagatttaccctctggaaaccaagtagaaatgtgtacagcatggcttaggaatagtaagtaaggctgtgtggctagggcatggcaagaattgtcccaggatgacgcacagccacaaattggggacaaattttgaagggcctttaattcttataatggagaaattagacttaagcttatagctagtgatttcaagtgacttgttttgtttttaaatcaatgattgacatgagttaatttgtgatttagaaagatgacctggtgtttggatatatgggggtgcttaaaagacaaatgtaatagtgctggccttgcgcggtggctcatgcctgtaattccagcactttgggaggccgagcaggcggatcacaagatcaagagatttagaccattctggccaacatggtgaaaccccgtctctactaaaaatacaaaaatagctggacatggtggcgtgctcctgtagtcccaactactcggaaggctgaggcaggagaatcgcttgaatctgggaggcggaggttgcagtgagccaagatcgcgccactgcactgtagcctggctacataacgagactctgtctcaaaaaaaaaaaaaaaaatagagccactagagaatatgaagggccttactaagtagtgacaatgtaaatgggaagaacaaatagatatgagacatattttggaggtaggattatgactgattggccaaggccggtgaggaaaaaggaggcattaaggatgactccaaaacaagtaagaatgtctcaggggccccgaagcttggctactttgcccgaaatagattcttctggtcctgggatgctccatggatcatggcttagcacagatttcacagccagacagtcctaaccaggcctgttgagctggtcatgggagatagtagttccttattgctttctcgtatattctgttgatgattcttaaggcatcacagagtagaggtcaatgataaagacgatggtagtacctactaggtctccaaagcagacatgacaccaaaatagggtattcactttgaagttcctacttaaatttatgtgtactcactctaatttttttgagtagaaaagagtaaattcatgtagtttaatttttctttccatcaagaaaactgtggtcagaatactgttttctttctgtaatgactgtttcttctttgtcctgttagatttttaaagagattcaaacttcctcctaccaactcctgagacattatcaattaaccacacacagcccattgaacacagcatagctgtaattaaactaaattactatgcagtagctttcattacacaatgaaacagtttttgttagaccgtagagagagtttaattacatgtctagacaccccctgaattcagagcagcagtctttgtctcttttaaaagggaatttgagattttggttattgcatttttttaaagactaaatggtaaggtaagattggagcttttatattttttaattcctcattctactttaatgcatatttgctttaggaatcatttatacattggtgaatgtaaatttttccaaggaaaaactacaaattttcactctttgtcatgtttgacataccttttacttgcatcccaaaactcttttctttctccagtacattccaaatatctactcttattttttaatattatttaatatataaagtatatactgtcatctaaagcacagccatctttcataatgatattttcagcttcctcatcctagtgaaagagctcacctctttgcctgaggatggagtaatttcttcattcatcctcagtcctgcccaatcagcttctctggacaatgcaaacagttcagcctgtctgtagggccaaggtcaagatccccaggttctgcttggccagagtgtgcagactcaggagcttccctttttacttttgtgctccaatctaatctcttctttcccattacaaaaatttgcttgctgcttctttctccttaattgtagatcatttttgaaccttttcccaagctttgaagtttttcctgaataccacctttatttcattagccaaacctttccatagcctccattcctaaattctcaccttttctgaaacatgggcacatacagtggaaattagagaatgtcataatcatgtttatcctcttaatctcaacatcttctcagttgcctcacaacatatacttgttctaaccttatatacaaataaatattatatgctgatttgtagattgcacataaattgttccagttttctttatatacttttatcctgtcagcatgaaatttgtctgtttatatctagacacctagctttttctgttcatttttttgcataatatctaattaaaaataataaccattcacttaataaggattgctactgaaaacaaagataagtgtttcattaaaatcttaattgagtaaggatttcaggttttgaattgaatctaagaaaagtaatgtaggcaaaatgacattttccaccagtgccatatagtttatcttagaaatacgtacttaatatagttctatggcatgcatatgtataaatagacaggaaaataaatttctaatccaatgaaaatatccatgtttctccactctgacttagtatgtagaggagactcatgccactgtcagtgtgttctttgtgacctcttctcttgtctactactctaacctgacacccctggattccctacccagaggctttcatcattatctttctaccagcatcctgttcttttcccctatgacattgccatcccagcaagtattttccagcaaaatgatgcttcattctgagacttctgggccatacccaaatcctaaagcaacaaagcacacacataaacctcaactgcagggccagcagcaaccttggccatcttcattctcactactggagtctaacaggatgccttcatttattaacagatgcctttgaacttgcccacttctccctagtgtattattacagctaggtacatcactacttctttagccacttgatttttaagtcaacacatcagtttcgctttaatacactgaccagtacaatttatgaaaagtttcagacacaaagggtactgaagagaaaactaacagctgaattttcaacagtctttccccaaactcccctgaggcaacgctgtattgaatattcagatcaacttcaaagcatgtgaagaaattaattcagctataactaccaacataatgctactatagaacaaaaatgaattaggtaatggtttaaaatgtcatttggaagatgaaattctttcttctgatctcgcagttaaaatattcttatcggtttttggcctttctcaaagtgacaaggtaaatctcatttatctcactaatactcaataagcaccactgaggtgactaagtattattatctaccaagaatagtatatgtttaataagtgcaaagatgctaagagccatgcttctgctaaagatgatgaagtggcattgctgtggacatagattgccacgatgtaagcacagcattttctattttaatattttaacttctattacaaatgaataacaacaaatgaataaaaggtctagattactatcaccttttgactataagtttgtgatttaaaaagtagaacaatatgtgcatctataggaaaattgagttatttattaatcattcaaaagcgtttactgaatgcatagttagtgttaggctctgtgaaggaaatgtagtatctggggattctttgtctctatggagttctcagtccagtggaggaggcatcctgaatggaaagcctgcaaagaaacatacatgctgtaaagaaaaataggcagcatcaatgagaggatataagagctgacacatatgttactttggaaggataggtacagtttccctgaggaagtgacattatagctaagtcctgaggatgaggagagctggccagatgaagaagtgtgaaagggctcaggcagggaacagccagaggtgagaaagagatgaaggattttgaaaaactgagagaaaatctgtatcagagaacagaacaagagaggggagagtgacagaatatgaggctggagaggagcataggaaccagatcaccaagaccttgaaggccaggataaagtcgtggaaaaccattgaagactttcacaaggagaagaaatggcctgattccctgtgctttatgtaaagagtagtgtgtaaagtggcatgctgaaaatcaaagcaagtattaaaggggctgctatggccatccagctggagtactgctcatgaaagagacagggccattctggagacattttggaattaaagttgaaagaacttaattgtgaattggatgtagatggcgagggagagaaagtcaatttttgacttgaacacttaagttgatggagagattacgttttcaggtggaagaaattggaagagggcagggaggtcgagagtgctgctatggacatgataaagttaacgtgcccacaagatatccaactgaaaatgagacaaggcagttggataaatgatcttggagcttaagaaacaacattgaattggaaatccttttaagatactgtcatggaatgacctttaattctcaaaccgctagcaatgtaattacgtagtatgtttagttaatgtgagaatagatatagttgccagctaaatgtaccctgtatctgtcatattcaaatcacatcatttgtagcaaacatgtggtattcaggattaacaaatatatgaaatgcctgccacttagagaaaatttattgtaaaaaattatccaagtaatccgtaagtgttatagttaaattttatataaaaaatttaagattaatcataattttttacattcatgtatactcctttatgctataaaaagtagcagaaggaaagagtagacaaatgtgctcaaagagtttacagcaaaaaagaagactaggagaacaaacactgtaaatgttcaatttaggaagtggagtcagaaaaataatcatttatttattcatacacttaacaaatgtttattgggcatctactgagtgcccagctcccttttaaactttaaagcaaaattacagactgcagtattttgtttggcctgtgcaggatttaacatttttcaacttagttgccaacatttaaaatttggaatattttacatcaaaagaatcttaatttctgcctcgccttgaaaaatcagaagagctaacaacctggggtctgcatcccacctgaccacagttggctgaaccggagtagcctttgcctcttaaagggtcatgctctctccacaaacaggcacagtccctacaactttccaatgtctcccttttattttactccatgcctacctccttcattcttttagggtatcttcctcgcccctcgagagtttgtgatccctactcaagagctacacaatcaaacacaacattgctgctgccctgcatgctggaaactttggaaagatgctgaaggttataagcaggggagtgccatatctagatctttctactcttgtggcagtgcgaagcagggactggaggaggttaatgctggaaattgggaagctgacagctaagctggttattagagtaattaagagggaaagcatgctagtggcctggctggaggcaagggcagtaagcagggaaaggaggtggggatacacaagccactaaggagggagagcctacacatcaacacagattgggtgtgtcaaataaaggagatgaaggaataggataaattcaggtttctggcttggtcaattggatcgtatcatttgtagggattgggaatacaggtacagaagaagcagacttagggtaaactatgagtttagttttagaaatgttgagactggagcaccaatgaaacattccaatggaatgtaaagtagaaagttgaatggagtccagagctacagggaagtataggcaggcaatagagatttgggacacagtggaataaggggtaactcaatttgtggtttggatgagctcaccctggaaacacagaaaaagcagagggtcctaagcaagtggaagacctggagccagggaaggaggctgaaagaacagaggagtcaggaaagccaggctgctgatgccaggaacactggcctatgagagtctgaaggagagactagccaatgtagtcagatgtctttgggttgagaaaaatgagtcagaacagggtattgggtttgataggacaaaaataagattatagtgtgttaaagaaacaaaaatgaagggagactacattttcaggaaattggctgactagaataggaaataattgagtatagccagagaaagctgggaatatgtgggtttgagagaatatggaggtagtggttgctttctttttcttatttctctttgaggaccatagctcctagtctagagcatactaatgtgatgcaagggaacaaagaggaaatggagaggaagaggtaaagagaaggcaggagacatggaccttgactcaggagtcaggagggcatgggatgagatccaagcagcactaagggatggctctggaagaactacagaaaatcccaggagaactgagcataaacaaagtaacaggactggaagtgcaactgtttatcaatgacaaatattatttattttagaaattttttgttacgtagttgacaaaactatagtaagaatgtttcaaatcctagtcaccacaaactgtttcttttctaacacctaaactttcttactgtaaactataaacacatacagagaaaattcagtacacatttcactgagacctttttcaagagtgaagaaagacataaatatgacatattctatttataagttatattgcatcatcttgggtagaagatttgtggcaaattaaatgaaaaatgcatacaaaatttctattaaattagaaaaaggaatcaaaagccaggtagaggaaggaagaggtaaacatatccaaactcagctatttactgtaattgaaacctctttttcactgagatttttggcagcaaaacagaaggaaaaaatatgaattataaagcaagtattttctgatcaaagtatcctttgaaactttagaaaagagcaagttttccaagtctcaaaggattgctcaatgtgatgtattttacaaaggatgtgaaatagcaaggatagagtccgaatagctaccatttacacatagaatatctactacatgctcataacatactaagtaattacacacctcatttctaattcccactacaatctgcaaagtgggcgttgcagatgagaaaaccgaggcttagaggacagataaattgcttaaggtcacatagctaacaaatgatatactttgggcatattaccccaaagcaccactcatgaagtctttctttaataattgtttcagaaacaatgcaaaaaaaatctcaatatacgtatttctgtcaacccatgatcaagactgagggcaagatatttaaacagaacttagcagagatatgcctttggcagcaaatattgcatttattttataatatatattaaaaatatgttagtctctctcaactactctgcagataaaattatatttctgtcttatgctttttaaaaatataacacacttaaaatatgagccaataaattaattgtgcatccctgactcctactatttcttttcctcctcttccttatttttattccttaaagttttcattaacttgtatacccctggttatttgcttttgtaatttctttattaaaggttagcatttgtcaagataacctttagaagtagggtgctacaattgtcagatttgttgtttctgtctccattaaattgttagactgacatagcagattttaaaaatcttctccccagttcttctccccagtttatggtttgtttttttctgttttcttgcatgtctttgctttactttaattatgattacattgaacacatggtttattctagaatacccagttaccatgtttttattctttctagtgcatttatctatttatgttaatccccatgatttacataatctgtagctaaaatcaacaatatcttggtaagatatgtttctccatgattaggtatttctttgtcagctctatagatagcattaatatgatatcataaaatatctttgcacattttcccatgaccacacaatctttagcagcatgttttattctttattttcttttcctcgtctctatgtacggtgattgtgaagtaatgagattagtgttgatgatattagaagtgtgtatttcatttaaaaatcagttttaaaataaagggaagcctgcctattattcagctctttaaattgatctttttatgtcttcagatgctccaagatagcagttttcaaagtctagtctaggctaggcatccctggaggatcctgatatcctgttagggggttctgtgatgtcaaaatcattttatcataatatgaaggcatctcagtcaggtgctgtggctcatgcctataatcccagcacttggggaggccgaggcaggtggatcacccgagatcaggggttagagaccaagctggccaacatggtgaaaccctgtctctactaaaaatacaaagaaaattagctgggcatggtggcgcgtgcctgttgtcccaggcactcggaaggctgaggcagaagaatcgcttgaaccagggaggtggaaattgcagtaagccaagatcgcaccactgcactccagcctgggcgacagactgcgtctcaaaaacaaacaaacaaaaaaccaaaacatatatatatatatatatatatatatacacacacacacatacatacagtggaattttccagaggctacatggtgtgtgattttataccagacaatgcagaagcaaatatgaaagtctagctgttttctgttaagccagaaattaatgaaatttacaaaactgaaagactagcactctactaattttttgttttagaaaatacagttatttttattttagaatgtagtatattttaacaaattttaaaatataaatattatatatcttattaacataatattaatatatttaatattttcagttatatttttaaatattttaataagcaatgtcatgagcttattgctttttcaaaattaataggcattttaatttattaatttaattttcattttaactagtaatacagtaagtcttgcttgatgtaactcacataaacaaaaactctttggggtttccaacattttttttgaatataaagggttactgagaccaaaaagtttgagaacatgtgctctaaaagagtgttgatctttctaatgtttgtatctttttgggaaaagaaaaatcatacttcacattttccttctacctgtcttcctgacttgagataatgtaaaggttagaaattctattggtcaaagtttatcaggggatgtaaacaaaaatgaaatagtgactcctgacattttatcagtcagatatatttaaatgcctccccctaccatatatatatatatatatatatatatatatatatatacacacacacacacacacacacacacacacacacactatatatatatactatatatactatatatatactatatatatagtatatatatatgaatatatcatgacttttgataatctttctacaccaagtaatgtttagcaaatcatctctgcatgtctttttaaaagccaagatcatgacctttagcatttaattgctttgttttgttttaaagcttgttcctttggtagtgtatagctcctcgttctagtatttttctctaaactttccttcctttatctagtctagttctcctttatggagtgccaaatgatgttttcttttttgttgtttttgttgctgttgtttaacttgcacttagaacgcaaccaccttttcgtttcaagaaagccagaacaacatttagtgaggatcttcatataattagttctttgctaaacaaaacttaccaggtcatttcatttgtctttgttactgtgttcctatgtttagcgtcattttcttctcaacacaatggagtttctaaattgggtaagattagggggaaaaatcaatatgttccgttagtcccaaactatgcaattcttagatatgttccaaaggtactatatgagatattctatctatcttccccttcaaactcagcttatatcaagatacagtatcttccttcttggggacaccgcatgttttccctgggtatcattcgtggtcgagcatgctcctctgtcattctctcatttctcttcctaccttcattaccttcctttccagtatcctcccctcttttccttcgttgttatttttcttttgttccctcaccttaatcaatcaagtaacaaatgttcattgagcatctccttgggaattatgtaataggcaagacgtatgtgctctacagccagatgcctgagtctgaatcccaactctagtgtgtagttgtgatactgtacagatttcgtagcctctttgtgcctcagtttcttcatttggaaaacaaatattagacgacttactggttagagctgttgtgaagattaaatgagtcaacaggtataaggtatttaaaatagagcttaaaatacagtaagtgtttaaaacatgtaagagcctcaggtgccactgtcacaaccctcacactctgctttctgtgatgctaaggtggtatcccctggcaggaaacactcccatgaagagtttcttcatggagactcatgtctaattccttcctgcagaatccacactgggcccatgagaaatgtacatccagctattatttgagagtagctgaatctccctgaggccctctctgcattctcttgctgcaactatccactcttctttccattttcatgcatgagccagttatctgtttccccaaatcacgaagccatcttgaaactgtacctccccaaccccccttacttggcttaagtataaaagactccttgccttcccacatgaggtaggaaacgagagagagtatagcacactggaaactttttctcttaaaccaacagaaacatgggcaaatgttatgaacaggaaattcatggaagaggaaaactgattgaccgagaagctcaactatgctagtgaacagagaaaggcaaattaaaccaaacttaagacacaatctttgcactccagctcagcaaaagttaaaactacagatttagcaaagatattaacatatatgcatacattgtttgtgtgagtgaaaattgatggaggcttttaggaaagtgattttgaagtgtgtattaaaataaaaatgctgtatgccttgactccacaactgcacctgcttccaggtatctgtcctagaaaaataccagcagaaacactcaaatattcaagtgctggaatgtttatattgtattacttgtaactttttaaaaattgaaaacaacttgaatgtccattaaaaatgaataagtaaattaattataataaaagatgcaagaattcaatagaatacactaaactgatacgaaggtaagccttcaaagatattttgttaagcagaaaaaaagccacctaaaaattgtattaatgatatatataagtaggaaaatggaggaaaccagggatattaccttgtgtatatacatatgtagtctttttttttggtttggttttttgtttttgtttttgttttcttttgagacagggtcttgctctatcacccaggctggagtgcagtggcatgatcatggctcactgaagtcttaacctcctgggctcaagtgatcctcccacctcagcctccagagtagctagaactacaaggcatgcaccaccatccctggctttttaaaatttttcatagagatgggctcttgttatgttgcccacactggtctcgaactcctggactcaaacgatccttccacctcggcccaccgaattgctggtattacggtcatgagccagtgtaatatacagatgtcctgaatatttgatatatgtaaagaaatctgttcatataaacaagtgactcagaacctagattcactaatgcctagaatgctttttctatgcattagtgaatctagcccagtgtatatagactcgtttgtaaatgcatagaaaaaatgttcaaacaaactttttgggaaaaaacgtttcaaactgatgagggattacttttgaagaggggactggaactggatctgggggaagggaaatcaggtaggacttcagcatttacaatgagaatatgttgcatgtatgcttatacgtgattttacaaaataatttaaagtacaataaaatgagcagagttgctagatgtgatctttgagattcatctcaaatacagctttcaacatctatattgacagttagatttactaattctcagaagagcctatgagtgcatccatcattatcaaacagtatttgtcttgttaaggatagttctctataataactcacatctatatgtctaaaatactcacatctatatgtctgctcagacaataattatgaagtctttgctatacaggtttataagatcacacatccaattacgctttttagataataagccagacaaatttcagtacacagcaccttgacatcattatagtaattagctaattccagttgatatagtaatatgcataaagagaattgtaactaatattagctgaggagtaaatatttcattctgggaatagattctatacaatttaaattgcatcacatttaggtaactatttataaagtattatttaatgtatacagtttaaaacagattttcctttatggtacttattgttaagtcatactatgtgtgttcttgaatcacataacttatagttcttaaaagattaagtatagacattcgaaccataaatagcattacacaaatgttatttcattattttccctctttagtatctacatgaaaatgggattgtccatcgtgatctcaaaccagagaatcttctttatgcaactccagccccagatgcaccactcaaaatcggtgagaacatttcttcttgttttgtgaccccttttttcagagcagaaaaaattttactgtgtggaatttttaaatattgctccatccagttttacatccattcagttttcctgaataattgacatctgtaaaggaaataatatgttgttttggaagtttttgctctttcctggaatgtttatttggaaaatattgcttagaagttagtattctgttgctgggcacacaaaggaatcacagcttagaaatggcaaggaccacaggagatgaccttgtattttgtaaataagtttatagtgaacaaaatgatagaaaaagtaacacatcttttggagatattaacttttattccacagattgcttggagcttaattttaggtaataaagaactttgacataaaatatttagcacatattagtgagtctaggctttgagtcgcttgtttatatgaacagagataaattaagatctgcctttcccaaaatgcactccatagaacactggtttctcagcagggtagatgaggatgggagtgattcacagaaatgctatggctgatcaactaagttaggaaatgccaactttaaaaaagttaaacaagatttgtatttctgtaggactttccagaacctttaacctgttaacatataaatttacatattatatcatattctatgagacttttttaaaatttttaccaataagcattttgaaaaactataaaggtgaactttgggaaattctgatctacccaaagaaacctttaattagcactttagaaaaaaataaatgttactttccaagtatcttccaaagcaaatcttcatttcaaaaaatattgtaaactttattttcgatgaattctcactagtggaatcttcattaaatcctctgaagggcattgctcttctggtgccttccttatcgtgctaatctgcgaagttcactgcatttacagatgttaacacctttaacaattaagttgttcatatcagggaagagctcagataacataatgtgctttatgaatgcaagaacctaaggaaaaaatcctgaaagtcctgctgggcagccagcttgttctcataatcactcctgtaaggcaggggacagcaggcagtttccatttcctttcacatcactttcaaagatttaatccttaaagcaatttctttaaatggatggatagatactaatttaggcaggagaggttttctttctgaagggcttcctgctgcttccactgataaggatcaggcacctgccaggaaatgtgggtttatctttgaagtctaaaatggaattcattctgcacctgcctctcttgaagaatgcccttgaatggtttcctgatgtttcctgagtgcaagcgatatagctcagcaaatagttcataatggtagcaactttcgataatcttttacctaggtaatattctgagaaataaataaaaaggattcttaccaaaaaaatcttatagtcttcttatgagagtaaattcttataagtgaaatacattggagactgaatgtattttcaagctgaacaaaccttttgatgtttctgttaattctcgtgtcactgatgaaagtctattttttttctcctctctgtcaataaattgaagattctggattatatcattaattctgtattgtcccttagagttactgttacataaatttcagaagtaacaacattagacaaaatataactattgcaactattactttaagaaaaaatagcttggctgggcgcgggggctcacacctgtaatcccagcactttgggactgaggtgggtggatcacgaggtcaggagatcgagaccatcctggctaacacggtgaaactccgtctctactaaaaatacaaaaaaattagccgggtgtggtggcacgtgcctgtaatcccagctacttgggaggctgagtcagagaattgcttgaacccgggaggcagaggttacagtaagccgagatcacgccactgcactccagcctaggcaacagagcaagattctatctaaacaaacaaacaaacaaaaacaagaaagaaagaaaaaaattgcttatttgctgaaagcggggaattgtacagaagaacaaagattaaatatagatttatttgtaaatgtatttggaagtcatatttttctccaatttaaagaaacacatggattgttttctttagcttcctgttgggtgacttgttcccacccaccttcaccccatcatcaaatacaaaagaaagcaaatagataaataagttagttttatttttgaataacaaatattttgtcataaaagctgagaagacgtgcttcattaaatttttttcttgtgttattagctgattttggactctctaaaattgtggaacatcaagtgctcatgaagacagtatgtggaaccccagggtactgcggtatgctctttaataattatattttacttttattgttatttgaaatgtatttttgtttagcaatctcatttttaaaaattcctaatatttctatttataaatgcttaaaatttgttgcaaatctctatgaggaaggcatacataaataatactcagatcacttcttgttttctatgagaggttcaaggatgttggttttagggcactgctgttagaatgcctttgagccagtggctactcttagacccactgggcagcagaaagaccatcaccacagagggcaaggaaacaccatcgtttatagttggaattaaatccatgggccctttgtcacttttctttgcttttccttggatggagagtgtgtgtttaattcagatggcatataggacgatggtgagaatggggtggtccctagttctttccatggcctggcctagcctcactaagacaaggacttcaggtgagattttcctagaagagttctccagtccctgcagatggaccacaactacgttgagctcttcacatcttcccgcctcatcgcccagagtgggctgaaggcattgcaatcagaaagaacaaaagcttttgacccatactagcataaaacctgctctgtttttcttgatggtcaaattaatttggcaacaacttgaaagccaataaagtttgtaaaaattatcaagaattcctaaaattgttgtgattattgaatatgtcacagatcaattaaaattctaatctaaattataaagaaaaaagacaagatttcaagttatcaatcacaagattagtgatccttttctcttagatcagaatatttttacacaggccaggtgtggtggctcatgcctataatcccagcactttgggaggccaaggtagacgggtcacttgaggtcaggagttcaaagctagcctggctaacatggtaaaaccctatctctactaaaaaaaaataaataaaataaaaattagccaggtatgatggtgcacaccataatccccagctagctcctcaggaagctgagacaggagaatccctagaacccaggaggcggaggttgcagtgagccaagatcgcaccactgcactacagcctgggcgacagagactccatctctaaaaacaaaaacaaagagaatatttttacacaaatgtcctttatttcaattcatctcttcagtgaactgttaatcacctactgtgtagtcaagccagtgtgtggcaccagggagatgcttttcctgcccttacacccacactgggggctcacaatctacaagaaaacagacatgtggccagatgcggtggctcatgcctataatcccagcactttcggaggccgaggtgggtggatcacctggggtcaggagtttgggaccagcctggccaacatggtgaaaccccgtctctactaaaaatgcaaaaaataacccggcatggtggcaggtgcctgtaatcccagcgactcaggaggctgaggcagtagaatcccttgcacctgggaggtagaggttacagtgaagcaagattgcaccattgcactccagtctgggtgacaagagtgaaactccatctcaaaaataaaaggaaaaatccagaaatgcaaaccaagaaattatagcgtcttaagaaatattgtgttgtatgtatcgaaagccaccatggaaacatagaagaagggtgatattttgaattatctgtcttgttttctatagcgcttatatttgaggtcacccctgccccagaaatagacaaagaagtactacaaaactaactccttttaacaacttttgaaatcataaaaatcagataggcgaagtgcgataatatattcattgaagcatatatgtgattaaatccatagaattttagtgctggaaggaactttaaagttcatttattaacattctaatcttattaagttcagagactttgacttcaccaagattccacatctagttgttagtggctcaggaataagaatccaggtatccaagggcctaaaaatcatagaatttccctgtactatagggaaatttatatatttataaaactataaatcaatatagttttattcatagaagtatttatcaattattgcttttattttaaaatcttcattttaatatatatatattttttgagacagatctcggcttatagtaacctttgcctcccgggttcaattgattctcattcctcagcctcccaagtagctgggattccaccacacccagctaatttgttgtatttttagtacagatggggtttcgctatgttggccaggctggtctcgaactccaggcctgaagtgatcctccagcctcggcctcccaaagtgctgggattacaggcatgagccaccatgtccagctcattttaattttttatacctcaaaagtattacttggccaggtgcagtggctcatgcctataatctcagcacttcgggaggctgaaatgagaggattgcttgagggtcagaattcaagacgagcctggccaacatggtgaaaaaaaaaacaacaacaaaataattagctgggcatgttggcatgtacctgttgtcctagttactcaggaggctgaggcaggaggattgtttgagcccaggagttagaggctgcagtgagctatgattttactactgcattccagcctgggcaataaaaggaaacctggtctcagggaaaagaaaaagtattccttggtcattggcagaaataaaaatccaaataactatactcaatattaacagcctcctgtgcattctcttgtactcttctatgtctccttgtccatctaagcattttataatattgttttaatgagttagtattaattctggatggagagttcttagaaggaacattttaggtagacatgaaggatgagtaagagttcaacaagtgaagaagtggccacagggcattctttgtcagtgggtacagggagagcaaagtcatggaggattggcagcatctggtgagtttaggtgctgtttgtcactttgtcaactttgtatgactagaacatagagtttttggtacagagggcacaaatggacttagaaaggtcggatggaccatgtgtttaaagaatctatacatcaggctaagggattcagatttgacttggtaggtaatggtgatccagcaaaggtttttaatcaaggcaatatttttaaatcaggtctgtattttgtaaatatcttgatgataacattatgacatattatgacatgaatttaagggggaaagggatagaaagaaaacagacaaattagctattgtaaatgctcttttctaccactctcatgtcagaaatctacacacatgctcatgtccttccttagcttctcagcagatgacatgttcaatctattcttaaatctatctacttttttaaaatatttaaaaattgtaaaaatactgttttaatatattgtcctttccataaacaggcccttcatacaaataatgccatcttataatggaggcttattttctattattattttctcttgcaaatatccgtttcagcctagatggtaaataatgaggaaacagaaataagaggttgaaagtgaccaggataattctactataggtagtggcttatcaggaaaaagtagtttgccatattataagaaaaggaagtgaaagcagcaaggaagcttggcatgggggttggaaggtagactctacttaccttagtgaactattttggggattgagatggaaaataaaagtgtttttttggctctaaagtgctaaacatagaaatgtaattactattatataggcgggggcagtcttggaagtcaaaaacaagtaagtttaacatatttctttagcagacaaaggttccatttctatgtaagtaaatacatatgtgttcatacatactcttgacccaaaggaaatacactaaaatattacctcacaatgggagccaaagagggggtaggattttaaggatacacctgtgtgtggtaacataggaaacattggaaaacacttgggaaaaacagaagtcacagtaatactagggcccaggagtagataacctagagcagaggcaatatctagggttttgaattaaatacaaattttaatctagttatgaatatttgtttcatctatcttataaaaaattaaattgttaacaggtaaagctaaaaccctctctgaagatcagttctagccctttcttccctcaccacagatagatactctcatcagtctggcatgtatctttctgagaataagttggtggggaggaaactgtccatttatagaaggagttggaaatgagagccaagctcaagactggtgagaatcattatgattctatagaaagcaaagaatttacgcagagactgttttatattcttttatggccacaagaggagacagaggagagcctcaggaaaaaaaaagaaaagtgtattaaacttacatatcctagagacaggaggcacagcaagccacccagggccacgcaggaaagaagacaccagggtggtcaggaggcagaagacaggagaaagggaaagtttagactactgccttttggggtattttcttgggaaaggcaaggcaaggcagggtgaacagtttaggattgcctagtttgaataatttgtgtgggttgcctggctcctggctcttggccctgggatgactaaggcagaggaatatcccctcctggggtgtgtaggtcagatggatgaggtatggcactggactggttaatcggtatgtgaaaggcatgctccaggctggacgctttcttatctttcagaattaacaagccacaggagagacaggctctctgcaaccagaaaagctttttaagatgtcaaaaacatcataatatatataaagaaaaatttaaaatatttacaatacagagactttactttgaacttgaaaaagtgtctgacacccatataattgacagagatgagatgcgagcttgtttcgttgcttgttaggatgattatatccaaggtcgattatccttaagtgcactgtgtctagtttctacttttaatggaaggcttttcaaattacatcttgtgagagactgggtgtttatgttataccatctgtcatttctcaggaagtaaaaaaggaaaagccatccattctgtctctttcatagaacccttgccccaggctattaataaacagggctctcctataagtgaatcgcaaaagaaaaatcacagatgcttcatgtttaagcaaatactcattatttccttggaaatgtgcccagtcaaaaccaaactccaggccagaaaattaaaatttatggtccagataagtgaaatcaatgattagtgttcaaaaataacccatgaagagttcagtgttgaagggattctcaacatcttgtggatgagaaaataagtaggtcacacagacaaaaaaaaaaaaaaaagaaaaaatcgatcaggccatagctcctaataaatgtgctacaatataactatacaatattaactgccaaaatgttttaactggtctagatatttaaggcttgaagtttgtggatgtttcaaacccacccacgccaatcctagaaaagaaaatcaagttgttagagtagaaaagaaaccactatgttaagggcttaggtaaaaaaaaattatatctaatacgaattatctaatttattcataagcttaagtatgttcatatttcatatttgtacttgtctttattcaaattctattttcagagtctacaagctgttaggagtttgttttcttttggcatttgccaaggtctcattagttctgagacagtcctactggcataactcagaggaagtattaatacataaaaatgtcccatgtgctaagcctctaagcataacagtgttttgctattttcaggctttagtaatggcaaatatatattgtgcttctatttaagccaaaatgaaggctaattattaacaattgaagaatgagttcctacgatatgcagaaatccctgtacttagagtctgcaggtgcctaattctacaaataatattgtagaataataatattctacaataatattctgagtttccataaagaaggaatacatatatttcatatatactatgactgattcagtcttaaaaactctcattgcttggtaaccaattaattctgtcataattatcaataattataaatggaggtggtataataaagagatgattaaatgtggcacttcagctattgaatgtgaaggcatgatgaaagtgtagaatgacaggtaaaagagagagtccctcaccttccagctcttaaaactatccttgaatgatacctcccaaaggatcagcaaatagtgatgggctaacaaaagtcagtgtcaccaacctgatgttcagtattaaaaccacacatatattgctcatctaccctaaggcgtggtaggtctccacagatatatgggtgactacagggatgggctggccatatttggccctgtttacctgatgctcacaggcatagattgctggttgttgttgctgttgtggtattgttgttgttcatgttttcatgctttactaggcttggaagtcagatggctgttcctacttcaggcttgaccttgaatatgttagtgaaaccctctaaatctcagtctcctcaactatacaatgggaataataagaacacttatttcacagggctattataaagaataaataagataatgtatgtgaagttcttgcacagtacctggtaactaaaacatgtaatgaatgttaggcattactaaagtcattataatgaatatcatcatcctcatcttttcttattactgttaaaaatgtatcaattccttttattatgcagtatgatttttccattttgtcctcacaagagtaagtcctaatattcggggagttggtttgaggtctttgaaattactacatctctgccacagttctttagtttagaaataaaaacactcattaaaaaaaaatttctcggccgggcgcggtggctcacgactgtaatcccagcactttgggaggccgaggcgggtggatcatgaggtcaggagatcgagaccctcctggctaaccccgtctcttctaaaaatacaaaaaattagccgggcatgatggcgagcacctgtagtcccagctactcgggaggctgaggcaggagaatggcgtgaacccaggaggcggggcttgcagtgagccgagatagcgccactgcactccagcctcggcgacagagcgagactccatctcaaaaaataaaaataaaaataaaaataaaaatttccccctaagatttaaatgacattgatggttctaaactttattgtttatggccatttttaaatagttttttagatttttaaacttactaaatatgaatgtgatagttcctgagaatggagagtggttttaatagggtaaaccattaaaaaaaaggtagagaaaagaaatggaatctttttaaagactactggttttccaaatagtagttttagaaattttggtatttttactaggtaaatatgacacttcctactgggtaagtatgaagttacactgaaaaatgtatccttctgtgtaacttaatatatacctacttaaaattattattccaaaattggaaatgattggacaaaagatgggatttgttccttagttttgatgactacaggaagacaaagtctcctcagtgatcagacactgaatgaaacaggagatatgctgaagttcactgagtcagttccagcatctgatctgtcagtgccacttttgtgctgggagttcactgcattgtatttatttatggaggtcaatgagctgctcagagatgacactgtgctctgacagcctttatcaggggaattcaagtttctttggatagctatgggactatgagtttctgaaatttttacaaccacagaaaaaatgaaggatattttaacttaatattttaataggttaaaaggataaatttaagagtactttattaaaaataaacaataatcttctcttcctcacacacacacattatgcagagccattttcaagaatccaggaactaaaaagcttttaaataggaataatttctagggagcttattggaacatatcaagcagaccttacatttgaacatgtcctatgaatattaccattgaaagtatttcttaaaatgctattaacagaacagtttctaagatgacacagcacaattaagcaagtcttgtcttccattagtgcccattcatgatttcaaggatgattccacacacttgccacattgctactttgaaaagaaataacccattagattcactatgccaaaatttaagacaaattttcaacagcttatagttgaacagaagagatctctgcttaactcttaacaaaacagaaagttgggttagccaataagctacattttctctaacatgaacacatatgaaaaatgtaggaaaatttaaataaaagaaatacatctcataatctaaaatagaaacttttagtatagtttcacaaaaggcatagtgtttgtgttcatttccagaagaataaatagcttaagtgaaataataagagtcttaaattatactgcaatccaatcaagtaaaggacgatctcacccaagaatgaattaaatacccaaagtggcaacttcatttttacaatgaacttttaaaaaatctagttaattaaatgcatggtaaaattccagttgcactgactgtaactttctacttgaccggctcgtgtgctgcacactagggttcctgtgtggcttttggacaatgggaaaacgaccatcagggaaggggagaggaagtgaggcagagaatgctaaccaggtgtggagggtaccccatatccatctcccctcctgaccatagccctactttctccctaaggagattgtgtccccaagccgtcatataactgccacaggcatgcttgcagcatctgagtcagttgagtagtgccaggtaaaggaaaagtagggacagatacagggtggcgaggaagggtcatccagagctcatcttgttcttgatcatggagaggaaagggactctgcaggttgggcatgagcttagtttaagctgtgttagaagtttgaaatctgaagaaaactgcgtctttggagtctttatattggtttcgtactgccctgaacaaagcggtttctctggaactttagttgtgtaaaacaatcaggttttttgtcatttattaaatatttgttgtgcttctatgcactaggcactgttgtatgttgtaaagacatagcagtaaaaaccagaccaaaagaactcttccttaagtatactgtaatacattttagtgggagaaacaacaatacacatgtaaaatatacagaaagaggtgataatttcccatagaaattataatataaagttggaaaaggagcctgggttacagtttaaacaaggtaattaaggaaggctttgtgttagaatggaatatataagcaaaaatttgagagaggagagagcaaaccacatacatacctagtgaaagaatgttctaggtgaaggggatggggcacactaatcctgaggcaagaacacaccaggtgtctttaaagtccaccaagaaggttagttggttgattggaatgcagtgacaagggcagaaaatagtagataggagaggggataactaacaactgagggaatggagttaacatttcctgagatgggaagacatcggagcatcaggcttgggacttgttaatttctacatgtctgttagatatccaagtggaagtgacatgtgggcagaagggaatatatggtccacatgtcaacttggctactggtatcaatgtgggtgttaccagcatatagacggtatttcaagtcatgagactatcaggcatccccaaggcagaaaaggagacaacccagactaatgcttcagcaacaccatcattagtaggccagagagaagagaaggaacatttattatttacagaaattcaaatagtagaggaagctccacaaggcagaagtaggaattgtgatggatgttgcaaggcacagatttctggctcaatatacaagacaacattctaacaactaaagctgtcggcaatagtaagggctatctccttggtttgggagtgttcacaaaagctgattgactcatcactcaggatccaaggctatcagcaaggaaagagaaggaagactcctgttaagttttatatcacccattaggtacatagtgtgtggtaataaataatatcaccaaaaactgcctatatactctatacatgtaaactaagttgaggattttggcaaccacttacttaaatcaaagttaaccaaatatattttggattgagatggttgataaaatcgaatctcaagagattgtccccagtgtcctctcctgacttctcatgttctctttgagtttagagacagtcttttttttttttttttttttttttttgagacggagcctcgctgtgtcacccaggctggagtgcagtggcttgatctccgctcactgcatcactgcaagctccgcctctcgggttcacgccattctcctgcctcagcctcccaagtagctgggactacaggtgcccgagacagtcttttaatgtaatggtaatccttaacttctgggtctccagaccataaatcatttttgatgcccacttcagaagacactacttcgagaacagaaccaactgtgccagagaattcacagttctgtgaggattcaactctattattatatatgtgggggtgggatgatgggaggaaaagaggtcaaaaggaagaggtgattgatagcaagtgggtagaagatttgcttaaaatgtcttattttggaccagaacacccacaaaatgttccactttaaaatgttattacagaaaggatatgcataaaataaaaataaaaagttttgcaagaattattattgattatcatcagtgagaaggtttatatctccgttagagaaaaacataatgtttttcttttcttttcttttctttttcttttttttttttttgaggcagagtctcactcattcccccatgctggagtgcagtggtgcaatcgatcttggctcactgcaacctccacctcccaggttcaagcaattctcctgcctcagcctcctgagtagctgggaccacaagcgcacactgccacaccgggctaattttttgtattttagtagagacggggtttcaccgtgttgcccaggctggtcttgaactcctgagctcagacaatccacccaccttgtaatatttttcacacttaacacgagacactttaaattctaagtccattactttatctttgcacctccatctactgaagatatttttatgtaattttaatattaggatgagataggtttatttattttatcctacttcatcccacgaaaattgaaaggtagcttttcaacagttaataccactttgctggcatccatcacaactctgaagtgacctggagactcagtctgattcagagttggagaaaatggcaatgacttcaagataggaaggctcaatggaatttcacagaaaagcaaatttcacagggcaataaaaataagttgtatttttttttccttttttgaaagcactaggtattctcaaatatttgattttctcttcaggatattatttaaaaataaaaaataagatgagggaaataaacagactattttcactcatttattagatttatacaaagagaaaatcatataattcttgcggtaaggaagacttttttaacagcttaaatgaaaaacatgaagtgggagttggattgactgataattgcagtgcaaaaaatcaagagccctggaggaaggaaagagtgagttagaacataaagtatatcacttgtgtttcaaaacacctaactttttcttttctcactccactcaagtcacagaaaactaaaatgacaaaagccccaaatacgttctcagtccttctcaacctttcagagcatggcacgcatagaattgagaatattctgagattcactgtagtaagctgacaaggcagcttctagccagaggcaaccccctctggaagtctcaggtgtgattcagtctcatctgcacctttgtcactgcacttaatctcctgaactggggcattatctttttatcaaatcaaaaattgcaccaagttttaaacaggttgtgctcctttcttagcaaatgtagatgacagctaaacaaaggaccgcacaaagtacagatgctgagaaaatcacccagtgtggagtctgcccaactgtgggcactgctgccgcccataggcagctgcctcaagtgcattcttctcctctgggttcctaggccaagctaggaaaaggatagaggcagagaatttcctaacactgcttttcagcctccctagataaatcccctccacccttcactcttctccctcctccctcctccttcccagaggcacagtttagagagactctagatgctgggctcaagatacagtggatttttgtggctcgcagaaaacactgaattcaaaacaagcctctatagtaaaaaaaaaaaaaaaaaaaaaaatcccagcatttgcccctagctctaatagggacaataattctggaaagtcaggttcaggcttttagatgcaaatagatcttttcccatatgttttgaattgctaaaacagaaagagtggaaagaattttgaaacaaacaagacccctgacctactggatcttcagtctggcctctacctgcctcacaggcactgctcatcccacctaggcatggctggatacttgagccatgctccagccatgttggcttctttcagttcctccagtgccccttgcttcttcctgccacagggtctttgcataactttttccacttgcaagtctattctcttttccttcaacctcttccccatttgcctaattaacttctctagatcctctacatctcagttcaaactttctttgcaccagtcacattcgctgacctctgtgaccaggccaaccccgtactaaaaatattcttcctccaagcatttccagttatcactttgcatttcttcctttgatgtttttgatttatgtctacatcccccacccagctgtaagctcctagatgaaaaagacttgttctctttaacctgctcattattcccctagcacctccaagtatagttggcccatcacacagcaggtgcttaataaatatttgatgatttctttaatgagtgagtgaatgaacctgttgatttcattcaccttagtctccctcaaattttttccaaaagagttactaatagtgtgaaagctcttctgatgaagaatgccactctgtagttttaactcagtaagtaagaaagaatcataaaactcaactagggcattgacaaaatgaaagtacagtcaatgaccaaaatcgtcccttttaatttttcttctaggaatttaagaaaagaaggcaaatttagcaccagtggtccctgtaagtgagccctaggccatatctgatgctttttattttaggatcatttccaaaactagttacaatgattttatttgataaagtgaaattcatcccaatctctagagggatactcagtctctaaatgtttcaatggtgccatcatcttatttttaaaaagagtcacacttagacctagatggtatgttaatgaatatataatataaggtttgaatttttgtgtaatttttatatttagttaaactttctgttttaaaaaggaagtctggcatcttgagaattctaagaccgtttaccaaacttattctgcattgaagattggagtatgaggttttgtgggagcttggtatcatttagtgttttatgagcaataacatgaatggtaagataattttaggaagtggtagacagattggattcacttggaacacagccagaaaaatcaataaatgattatttactaattcagaaaagatgatgattctaagtcttttaaaatgcatttttaaaaactgttttacaaatcagcaagaaaaaaaagggcgcaaagggcatgaatagacaatgctcaaaagaagatatacaaatgggagagaatccacagaccctgtgtataggaagcagattgttcctgcaggccccaggagacaacctaaaaactctgaagacaaaggacataacctcttgggagctctaggctctacctaccacctgatcctccctgtactaccacagctgatgctctcttgaaagtgccacctcctggcaggaggccaaccaacacaaaacactgcaataaacaaatctacaactaaggaccctcacagagtccatttcactttcctgccacctccactggagcaggtgctgctatacatggctgagagacctgaagatggtttacaccacaagactctgtgtagacaccccccactaccagcccagaccccagcagctccactgggtggctagatccagaagattaataacaagcactgcagtttgcctttcgggaagccacatccctagaggaagggggagagcacagcatcaagggagtatagtgtgggacaaaagaatcagaatagcagccttttagccccacatcttccctctgacatagtccacccaaatgagaaggaaccagaaaaacaattctggtaatatgacaaaaaaaggttctttcacactctcaaaagatccccctagcttaccggcaatggatccaaaccaaaaagaaatccctgaattggcagaaaaaaaattcagcaggtcggtcattaagctaatcaaggagacaccagagaaaggtgaagtccaattaaatgaaataaaaaaaatgagatatgaagggaaaaatcttcagggaaatagcataaataaaaaaacaatcacaacttctggaaatgacggacacatttagagaaatgcaaaatgcactggaaagtctcagcgatagacctgaacaagcagaagaaagagcttcagagctcgaagacaaagtttttggattaacccaattcagtaaagacgaaaaaaagaatttaaaaaaatgaaaaaagcctccaagaggtttggggttatgttaaatgaacaaacctaaaaataatggatgtttctaaggaagaagaaaaatctaaaaatgtggaaaacatatttgtgggaatagttgaggaaaacttccctggccttgctagagatctagacatacaagtacaggaagctcaaagaatacctgggaaatttattgcataaagatcaacacccaggcacagagtcataaggttatctaaagtcaagacagaggaaataatcttaagagccatgtattctatggaagtgggcatcgaaaatgatttatagtctagggacccagaagttaaggattaccgttacattaaaagactgtatctaaactcaaagagaacacgagaagtcaagagaggacagtggggacaatctcttgagatttgattttatcagccatctcaagccaaaatatatttggttaactttgatttaagtaagtggttgccataatcctcaacttagtttacatgtatagaatacatagacagttttctggtgatattatttaataccacacactatgtatctaatgggtgatataaaaaacttaacaggagtcttccttctctttctttgctgatagccttggatcctgagtgatgagtcaatcggctttgtgaacactcccaaaccaaggagacagcccctactattgctgacagctttagttgttagaatattgtcccgtatattgagccagacatctgtgccttgcaacatccattcacaattcctaattctgccctgtggagtttcctctactgtttgaatttctgtaaataataaatcttccttttcttctctctggcctactaatgatggtgttgcctaaggatcactccgggttgcacttaaggcagtgctaggaggcaaattcatagccttaaatccctacatcaaaaagtctgaaagagcacaaatagacaatctaaggtcaaaccccaaggaactagagaaacaagaacaaacccaactcaacccaagcagaagaaaagaaataactaagataagagcagagctaaatgaaatggaaacaaaccaaaaaaattacaaaaaataaatgaaactaaaagctggttctttaaaataataattaaaaaagataaccattagcaagatagaccaagaaaagaagagagaagatccaaataagctcaattggaaacacaacaggagatactacaaccaataccacagaaatgcaaaagatcattcagggctactatgaacacctttatgtgcatgaactaggaaacctagaggagatgcataaattcctggaaatataccaccctcttagattaaaccaggaagaaatagaaactctgaacagaccaataagaagcagcaagattgaaatggtaattttagaaattgccaacaaaaaagtccaagaccagatggattcacagctgaattctatcaaacattcaaagaagaattgggaccaatcctattgacactattccaaaagataaagagggaatcctccctaaatcattctatgaagccagtatcaccctaatatcaaaaccaggaaaggacataaccaaaaagaaaactatagatcaatattcctgatgaatatagaagaaaacatccttaacaaaataccagctaacctaattcaacagcatatcaaaaagataatccaccatgatcaagtgggtttcataccagggatgcagggatggtttaacatatgcaagtcaataaatgtgatacaccacataaacagaattaaaaacaaaaatcacatgatcatctcaatagactcaggaaaagcatctgacaaaatccagcaatgctttatgattaaaaccatcagcaaaatcagcatagaagggtcgtacctttacataataagactcatctatgacaaacccaaagctaacataataccgaatggggaaaagttgaaagcattccccctgagaactggagcaggacaaagatgcccactgtcacaacttctattcatcatagtactggaagtcctagccagagcaatcagacaagagaaagaaataaaaggtatccaaatcggtaatgaggaagtcaaactgtcagtttgctggtgatatcattgcatacctacaaaaccctaaagactcctgcaaaaagctcctagatctgataaatgaattcagcaaaatttcaggatacaaaattaatgtacacaaatcagtagctctgcgatacaccaacagcaaacaagatgagaatcaaataaagaacccaaccccttttacaatagcagcaaaaaattaaaatacttaggaacaaacctagccaaggacatgaaagacctctctacaaggaattctataaaacactgctgaaggaaattatagatgacacaaatgggacatgtcccatgctcatggatgagtagaatcaatattgtgaaaatgaccacattgtcaaagcaatctacaaattcaatacaattcccatcaaaataccaccatcatttatcacagagttagaaaaaaactattctaaaattcatatggaaccacaaaagagcctgcatagccaaagcaagactaagcaaaaagaacaaatctggaggcatcacattatctgactttatactgtaaggccttagtcaccaaaacaacatggtactggtataaaaataggcacatagctcgatggaacagaatagagaacccagaaataaattgaaatacttgcagtcactgatctttgacaaagcaaacaaaaacaaagcggggaaaggataccctattcgacaaatggtgatgggataattggcaagccacatgtatatgaatgaaactggatcctcatccctcaccttatacaaaaatcaactcaagatggaagaaggacttaaatctaagacctaacaccataaaaattatagaagataaatcagaaaaaccatcctgtaaattagcttaggcaaagacttcatgaccaagaacccaaaagcaaatgcaactttgtttttacaaagataaatagatggacttaattaaactaaaaagcttctgcatagcaaaaaaaaaaaaaaaaaaaaaaaagcagagtaaacagacaacccacagagtgggagaaaatcttcacaatctatacatctgacaaaagactaatatccagaatctacaaggaactcatacagatcagcaagaggaaaacaaacaatcccatcaaaaagtggactaaggacatgaatggacaattctcaaaagaagatatacaaatggctaacaaacatatgaaaaaaatgcctaacatcactaatgatcagggaattgcaaatcaacaccgcaatgcaatgccaccttactcctgcaagaatggctataatcaaaaaatcaaaaaataatacatgttggtgtggatgtggtgaaaggggaacacttttacactgttgatgggaatgtaaactagtacaaccactatggaaaacagtgtggagattccttaaataactaaaagtagaactaccgtttgatccagcaatcccactactggatatctactcagaggaaaagaagtcatgtgaaaaagaaacttgcccaaatggctatcaatcagtgagttcgtaaagaaattgtcacacacacacacacacacacacacacacacacacaccatggaatactactcagccataaaaaggagtgaaataatgacatttgcagcaacctggatggagttagagaccattattgtaagtgaagtaactcaggaatggaaaaccaaacatcatatgttctccctcataagtgggagataagcatttgaatgcaaaggcatacaaatgatacaaatggactttggagactcaggggaaagggtgggagtggggtgagggataaaaaactacacattgggtacagtgtacaatgctcaggtgatgggtacaccaaaatctcagaaatccccactaaagaaattttcaatgtgaccaaacacctcctattttcccaaaactactggaataaaaataaaaatatcaagaaaactgttttataccttaaagtgattttcttctattttgtttgttttgataatgaggtgagaaaagatatgaaggacagccagagtgcttataccattaaaagatacattaattgatgttttttcttgaactaaattgaaagtagccaactttcttgccctaagaagatcacaaattattagaattacctgcaaggacatttgatacttaggagacttgaagctggggtgctagagcctgaactttattgtaaaaattcttctggctcttggaaaaggcctgtctagattgctagagtgtgttctactggttctgaacaaagtcaatgccatattaactagtaatttaaaatattaagctgggtactgtggctcatgcctgtaattccagcactttgggaggccgaggcgggtggatcacaacgtcaggagttcgagcccagcctgaccaacatggtgaaaccccatctctattaaaaatacaaaaattagctgggtgtggtggcacctgcctgtaatcacagctactcaggaggcagaggcaagagaatcgcttgaacccaggaggcagaggttgcagtgagctgagatcgtgccgctgtactccagcctgggtgacagagcgagattctgtcccaacaacaacaacaaaaattagctgggcatggtggcaagcacctgtaatcccagctactcaggaggctgaggcacgagaagcgcttgaacccaggaggcggaggttgcagtgagcagagatcgtgccattgggctctagtctgggcaacaagagtgaaactccatctcaaaaaaaaaaaaaaaaaaaaaaaaaaaaatatatatatatatatatatatatatatatatatttgaaagttattgaaaataatatctaattgtgtctaggtgttttgactttgtttcaccccatttttttatgattttcaaaataagttattttaaaaacaattatttttaagatgaatttattatggatggcataaacattttttattccttttgtctgttaacttcactgtgggacatttaactttttacatggcaagtttactcacattgcagtacagtgcttcacaaagaaataaattgcctttggagagtaaggttacacccagtgctgcgacagatcagaacttgccatgtcaggtatgaaactcagactccctgtatagtggatccaaaaagcagtttgtgacacactattcattttccttagagttctttggctgggagctattagcagtgcctagagaaaacatctgacccttgccagtatgtgtctctggcctgcacggggtgggagggttgatttcactagagccaacaggatgagtccccatagggcagcatacacagtagctgttgtagcagaagaaatgagaaatgcaacaggtctgcaggttagaatgcttgttcttgtcctctcttcttgttgaatgatcagtaacacatcctttactaataatataatgggtagcaggttaaaactcaaagttaacttggaaatcagctatttggattcatttacagtttagaggtaaaaaaccaagatccagaaaatataaaagactctctcaacatatttctatatttatgtttaaatgtcagtatggggcttgatagcatttcagactgaataagattcactgatgtgaagacctgcatggagaaggactaatgcaagtggaatatgcatgctcaatatgtgtgcattcggctccttgactggaacatctcctagagacaaaaataggcaatagcagccttcctgcaatggcagcataatctgagttcccctttacaagggaaagttcactgtcagggctgttgtgctcaaagacactttctgtggggtacagattgccccagagaatgaaagctaacctgacagagtgaatgatggtagttcgtatcagccatgcatgtttcttaattttgttaattaaaccttaaaagaaaagttttctaggaataattcatctgtagattaaaaaaagctttttggctacagatacagttccttaaagggtgcatcttgctgaattgctgtgtagagtgctagaatgcacaccttcctttcaccatacaggttctttatctcatatagggagcacttcaaaaagtttgtcaaaaaatggtgaaaatgatgaaaaatataaactttatatctcaacataaactgcatcaaggtcaagagacttttgtaagtgataacagcagccatttagtctatccctagagaactgagggataaccatgtcaatgcagtcttttttacattattaactgaaaaaacaataagtgttccttatagaaattttaagataaagaaacaaaaagaagtcagaaggaaccaagttactactgtaaggtagatgcctaatgatttcctattgaaagtctcatcaaattgtccttgtttgataagaggaatgagcatgagcatttttgtggtggagaaggattctctggtgaaggtttcctgggaatttttctgctacagctttggctaactctctcaaaacagtctcatatgaaacacgttatttttctttggccctccagaaagtcaacaggcaaaatgccttgagcatccaaaaaaaccattgccatgacacttgctctttaccaatctgcttttgcttagcctggaccacttccacctcttggtagccattgctttgattgtgccttgtcttcagaattatactgttgaagccatgttttatctcctgtaacaattgtttgaagaatcaggctcaggatttcaatcccacttgtttaaaatttccattgaaagctctatttttgtctgcatcgatctggatgcaacagtgttgtcacccatcgagtgaaaactttgctcaacttttaatttttcagtcagaattgtgtcagcagaactcacagatgtctgtgatgttgactattgtttctgctcttgccagtcctcttcaattaggccatgagcaagatttatttttttctcaaaaattgatgtggatgatctgccactgtgggctttgtcttcaacattgtcttatcccttcttaaaatgagttatccacttgtatactgttaatttctttagaacattgtccccacaaactttttataaagcctcagtgatttcgccattcttccacccaagctttaccataaatttgatgtttgttcttgcttcaattttagcagaattcatgtttctcagatagaggctcttttcaaactgaagtcttagcctttttagtgtctcagactagatcctgtttggacatgttatgacaagttagtacaagtttattttggtacaaaaaattgtgaaattcatgcataattttttataatatgcatttaccatgaccttttgaagactcctcatattttatgtaacccagcttctacagggaaattggaacatgatgagagttaagggatagttagggaagaggtcagtggaatgcccacagtattccttcctgtatggtaaatccacagtcccatgaggatagcctccctccagagctcacttatttatttatttatttatttattttttgagacagagtcttgttctgttgcccaggttggagtgcagcggcgccatctctgcaacctccacctcctgggttcaagctattctcctgcctcagcctcccgagtagctgggattacaggcacctaccaccatgcctggctaatttttttgtatttttagtagagacagggtttcaccatgttggccaggctggactcaaactcctgacctcaggtgatccacctgcctcgatctcccaaagtgctaggattacaggtgtgagccactgtgcccagccccagagctcatcttgataggcaacactgaatgtgacatttccagccagcatggacagagaatcctgtttacttgcattccaacccctatcccagagaatggtatggtgtcctcatccccaaggccttcctcaagcagccatcagcattaatcaagaagctccttcttcaagtacgctgctggcacctgccgcacttgtgttcaaaatcaagaaaggccactctggacaataggcctgagctctatttctccatagatggtggggctcttactttcccttttcttctgttgttaattaggcaaacaaataacacccttagtactcagggaaagtgcctggatccagttaattacccattttcacaaatctaaggtaataaaaatataaaagatactgctattctccacaccagggctattttatggctgagaaagccttcctttttcacaacagcgggcagaactaatacaagctgcttcactgtgcacagataagttcccctttctcagttcatgacctcaagctgattgggatcagctgctctctggagacctacatgcatctctcaatgccaggacatgtgccaggacacctcctagctcctgctgcaaccgtctagactagatacttgtcaaccctcctcaccacctacactggttcccaccctgcacactgtcagacccacacactcgctgacacaccctgctcccagcaggtctagatctcaaggcagcatgcttgtgacttttttctcccttgttatgcttaactttcatttctttgttttctatgtacaaaactccctttgaagtattgcgtcttttgtagcatacatacagctctatctacttgatttgagcagtatcatgatattctgacatagaatattaaagttaatagtgttattttatgcatcccaaaacagatagactataatctctcctactaaaatagacataagtatttatagcttcatactgtggtttggggagagaagattggttataaaactgttcagaaattgttttgatgaatttatttctttcccattgcttgatattaaaatataaatattgactaagctctaatttaacacaattttcactttttctgcagcacctgaaattcttagaggttgtgcctatggacctgaggtggacatgtggtctgtaggaataatcacctacatcttgtaagtgaagaaaagcaatatttatgtaaactatttaccttgctgtgacattttctagatacctctaatgctcataaaaaccataaagattactttttgcctttttgtgattttctgttacatactaaatgcagttagtgatagaatttcctgaaaatgaacattgctttttattttggaattttcttgagaccggaattcttgtccagggctttcctatgtctatatccactatgtaatatacagcagatttagggaacagtttattacttgacactagtaaagaatatgagcccaagaccagctgtgtaaacttgctcttgttttacttatttgcatcttatatgaaattattagatttagtccttttaaatgggcaaatgactatttaatttcttaagcaattccaaactggtatatttcttatcaggaatattttaaatgcatttttagctatcaattttgtttcttatttctgttaggttttcaagggtcttaaatttaacaccctacacaaatttcttgggaaaaaaaatgagtgaaatattttaatccctggtatccccacatccattcctgagctcctgtctaataagaaataaggagtttcatgaaatttgccaaagacatggtggaactgcaggtggtgatgaaaaaaatcaaccaaatagaagagcgtctgagatggaagaatactgtagaacaactagaaaataagatatcgatgctttcaagagtttagttcaaaacaaggagacttagttgccatttagagagtactacaaagttagttgttggaatgcataatattccaatttagagaaattttgaagggtttgaaagtaggtatactagtctacctgggcttacataacaaaatatatagactgggtggcttaaataacagaaagttattttctcacagttttcgggggctggaagtccaagaccagagtgtcagcacagtcagcttctgctgagggccctctcttggcttgcagatggccgccctctcacggtgtcctcacatgatggggagaaggagaaagcaagctctgtgtactcttttcttatgaggggactaatcccatgaggaagaccccactctcatgacctcatctaaacctgattgcctcccaagggctccatctccaaatactatctcattgggagctggggcatcaacatatggattttggggttggaggggggaatacaattcagtccgtagcagaatgcttttaattaaagttgtttttaacttaatagtgatcttaaaaaattcaatatccaggtgatatggactaggaatgggctaactgtggtagggcccacaagcacgttagcaaactctaatttacctgatatacaatggttgatcgccaagacagaaaggtttaacaagcaactgataaaatagccatccactaatatgtaatacaaaaagatattttgtgtgctcaattccttgtgtctttagaaaagcttgagaggggccgggcacagtggctcacacctgtaatcccagcacttcgggaggccgagacgggtggatccatgaggtcaggagatcgagaccatcctggctaacgtggtgaaaccccgtctctactaaaaatataaaaaattagcagggtgtggtagtgggcgcctgtagtcccagctactcgggaagctgaggcaggagaatggcgtgaacccaggaggcggagattgcagtgagctgagatcttgccactgcactccagcctgggtgatagaactccgactcaaaaacaaaaacaaaacaaaacaaaacaaaagaaaaagaaaagcttgagaggaatttggagagataaagatcctgtttttgtccccaaaatgtaggtttgcccctaaagtataaatatacccaatttaggtaccagtgtaccaacaattggtaggtacattgttgaaatgtactgggaggcattaagtattaatgatatgaaagaacttggagagatggaagtaggaaattaagttacatttacccagaaaaattggaatgtggaatgcataaaacttaatgatatcactgacatgggaaaatgaagggaaaaatataattacttgagaaatattttattgtaaccctgaagatagttctaaaaatctgtcctatcccctagtccattaccaaattatgcaaactattttatatatttcttttatctttatacactttaggtaattaattaataggtttagttgaaagtaagagtggtagcctccaaaatgaaaataacagtgctgcttacaactaatattctttagtttttggctaacttctgtcaggccctaagcctgaggacgttttatttactctgtagttctttaataattggtgaagtccactggcacggtcgactggcacattttctctggtgggttgtgctacttgatctctgtatcttctttattagattggtttaatgtacatttagtggcctgctgggcacctgagactatgacctctaacatctcactcatttcaccagagtggcttggagacagacacagtagagtagagaagtaaccaaatgaagaattagaactaaagatccattttgttaatgcttcctgggaaagtaaatcttacaatgaagctacgttataagcttcagtcagattctttcttctgtcttccaaatgttgaggcatttgctttactgatacttgtctgtatgtacataaactctggggctgtttttttttaataaagccatgaatagacattggattcttcctatcagtgtaaagaattctgttacctcttttgtccctcttcttgtggctactgctgcattttaacttcactctttgcttctttgtgtgtgtgtgtgtgtgtgtgtgtgtgtgtttgtgtgtgtgtgtgtgtgtgtgttttgagatgaagtcttgctctgtctcccaggctagagtgcagtggcgtgatctcggctcactgcaacctccgccttgggttcaagcaattcttctgctccagccccccgagtacctgggattacaagcacgtgccaccatgcccagctaattttttgtatttttagtagagatggggtttcaccatgctggccagcctggtctcaaactcctgacctcctgttccacctgcctcagcctcccaaagtgctgggattacaggtgtgacccaccgcgcatggcccactctttccttcttaagagttctagcttgtcaccaccaggctattgatggggccttgctatttctaagaatgccattaggctgaaaatgaaggccattctatttttcctcccaggaattctcatatctttaccttttatacctaaaccctcttcccctacagacaaaagctgcaggactgggccttatgatctgatcagaaatcagataacatcagagattcaaactctctccttcagctttcaacactacagttctgccctaaggcttgaagttgtcaccttttacctctgtcaccaaagcaaaaagtcactgataggaatgaaatgagagaaaaggcatttgagcactataactcttcagtggtcatttttgtctctagattttcagaaggggaaatataaggaaactcctaaactaagtctaggaagctggctcatttctccatgactaactgcaacaggccataggtttctagtgttgtggagagcagggcagggcaggcaaggtcagactctctcgttgtcagggtgaggacatgtgccctgtctcaccttaggctgctcttccacaggtgggtcaggagcgggattctctgtgcagactgctcagtagggaaagggagaacacattggcccaggggtctgcactgtcaggccttgcatttttctcactggctccagaatatctggaagagacaaacattctcccagtgggacattctgtgagtaaaaggacatacgaaactgcttctttctaaaaactcactgtattaggatgcactttaatttttcatgctatgtaccaacctggccagcttgagtgaagcctttgggaaaatgtcttttattcatcctccctcccaccctcattttttttcaaatggaacacatgcaacacatgccctgccatgggcttttttaagcagttccctcttggtccctactgattttagaacttccacccgtctgtaaacagtggatgcttggtggtcacaaacaactcgcttttcctttctctcttgttaagatgcccaagatagttctccgtcccttttatcccacttttcccattcatttttaagttgactccatagtagaaaatgatacaaagaatgaggtaaattgagggtgctcatctctttggctgcatctggtgactatattaatcttatacattttttaaggtcattgcctgacaatagtttcagcttctgtctttgttcactctgaaatccaaactggaatggaatggaaatgtcataaagctttactcatttctatggaggatttcatagaatagggcagaataaaaataagtgaaaatttctaatttccactttttaatttctttactctcaaaatcccagctcttccctttcacactaaattggaagtctattcaatctctgtctgcctgtctgtctgtcttctcaatacctgtcaaaaaatccatggaaaggctttagcataatgtctataatgttagctattattattattgttcttctgtgtaataagaattataataataattattattacacaataattataattattattatagctttttgtagaaatcctaagttggttttatattaattcctacttcctgaggacttgattgtgtgtttacactataaatagtgaattgtaataaggcagttgcatacttaagctgagtagacttgcttccatggcaggaagcagtgaaaaagaacagtcctgaattcctacagaaattggatgaaatatacttgagcttttaaagacattttattctctatattttattcctctagactttgtggatttgaaccattctatgatgaaagaggcgatcagttcatgttcaggagaattctgaattgtgaatattactttatctccccctggtgggatgaagtatctctaaatgccaaggacttggtaagtgtaaccaaaacaaaatgaaacaaaatgaaataaatttatttttaactaattaatgggaagtacaattttttaaaattttacccatattaatgccatattttctttcaattttaaagtattttaataaaattagttcattaatacattttccttagagaataaaaactagatatgtttttgactcatcactagttgaattatcataaactacaattactacagtattaatgagcttttactaccttataagtataaaaaccttgcttatgaagaaagctgtgctgggtgaattcaaacacaatttacacagaattctgttttaacatggcttgcaattgcctagaatttagatgtacttcatttcttttttgtttctttgtttttgagacaaggtctcactgtcacccaggctggagtgtaatggcatgatcatggctcattgtagcctccaactcctgggcttaagcaatcctcccacctccatctcctgagtagctgggacacaggtgcatgccaccacacccagctaatttttaaaagttttttggaaatatggggtcttgctatgttgcccaggctggtctcaaactcctgccctcaggcgatcctcccactgtggcctcccaaagtgctgggattacagatgtgagccactgcacccagcctagatatacttcaagtaaaacaatactgcttcctgaaatttcatcaaatttattaaaatatcctaatagtaacgtaagtcccattatgcatcattggcattataaaaatgttccactgtgttaatagttcattttgtttgtttgtttttacattgcttctcacttaagttaatattgacatttgtttgcattcaggaaatccataccttctggggaggtcactcacctcttataaaataaagaggatgctaacatgagattgaaacatttctcatcaatccactagagaacaaccacacagacataatcaaaagctgacttttgaatcatagaaggttagatatagaagaggtcttaggaggcatctagtcctcctctcattttaaagatgagaatgctaaagaccagagaggtgaaatgactgctaaggtcacacagcttcccagcagaaagacattattagggctgatccagtcgtccagactccctttcctgtgctcttttttcttcaagcatttcttccttaccctctgtgttccttcatggaacagattccctaaggctcatggcttttccagcatgagtgggaagagaaagtcagtgtgtgtgatgtgtgatgtataaatatgtcattgcaactccttcctcaagtcataccccatgctcctaaacacctcttgaatccatccagttctctcccccggaccactgccccaacctcctatctgacctccctgcctcttctcatgcctttctcaaatacagtctgtacaggatccagagggatggtcttataaataaatcgcatcatgtccttgtcctgctttaagaatcttaggataaaatccaaaacccataacaagatctacatgacgctgcctggtctggggcctgccactctctcctgtgccatcactcacttcacatctctcccctttgatcacttttcactctagtgcaccacacttctagtttctcatcagcatagctcaggatattgccatggctcttctgctctgtaatgttctttcttcctccccaccttcttctccattacacataggcatgtaaacacacacacacacacacacacacacacacacacacacacccctgggtaactcttattctcaagccccagctgccactagatatcccttgggaggcatggtcggccttccccttcagtccctcccacctatagttggttccttctgccaaaatcttcctttaccccctgcactccccagttcataacagtcatcacttatatatttaatggtcctccttaattagattttaagctctggggcaggacaaagcgtgtgtacccagaccttagaaccacataggcatataggactgactcagtaaatgtttattggatgaaacaatggatctggaagtacaccgtgaagtttcagagtctgacacacctggatttaagtgccccctttgtcatgtcctggaagtgtaacctcaggctcatgatctaaccttgctatgctttagttttctcatctaggatgataattgtacctatctctaggtcgttgtgagaattaaggaacataatatatgttaagtaactaatatcaactaacttaataatagtaatcttatttagccctccttccatttcttttcacccttaataaatattaagtgaataagagggttagctttgatgttccttcattcagctagatcccttgttagtttatcactgcttaaaacttcagaactggaagaatccttgagctccataaatgtatacttactagcaaaacccacatctgttgtgtcatcggcagagactaagtgctaaggagttggggaattggatgtaaggggtactgcagggtaatggcaaggctttgagtgtgattataaccttcagaaagtttcctaataattcagttaggattgttatcaatatcttcaaatgtaaagattaacaatggtgtatataaatttttggtgcacattgactttcaataaattctttgtatttttgtgaggaagatagtaatgaggagggagaggagaaaaatgattggaaaagaaaaagaaaatacctaattgtcaaaaatgttgtaaggattagggctcatttacataaaattattagtagtcctgttcaacggataatagccatgactactatcagatttttatttactaccatgccttctttctcttaaccatcctaccttcctccatgtcctctcagattttaagcctaaagagcctcatgtctctgcccactacaaatctagcccaaacacacattcttttgcagaaaggaagtgaagagagaaccagatagtatttattcctcatttgacttgccgcctgatttccttagcctatgttcacgtctccttaggtaattagagttagaaaagacctgagacctacaatcattcaaagctccttattttgcacatgagcaggccaaggtacagggagattgaccaccttggagacatcatgctgtagtggccacaagatgcgctctgacatacacagacctgagtctaaatacaggctccatcaattccaaattgtctgacctgaggcaagtcactaaatctttctgagctaccctgcttccctcatttatgaattggcactagtagttccaaatgataaggctgctaaaagattacatgagtttttaaaaagttatatatgcatctaagaagcaattacaaaggaattaaagtggaaataagattctgtaaggaaagagcctgagggggtgtccacaggcaatttatatatttgtctatatctagggtcacaaaagtggcgagtggcataaccagggcttgaacacacttcctgactcccaatagtctctgcctcatatcaggtcacccctactaagcccaggactgtggattattttatttgctgaccttcctgggaatttattgactgcccatcctcacaagcaggggtaaacctccaagaatgggctgccattgattggattccattctttaggcaaatcatgccctcaagccactgacttcttggattataaaatgatttttaaactctgggcttagtccttcaagtaccctcaaggggttagaaagaactataaaccccaagatagaaacataaggtagtattccataagttctgggatactctcccttttgtttgccatttaatccccacagaaagaatgatgatgcatgaatgattccattctgttaccatagagatgtactttaagttctgaattctaggtgattgtgaagcgcagcccagaattattttgctggttctgccttcaaagaacttccagtccacaggcaagtgaggagctgtttcttgacttctgttggaaagccgtctgccactttgggggtctcaggtggtacatggccctgtcttctcatactccctcagctactgctacctgaagctgtgcctacctacagtggcccctgaggacttaaacaatttttttctcacatatatttagtggtactgctgggaaatggaataagatctggaagtttgtaagctgagggcaagcccaggtcatcctaaaaacctcgctaagtttatggttctttattatttcaggtcagaaaattaattgttttggatccaaagaaacggctgactacatttcaagctctccagcatccgtgggtcacaggtaaagcagccaattttgtacacatggataccgctcaaaagaagctccaagaattcaatgcccggcgtaagcttaaggtaagatagcatatattttgttttgttttgttttgttttcaaaaaatttatctcatcttgatctatcaataatagttctaccgttcttcatctaatactattatctatttcttaaggcaccagggaaaatcctgctttgaaactccaataaggctgacacaaagctacttaagttttcttatactctcataaggaatatatgattaataaagggaaatttgttatataagttgatatttacatatcaaatatattattgctgcttctcatctaattaaagtatactgcttaaacagcattgttcagggaaaactgatatttattcagaaagttgttttctttcagaatatgtaaaacttggtaaacaatttttgaaactatatttcctaatatagataaataattacttgacaaaaatttaaaaatttaagtgatataataaattacttaactaaatatatcattttatatagtacctatcgaatagagattaggagcttttctattacataactgtgtttaggactagctatgtaagtagaggatctcagagagcagctgggggtcagaattagggtcctatgcagccattgcttacggtctgatacagactaaataaatctgaaaggctccatggtcaaattaattataaataccccaaattaaatagtattgacttcacctaggatttctccagctagtttgatcacggaactcttatatccccatgatgacatccatgtggtaaaaactactaacgtccacagaactagtgttccgtaaaacaaatacaccgggaaacacagattaaaattttcaaaaattggttagccacaggtaaacacatgtattcaggctttcagttgtccagatgattaaatacactaatttgtatttaatttgagatgaaagaggttttactgttcattctccaaattttcttttggcaaacaatctaggaataaggtactttgaaaactttaacgctaacctataaaacggaatccctaaaagcaaagctggggttgagctctgatgtggggtgttaaagcagaggtaacacttgacactcttctgtttccaatcaggcagcggtgaaggctgtggtggcctcttcgcgcctgggaagtgccagcagcagccatggcagcatccaggagagccacaaggctagccgagacccttctccaatccaagatggcaacgaggacatgaaagctattccagaaggagagaaaattcaaggcgatggggcccaagccgcagttaagggggcacaggctgagctgatgaaggtgcaagccttagagaaagttaaaggtgcagatataaatgctgaagaggcccccaaaatggtgcccaaggcagtggaggatgggataaaggtggctgacctggaactagaggagggcctagcagaggagaagctgaagactgtggaggaggcagcagctcccagagaagggcaaggaagctctgctgtgggttttgaagttccacagcaagatgtgatcctgccagagtactaaacagcttccttcagatctggaagccaaacaccggcattttatgtactttgtccttcagcaagaaaggtgtggaagcatgatatgtactatagtgattctgtttttgaggtgcaaaaaacatacatatataccagttggtaattctaacttcaatgcatgtgactgctttatgaaaataatagtgtcttctatggcatgtaatggatacctaataccgatgagttaaatcttgcaagttaacacaacgtaacacttaaaagcatacattttcagcaaccagtggcacatatttgaagtgaatagtagcaaattgtttttgctttgaaaatctagccatcctacatcctttggatttcttcacaaggcagtaattcctttgaactactgcttagctaatactaggtagtgctaaaagacatgttcccataacttttacaacattttactttttatcattgatgtgttcaaactgtttacaaggagatgcttatagatgatagttgtacatatgtgcaaaaaaaaatccacttgcaatggtaagaaattgaagtatccttaaaggccatgaagccatatgtccctaaagcctgtgtggagaatgctttattttattcttatttatatacactatattaataataaccaaaatgttctaagattctgccattttacaaccctggaggaagtaatttacaaactcacgctgagttccattctttccttcacctgctctccaataagatgactttctgatagacaaagcttagggtgtaataaacagggaagaaaagaaggtaagactgtacttaaactgatgaagataagattgattccttttcattttccagataaaattgtatttactcatgaatttatacaactttacagataagaacattttaatggataaactctataattaccaagttgcaaatatttagaaaattctatttcacaggttagtgccaaaatgtcttcatagagtaggaataatattccattttaagattattcattattgactttaatagagtaagaaaacattattgtttatcaaagctctttttttatccaattgatggttatctacacatatcacttataaactaaagttatttatgaaaagctagtatgtctttttctcgtatttggaatgaaagtacccacattttacaatgtagtgttgagaatgtggctgccaataaatttagcacaatgcaatttatttaccttaaaaaacaaacaaaaacaaaaataaagaaaaatactgatttcaaatcagactcttaaaaagctggaacattagacctgatattttattatgatttttcccagaataagtttaatttctctttgactttcatagaaacactttccccttatagaaattgcactatctccaatttatttctagtttgagttgaaatgaatattttatcagattaattatgtgtcacatttttggtgggttttctcaattttaaaaaagaattcattttaaaaaataattattttcagagaccaaataaagacaataaaaatgactatcacataaaaatccttgttaaaaaagagatcttaaattatgttggctctccctcaaaactattaaattagaaaacgaaactaaagctccagtttgtagaggctgttggacctcagtagacattcttcttttcaatcacaaatctctctctactactgttctcatgggaagaaaacaaggtaggacttcttatctttcatagtttaagaatctgacaggtcactgatatggagcccctgaagaagcacatcatctgggctcagaagattattttttgttttgttttatttgtactatctagtagagagcacttttcttattccctctttccttccttcctcatttaattattccctctcagaattcccatgttgtccattataaggggctcgctatttttaacctttaagaatgtcttctttgttaagcattaagatttccatttaagaggatcaatttcctgttgtactttttaccatgagactgaaacacacacacacacacacacacacacacacacacacacacacgtgttgga

SEQ ID NO: 84 - DNA, 987382 bp, Homo sapiens
  source 1..987382: mol_type = genomic DNA
aaattttgcaatttttgaggctcataaaattaaagtttcttgaagaatgagtgtgtaacacaaaacattcttttgggacatctttatttctggaaaacctaagacattcttacttgtgaagaccagaaaaagaacacatgttgttaggattggcacagaattcagtgtgacagtcaatcttaatgccagaacacttgaacgaggatttttcacttattttgctagttgtcaccaacagtagcaaaaggaaaaataaaatgcggaagaatgaaatgttcttactgcaaaccgtacaagatcacattgaggggctggagctcttacattcaacttttctttcctttttcttctttttaaacaatttgcgattgcagcctctccttttgtttccggtattacctgcccaggagcagaattccttactttctccggagagaggccggtccctgggagcgctgcccagccacccgcacgcctagccgccccgagagccgcactcggcggacccggttcctaggctcgttcccggggcacctggcgggcgcccacctcccggggggcacgtgctcccgtacgcagcgcgagggcagcgggtgcctggctatttattaggaaaagccccgcgcggactctccggattgaggagggtgggaaactcggctgcccagcgctccacccgggcggccggggctggcgcttctctgctttcggccggcggcctcatcctgggacaggcaaccatgagtcatccgctccgcgggtcacatgggcaacgtgaccaaaataaagtttcggtattttaagccgccagaaaaggggacaacggagctcaccgggggcgggcacaggaggcgggcgcaggcgggcggcgccggggccgtggggacgcggcgccgagggggcggggcctggcgggaggctcgcccctcccccacggccggcagcgacgcccggactcctaggcagtcggactccagggcgcggcacccctgcggacctcagccccgaggccccccgcgtccggctccccaccggcagcggcggcgggctgcgggatcccggagatcccggcgcgtcccccacagccaccgggaccccacgcgccagcagcggcttccccgggaacgtccttcagccccgggagcacgcgggaaaagccccagcgtgccaatgagggagcgccttcctcatgacggtcacgctcgggggcggggcttcccttcgccgctcccgagttccgggaaccccctttgattggtctggacggcctgggaaacactgtagtgacgcccaatcaaaacgccacgtctcggcctcgaggaaatattccgtgtcgggcccgtcctgattggacagttctttcgggttctggccactaggaagctttgtttaggtccggaaggcgggctttcctgggagtgggtggggagggggcgttgattcttgaccaatcctttcagtccgttgggtggtgaccagccaatgggccggatggataggacgctcctcccggagagtagtgagacccctggtgcggggcgattggcggcgggagcgatgagtggcagccgcacggcccaacgggagctgtgcgtgggccgcggggcggggccagggcgggtgcgcggcggcggcggggtggctgggccggcggcggcggcggtacgaggcgcgcgctcggggtcccggtcgcgaggaggaggaggatgtggcgcgcggaggggaaatggctgccgaaaacaagccggaaggtaagagccggagcgcgaggggctggggggcggcgcggcgggcggcgggacccggccccgccggacatcccgggcatcggcggcgccgggcgggagcgcgggggcgcggcgggcgggcgggcgggcgacccggccggggagggggccggcggggtgggggggcggagcgcggccgagtcctgaggtgactcgcggggccggcggagcgcggcgccccacaccccacccccgggggcgggctggggccggagggggcggggggctcgcggggcggggaccgggcccagcgaggaggaggagccggcggagggccggcgcctcccccacccggaccgggcatccccgccgctcccgagcccgctgcgcggcccccgcacccccggcgctgggtccacggtgggggccgcggggcggaaagtttatccgcctcgggtcctcctggccccgcgccccactgctccgggccggtccccgtcgggcggcagcggccggcgctcagccctcgccggccccctgctctccggcgggcagggccagatgtactctctccggcaccctcttcagccccgtggacacctccctgagcgggcggggggtccccgagcttctccccgccagggggaccccgtcctgccgagcgtccctcggccgaagggcctcgtgtgacccctcccccttcgcttcccgggaagggaagggggcctgcgcagcatccccgcccctcgcagtcgttcacatcctactcttgcccttgcaccctcacagccaggagggtggggtctccgtttctatggcaagtgaggatctccacactcccttgccctttaccttccgtgaccccgatccttccttggcacaggggtccgtctgatctgctcatcttctttggattcttttggggcctctgcacactctccgttgaccctttttgccaggacaaggggactcaggctgcccatgttcttctttcctcacccagtggatagtgggggcttgtgcagctctgaagtcatttctaaataggaaagcagacacttcttccagatcatgcatactcttacactttgctgggttagggcgagctcatttcctaaataccctttgagttgccctccttttcttatggagacaactggacgttcaccgtgctcctttcgccatttgtgtgtctacactgacttgttctctcttctcggagttccttgtctgggtgagagtgggcgccccaataagatgtagggcagggcttccattgtgcctagtgcttgagtgaaaaggggccacactagttgctcctgtgtctgaggaagaccggggtatatttttgcctccacttgactcttgtgtctcaggagggggcaaccttcatcagttgacactacctcactgggaaaagggtcatgtggccttgttttttgatgttttgattactgtcttctgtgcagtgagaaccagactttgtccgtcccacactcaagagtccttgaacctttcctggatataaacttcccgattgttttttgagagaactcatatcctcctctgtggcttctgcttcgcagtcagccatatttagtgagcctgttactttgactttttctaattttctcaaattgtattcatgttggctgggtaaggagaagccatatgcctttccattcagaaaagggagtgtagacacccgtgtcgcccacatgccatcctggaagaggttgcttgtgtgctccttgttgtactagaaccttcctttggctctggtgttgtctcttgtgggatccagacatttctttagatcttgtagctttcagaagggggaatttgaatgctttctgttttttgctgttccggttctgctttggagaaccagatcatgatgctatattcatttgtttacatatacatacatgtaggtatacacagatgaaatcacattcattacatatacagtgcacaggaagttggaagggtcagatgactagctctacattttgggtgcatatggggacctttatgtgtaatgatacagatagatattaacgttgttggtaactcttcaggcttagaagcagcagcagaagaatcacggataaatggccaattctgactattctttggtttgtaatgtgtactgtactgaataagcagaacgacatcctgcgtgttcaccaagtccctgaatgtgcgaagcgtacagtgcctgcccatacgcatcgcaactttggcggtctgaatttaggggtggtattcgttgcttgattctgcatagagtgaaaagttcttgatttctttactgcagtgtaggggaaagagatttcgtgtgtttggacaaacgacaggagatgggtgagaagaatatgttttcctgtgacagaactaggaacgaatgaccgtaaatatgtcccttttgtattttggccatttaaataattgagagaggttgtgaaattagcaaaatgtacctgtggaaaggccctcgacgcttcatgagaggatggggaacgttattcttcaagttcttttctcttggacaggggaatgatttgagccctgtcggctctagtcaggtgctttgcctcctcaggtctccctccctccctccctccctccctttctccctctttcacgaaattcagaatggctgctagccgctgtcactcagcagggaagtcttactctttgacaggcttagtgtggagactcatcctccccaacaagttccgttgggctctggggctttggcctttaaaactgttctagctcagaggctcgctttgcctcagtttactgtgtaaggagaagtggctcatcggagattgggtcagcgctagttctgtgacttctggactttgcctttcagttagcattgagtcgtccagtgggcctgattcccaatgtcagaaagtagagcttttgagctcattttcttgtttttggttttaaatgtttttatgctgttcgtattctgtgtctgtagtcagcttgatgggattgtgtatttttagggggtgttattagggaacttcggaaaaacgaagagtcgaatacctgctgtagatggtgtagactcagcggagtcatcccgtttccagtggtggttcttcctaccgtttcctccatggccccatggagactttgggagttttccctggtaagcagggggctccgtgcaaggcgcagtggaaggaaaagtggtaaagattggttggaagaagacacttgaggttattgtctgaagctgggccctttttcttgagtttgatgtggttgtgtttctgtgtcactggtcgccacagatgattggaaattagctttttccttttaccttgtagtgcagaatgctctgttgcagttgggcagactagacgggttctctgaaccacatagtttaatctttctgttcgactttctgttaggacatgactctttcctctccttcaccccttacctccagtttttgggactaggttgggtgacctcttcctcctttgtcttcttggaaaccttacttatcctgcttctgcaaatgttgggtttctccatctcatcattgagtggattcaaagtgttgacatacacagagcaacctctactcaaggtcagattgggtcagcttttccttttcaaaagagtagtgttgctcttacttgctctttgagacatatttatgcatcctgctcagctgtgttttctgtttccttagtttttaggctctggcgattttaggctttcccccagaaatagcctattctttagagagtagtgtttagtttagtctcctgtttatgctggatgtccgcccatgtgtcctgctcggtttttaattctttgtgactgattttgaggtagcccatctcaaaatcttaacgtttttttccccactgtttcattactttgagccattcttcctttcctgtttgggggaaatacccctttgtgtgcagttgtacttctttctcctttccttatggaaaaagcagtagaaggtgattctcttattttcttctgttcccctcatagttgtgtcagttgactcttttgtggaacctttgaatttgcccttctggggagaagtcgtttttgtatttatactcccatgactggagtcattcattcaggagacctttaccgagcttctgttatgtacaaggagctgtagggggtgatgtgactttgcttgagaccatattggatcttgttagccttttatattaatgacattttagtgtatcttttttttttttttttttttttttgagacagagtctcactctattgcccaggctggagtgcagtggcacgatctcggttcgtgcaacctctgccttccaggttcaagcaattctcttgcctcagcctcccaagtagctgggattacaggcgtgcaccaccatgtccggctaatttttttttgcatttttaatagagacggggtttcaccatgttggtcaggttggtcttgaattcctggcctaaagtgatccgcctacctcagcctcccttgcctcagcctcccaaagtgctgggattacaggcgcaagctgccacgcctggccttcggtgtggtgcttgtcttaatgcttgtcttttatatagtcttgcaaggaattttttttttctgatttttaagtttttggattgttaacttacaaagatatagtgtaatagtgtgctatcttgttgaaccttttttcctcctcagcaggagtgggggtggtgaagagggtgggagggtggactgggagaggcatttagcagctttcccccagactgtgtgcagagtgtgagagagagagagagagagtgtgtgtgtgtgtgtgtgtgtgtgtgtgtgtgtagacaaaagtaaagtcagccttcttaatctgattgtgtaggcataacttttaggttgtttagatacatgattggttggaatgcttatttaatatttgaacggcagcatcgcactaggcattctatagaacatagagtcaaatgtattttttatataaggaagtggtagaaaaatatttttttcttcggattaactggtatggttcatagtagatagtgagaactgtatgagctgctgttacattttcactgccatgaagaattatatccaaatttaatacctaattgatgctcattcttaggctaggcatctgatataattatcacttttattatatgacttttaatttatgctttttaatggtattattatttttgtaaattgcctcaaattctttgtgggtacaggttaggtataaataatgataataataaaaattactaacaatttgaaataccccttttcttttttcctctattaaattagatttaccatctccacaacgtatatagaaaccaattctgctactatttcactcttgtgaaaactcctgtgtgaggtttgtaatatgtggtttggcagtatgagtatgtgactgagtgtattttgtgttgacaagtgatgtgtgtgtttcttttgcatttccattatacagatcttttcctaaggtggtgtgtatcttctagaatcatgtaccctgtcctttttttttttttttttttaaatgttctaggtgacttaaatccgacctccctttcttttcttcggcctttccttttattttttgtcctttcccacatagagaggtttcttcactgacctgtcattattataaaaaagtgtttgttagatgtactgtatttgtagccttttagtaagaaggggatgcccaccatccctttgtcctgtagcacaaggcattgcttcttgtttccctaagaataggtagatggaatgagatttaagccagaaggccgctggtaatagtatttgtaactagatagcatctctagataaaacactgggtcctttctgctctgggcctccccatgtaggattttggaaatttttttttgctgcatttagccagcttctttctgtctctttggcttgatacaataaatttctttaagcacagccaagtatattatttcatttggagccttcatttacaaggaagtatgggggcctctcctaatgttcctttgcctgttatatatagtactgcctttagtttttggtgtgtttgagagtgagagtgagaagcattcttgctctgctactttgtctgtgtaacttgaataagagtgtacggtcattcactctattttccagatagtgtataatctttctttttatttttcttgaatacctaatcaggttcgagctagaggttgatccgactatcatatccttttattttgtgccatccctggatatagtgtcccttagtcctgtgattaagccatgttcctattttgtcattagagagagggacttacaaacatatagatggtctcccatgataattgtcatgcatttataaggaaagtgtttcttttctttttttttttttgaggctgagtcttgctttgttgcccaggcacgatctccgctccctgcaacctccgccttccaggttcaagcgattgtcctgcttcagcctccaaagtagctgggattacaggcgtgcaccaccatgcccggctaattttttttcgtatttttagtagagacggggtttcaccatgttggccaggttggtcttgaattcctggcctcaagtgatccgcccacctaggcctcccaaagtgctgagattacaggcatgagccaatgtgcctggccggaagtgtttccttgtataaattgacaatggagagcagttcacgtgatgggacaaagtaaagggtgagtaaagggtggttttgggtttttttttttttttgccatcagtatgctagctgtatatttctaaggttgtattgcatccttctgctttgaacaccattgcttgtagaaggtcatgggcctcctgtgtaaagattggtactgtttcctgagcatttttttttttacctcattaccctggacttacagagaaatattatgtaccccattgcaaagagaggccaagggtcagccacattatttccccttttgctctttttctggaggattgttcatttacttcgaactgattgacatggcataagatggaatgactagagatttttttttttaaaggttcctccatattcaacctcagtgtttggctctatcctgacatggttgcttgttctcctgtacatgaatccttttgcagttactttcttgtttttgtttttcaaatttagccagggctttcaagtcacgtaacatatcctttcctgagactgtgagccgaaggtaacttcaaggaagatatgcttgtttggggctgtattcatcactctgctctctacggttttgtagttttcatgtgtacaaagtgacatttcttgaaagaaacgtttggggctgtgttcttaatagttttaaacatgttattatgtggagactaagtggcaaaggtctcaccccaacttcatttcttcataccactcatatatatcttatatatatataccccactcttatatatatatataccccactcttatatatatcttatatatatctcccctacctgcaaatcccaaaacaatagtcatagcaacagaaaagcaaaaccttgtgaagcccagctctgattggttctgctgtgcagttcagtcgctagttttggacaggtgcataagcagataatttttggatgtgtaatattctcagtggggctgatgtgtgacttttgggacatagagcattcattcgttcagcagaccatgcagtatctcttccatttttttccccttatcagttaccacaaggtaagattatgtattcagtcacttaaaaacacttgcaaagtggatttttccccatttattcctatctaaccattggaataaatgttgacagtagtaaattaccatgtccctatttttgtgttcaacatgtctaagagaatggggagctaacttccagtaagggcagtacagtcagtcatgactctttctccatgtagcctgtgcattgtgcagtgatgatttatactttcagctaaatttagtgtctatgataagggatacatcagatgtttaagttcacttaatctcttttacagtgtgcattcaacaaggtgtatttgtgtcttatattagaatgaaatgcagatacaaccagaggtattctttcaacgtagagagagagagaaagcctttctttttacaagttttgaaaaaaagttattgtctatttttccttcatggtgcttgatttagattgccaggagtcatttctgaaggtatattaatacaatcaagaattaatgttcttaaaacttaaatttgttttttaatccttttctgaaaagtcatttctgaggatatatgtgccctgttggttttctgggcacttggatatcaaatcatttgggagtgataataagaaattggtacaaagtgtgaaattatcagatagaaagaaaaaagatgttatagtggaaaaaattactcatttatgattaaaaataatctcaaagtgatgactggaagtataaattcagatatttgaagaagaaatggaatgttgatagggttattgtattgaatcaacacatgcacacgtataaagaatgctccccaaaatggggacgcttagaggacaaataagttgattggattggttttaagaaaaatattgtttgtctttttaaaaagtaattgaaataacccttcttagtgaagaaaatgaaaactttgatggaagttcagcagaatggaatatttaaaaagattcaagagaaggatttttttattgcgaatccacaagggggtagtgatgttctttcaaagatatttgtggtggcaacaatgtgagatgatctcttcacattttagatttacagataaaactggcatgtttgcattttaacttaataagatcttctttttaaaatgtttattggcaaaattgtttattgcttaaattaaaaaaaatccattttgggtgaatggctactttaagccatatgaatggtaaagaagagagaatgtccttacagttttgtgctttggagaggtcaccaaggatgtgagggtcactgttattttctaagaatgtaataatcttaaattccctgggaaacattagacatctaggaatcagttacttaagtgtcctgaataaaaggattttagtaaattgtgtctaaactttacagaagtttgtattactagttgtattttcagtgctgccgagagatgaaaaatatgaacaatccatgccactagccacttttaatagttctaagtaaatcaaatttttataatcttttttattagtttatattacatcattagataaaggctttttttttgttttttttgtttttttgtttttttgttttttcttccctcacataaaaattcaggagctttcttctggtcactgagttccaccccatattattcagaattacttaaaatcaggtgtggtaggcctgtgctgggtcattttcagtggaggactgcctagctgtattatgcactcatttttgaaagttatgccgtgtggtgggagaaagatttaaagttggggggcggctgtgtcctacttatttagagacacaactagtcatcacctgtaacaaatgtgacttcttttaaaacttattttatcttacttttttttagagacagggtctcgctctgttgcccagactagagtgcagtagtgcaatccatagctcactgaagccttggcctcctgtgctgaaatgatcctcctgcctcagccccctgagtgactgggactacaggtgtgtgtcaccatggctgcttaggttttttttttctctttttcgtagaggtggggtcttgctgtattgcccaggctggtcttgaactcctggtctcaagcagtccgtctgcctcagcctcccgaagtgctgggatttacaagtgtgagctaccatgccctgcctaaaaaatattatttctaacaataacacaaaataattatgtggtttagaagttatgatagtttgtgccatatacattgtatatttttcatttttggtttgtggaaaaggttgttaattgagcttttctctttttttctccattccctcattctgagcaaggaatgactttttcttttatttcctttacgaaatgactttggtgttttaacattccagaagatacactgttttttatatgctactctaaactctgctgggaactgaactatgacgtcagcattttcattcatgaatctgattcttctaaatttttttcctgttttgtattcctgagctgacttctggcacatgcacaaatcagtttaccattagtcagcccataaatcactgataaaaggtaaaacaaaagataagatactggagttattttgatagtgctatagttctcatgctgatttgcatcagtacagtttggataaggtttctggctaaacagattgaaacctaaaaagtcaatttaattatctcatgattttgtgacttgaactgtgttgtgaacatattgacacaatatttttgttcttacaggaagttgagagtgctatgctatggctcctttgttataaaatagcatttcttttttttttttttttttttttttttggagacggtctcactgtgtcactcagtctggagtgcagtggcatgatctctctcggcttactgcagcctcgacttcttgggctcaggtgatccctcagcctcacaagtagctgggactacaggcacgcgccaccatgcctggctaatttttgtattttttgcggagatggagtttcgccgtgttgcccaggctggtctccaacttgtgaatgcaagtgatccacccactttggcctcccagagtgctgggattacaggcgtgagccactgagctggcctaaagtagcatttcttgtataatttgactaagttggaagattatataatgctttatttcagagaggttaggcctagagattaaatgatgttttattcaaattacctttgtaatggatttagatttttttttggagcattttcttgcctttgacatattttaaataacttcattgtttgatacttttattttaagatattattattgtggtggaactagcctagtattccttgtattggacttagggtgcatctaccctggattgtgcactcgtgtagctgttgactccggtttctcctctagggaggtcactgcttgcagttcagtactacgttagaacagttcttgaagaaatcttatttggagttttcttctgcaggccaaatttcaggctaagcctccggcccatagtatctttcaagcctgctgtagctgatgaatggtgagccgtaaaaaagtttattttctctactttcgtgggggatttgctgactttctggatactcaattgccaagaaacatttagaaataaaacgtgttatatttaggaatcatcattttagctaaataataatgcatgattagaattgatgattcaagctgcaaccactttgattgatacccagtcttactcttgagatcacttttttttctgagacagtcttgctttgtcacccagactggagtgtagtggcgtgatcttgtgtcactgcagcctccacttctcgggcctaagcagtcctcctgcctcagtcccccaagtgactgaggctataggtgcgtgccaccatgccaggctaatttttgtagagacggggttttgccctgttgtccaggctggtctcatactacagggctcaagtgatcctcctgcatcggcctcccaaagtgctgggatgacaagcatgaaccaccacgttcggctgagatgactttttattttttatttactgggtttttttttttttgagatggaatctagctctgtcacccaggctggagtgcagtggcatgatcttggctcaccgcaacctctgcctcctgtgttcaagcaattctcccacctcagcctcctgagtagctgggattacatgcatgcaccaccacgcctagctaatttttgttttttttagcagagacggggttttaccatgttggccaggctggtctcaaactcccgacctcagctgatctgcctgcctctgcctcccaaagtgctgggattacagacgtgagccaccgcgcctgtcttgagatgactttttaaatgccataacaactcacagatcctgtgtcctcccattcttaaatgaaactagagctttgtgttcctttaggttaaactaaattatctaataggtaacagaagagtggtctgttagctggctttctcctttcagtagatttgctaagagaaaggaaataaaagcaagtagactgtgaataaacattgaagatgacttaaatgacattgttttccctaataatgaaataatttatatattatttaaatataatttctataaaagaatctatttgcaagtgataatgaagaaaggaatttttttttttttttttgagacaaagtcttgctcttgtcccccaggctgcagtgcgatggcgcgatcttggttcattgcaacctccgccgccttggttcaagcgattctcctgcctcgccccccaagtagctaggattacaggtgctgaacaccacgctgggctaatttttgtatttttagttgagacaccatgttggccaggctggtcttgaactcctgacctcaggtgattcacccacctcggcctcccaaagtgctgggattacaggtgtgagctaccgcacccagcctaaaaaaggaatatttaatggtagagggctctgtaaaaaccccctaattttcaaagccatgtgccactgtagaatttatgaaaagttatgggctattattattaggtttcaaaaagtctggaatactggcggtagcatcagaattatttatttatttatcttttgagacagagtctatctctgtcgcccaggctagagtgcagtgatgcaagctccacttctcgagttcacgccattctcctgcctcagcctcttgggtagctgggaccacaggcgcccaccaccacacctggctaatttttttttttttttttttttttgagacggagtctcgctctgtcgcccaggccggactgcggactgcagtggcgcaatctcggctcactgcaagctccgcttcccgggttcacgccattctcctgcctcagcctcccgagtagctgggactacaggcgcccgccaccgcgcccggctaattttttgtatttttagtagagacggggtttcaccttgttagccaggatggtctctatctcctgacctcatgatccgtccgcctctgcctcccaaagtgctcggattacagacgttagcctccacctccacgcctggctaaagcgttatcatttttatctaaccctgaaccaatcagtgattggttagttctctagctgtgaaggctttgcacttcctagacagcttgtagaacaagcccacttggattcccagctcaaactctttcctttttactatttatttattatttatttattcgttacttattattaattaaaaaaattttttagagacaagagtcttgatctgtcacccaggctagagtgccatcacagctcactgcaaccttgaactcttgggttcaagtgatcctcctgcctcagcctcctgagtagtgaggactacgggcgtgtgccaccacacccggctaattcttttttaattttatggagaaagggtcttgctatgttgcgcaggcttgtcttgtactcctggcctcaagcagtcatcctgtctcagcctcccaaagtgccaggcttacaggcatgagccgctgtgcctggcttgtactctttcactagctgggaatgctggtgagcaggactcaaggatcccagcagagctgcatcctgtgctgtctttgctgccacttaggtggaccaggagctagaagcctttctctccatggcctccataccttcttttaccagatggtatttctgcatttatcactcttgattccagcacagcttttcctcatcttgcttttctcagacctcagctcttatgtaatgagatagttggtagtcattttgaggggattcatgtgttgggtaaagggttttcctagcgatgacctcgaaagttccttcccattaataataattactattaataattaatagcaataactaatgataaaacagaacagttgcagcaatatactgtaataaaagttgtgtgaatgtggtctctctctctctctgattatcttattgtaccatactcacctatttttggaccttagttgaccgcttgtaactgaaaccatggataagagggggactattgtgtaaggaaatgaagtcggagatatggaatttcatttcagggcttgctttcctgatattcagctattctgtataactgtatcttttccttttgaggtccttgctccaggacaagaataatatgttgactcaagctgtatggggggatttgaactacagacactcagatatctcctttctgaggtacatagagggcttaattttttaggtctgtctgtttaatatactatatttactttaaaaaacgtaggccgggtgctgtggctcggtgcctataatctaagcactttgggaggccgagacgggaggattgctttagccctggagttcgagaccagcctgggcaacatagtgagaccttgtctctactaaaaatagaaaaaattagccagatgtgttggtgtgcgcctgtgatcccaggtacctgggaggctgaggttggaggattacttgagcccttgaggtcaaggctgcagtgagctacgatcacgccactgcactccagtctggatgacagagtgagatcctgtctcaaaacaaacaaaatgtaaaaaaatttaaatttattaaaaaagatgtacaacaccaaaatgttcatagttattctgtatgacagatctgaggtctttgttcagacatagatgagggttcatagttttggaaaatagacttaaataatatatgattacagatgaaaaatatttgctaacctcagactttttatgtttaaggtagtatttatattcatttagttgtactttctggagttgattaatataactgttattaaaatctatcgattcccagtaattcagtaaatgaagactcttcctatttagaaactcgtgtggattggggagttgctgtgggcccactgtcattgatcatatcacatcttcacttgaacctgctccctgggcctcctataggcctcgcgtttggagaggccgtgaacataatttatttttggaagtttctttcatttttaaagatactgagaggcaagttgaagttcctggtgttcgtgtaaacattccctgccttatcctttccatctcagccattatgaaatgttctggctgaatcatttgctttcacaaagctttgatgaaagtttcttcctcatttggttttcttgatagaggctgttgtgctaaaaagaaagctataacaagttagaagggtggagagtgggcacttaacatttttgaagtacttgtctttcttcctaggggtcctccagaaattgatcatagataacttgaccaaattcaaggcccagagatttcttccaggcattctgggagggaaggaacatcaggctttctgtactgaatctaattattctaaatatttcccactgcagcttgtatgagtgttttctgatgcaaatatggtgatagtggcgacctctctaactgggctaaatatccttgacagctttttatctgtcctctccaagtatttttagtctctttagcttctgtggccatgtctggaggaactgaggatggatttagctgctctggtgctgctccaagttgttgtgggtgctctttgctaccttcgtcactgtcctgccacagtcctgccactgatgaggctcctggcccttgtcatttgatgagggaacataaacacttgtttaataaaaataaaaaagtcatgattttcagaatgctttgaaaataagctatggctaatggtgatacacaataggaatgtccctaatttcactaaattgtatgctcaaaaagggttaaagtggtaaattttatgttatgcatattttgccacaattaaaaaaataaaaacttcaaatggatttgaagcttaatgagaaaactagttataatgtcctaacagtaaatatatggccaatattttcatgaccccaaggtgggaggctgtgccttaaataaactgtcagaatcacacattaaaaaaaaaaaaaagtgatggtaatcaggccctgaggttcatttatacagaaagtgatttttaggtgagattttaatatttgcaatatttatatttgtaaagaggattggctagctcattcagaaaagtctgaggttcttaataaacactaggaaacagatggtttggggttgatgtcagggaaggtaagcaggccgtgctttagattagagcacttttgattgcaagtcccatgagccacacagtttaggccaagtgaaagcagttttagtctaagaagagcagaagcaatcgtagcctctcgggacagaaactgaagtgcagctgggcagtgggaactggatctggagagtctggagtacatgtcttctctggagctgggctttttccattcacatgtagcttccttgcttgagttacatgtagtggccttagtcatggctcctgcatgtcctgactctagttccagtactcatcatcatctgactcccatttctatggctcagtacaaaaatattcaagactgggtattggactgactcctctcagccatttgctttgtttccataggccaggtgatcatctcactctggtcgactatgaaagaaggttggttagatccagcagcctgctgatcatttagagggtcttagagtgagaggagattgtgtgagaagctggttatcatagcagggggtcctggcacctcaaactctgtccccatcaaacagtgtaaaagaaaagatattgactcctaaaggagtgtcttatgttcagatgctatagagttttgcagagaaagtgttcagtgtagctacagatagaaggccaagtgtccttggtcagccagcctgggtgtgtgtggagtaagttagtggtaggtgtagtaactgtctcaaagctttttctttgtctctctctctctcttttttttttttgagacaaggtcttattctgtcgcccaggctggagtgcagtagcacaatttcagctcactgaagcctcgacagcctgggctcaagtgatcctcccacctcagccccccaagctgaggacttagctggaaaacacaggcatatgccacaacgcccggctgatttttatgtttttagtagagacaggggtttcattatgttgcctaggctggtcttgaactcttggccagctcaagcaatccacctgcctcagtctctcaaagggctgggattacaggcgtgagccaccgtgcccggccccagaactttttctttgaatagtggagaagcagaacaccttggaatgctatggtctgtgcggtctttgccctgtgggtgttctcaggtggaatcaggcagtttgggtgatgtcagtatcatttgaggtcttccacagttcagctatttgggtgggcttccccacttttccccttgttttgggtcggtaaacataaaaggatggagatgtgtatccttagtaagaatgggagacgttgccttcagaatgggtagaaagcagaaaacaagcggggaagaaaacagaaaacagcctctctttaagtgtatgtggctgcctgtgtgcacagtccttcaccttttccttagtatatccctcctgcctctgatctcttgttgttcttgatttttcatggtagaaggaggaaacaaaattatagaagacaggtggaatactgtgaaagaatagtagtttggagataactatgtaaagggctactagcctgcgcaccgttgaattctctgaatttacagctgtttagtcattgatgtttcatagtgttgaccttgagtaaattcagaaaagcaatactgagtatgttctgctaaacaaaagaggaaagtgtatgtttttaaagaaacaaccttcacagtggtttcagtagttacagggatttggttcttttttaaattattttatttctttttaaagatggtctcactctgtcatccaggctggagtgcagaggtgtgatcgtagctcactggcaccttgaattcctggactcaagtgatcctcctgcctcagactcccaagtggttaggagtacaggcatgtatcaccatgcctagctgattaaaatttttttttttttggccaggcatggtggctcacgcctgtaatcccagcactttgggaggctgaggcgggtggatctcctgaggtcaggagttccagaccagcttggccaacatgggtgaaaccccttctctactaaaaaaaatacaaaaagctgggcatggtggcgggtgccagtaatcctagctacttgggaggctgaggcaggagaatcagttgaacccgggaggcagaggttgcagtgtgtcgagattgtgccatcgcactccagcctgggaaacgagcgaaactctttttttttttttttttttttggtaaagacagggtctcaatatgttgcccaggctgatcttaaactcctggcctcaagtgatcctccagccttggcctcccgaagtgctgggattgcaggtataagccactgtgcccagcctgatttgttttttaataatagcttaagatgtaattcatatattataaaattaacccttttaaaatatataattgagtgggttttcttttgtatatttacatgtttcgtgcaactgtccccactctctaattccacattttcatcactccaaaaagaaaatctgtacccattagcagccactccctgttgcctcctcctcccggccctagtcaattactaatctgctttatttctttatgcatatttatgcctagtgtgaacatttcatataaatagaatcatgtagtgtttgtccttttgtgacttgactggcttatttcccttagcataatgttttcaaggtttttatctatgttgtatgtagcatgtactgttacttcatcccttttttaaaattaaaaaattttaaatttaatataatagagatgggggtctcgccatgttgccaggctggtcttgaactcctgggctcaagtgatccttctgcctcggactcccaagtgctgggattacaggtgtaaaccactacacctggccacttcactccttttatttttgaataatcctctgttgtgtggatatataccacattttgtttatccattcaccagttaatagacatttgagttattccactttttggctattaagaaaaatgctgctgtgaacatttgtgtacaagcttttatatggacatatgttttcatttctgttggaaagatacctaggagtggaattgtggtgtcgtagttaactctgtttaactttttgaggaactgttttccaaacttttccaaagtggttagatcatattacattcccaccagcaagtatgagagttgtaatttctccacattcttgcaaacacttgttattgtccatctttttgattatagccattgttgtagatgggaagtggtatattattgtggttttgatttgcatttccctagtgactaatgatgttgagcatctgttcatgagcttattagccatttgtatgtctgctttgacaaatgtctattcaaatcctcttccatttttgaattgagtcaattgaatttttgctgttcagttgtaggaattctttatatgtgttctagatatcagtcccttatcagatatgtgatttcaaatgtatgattgacatgtgatatgtgatttttctctgattctgtgtgggttgtcttttcgcttttgttttttgagagagggtctcattctgtcacccaggcaggagtgtagtgatgcagtcatgtctccctgcagtcttgcctgcctgggcttaagcggtcctcccaccttagtctcctgagcagctgggacttcaggggggcaccactggtctggctaatttagaaattttttaatagaaacggagtctctatattatattatgcccaggctggtcttgaactcctgggctcaagtgatcctcctgccttggcctcccaaaatgctgggattacaagtatgagctgctgtgctggcctttactttcttgatagtgtcctttgaagaacagaagttttaaatttgattgtgtcccatttatctgtttttttgtttttttttttggtcacttatgcttttggtatcataataagaaaccattgtcatatccaaggtcgtgaaggtttacacctgtgtttttttgttagagttctgtagttttagctctgacatttagttctctgatagatcttcagttaatttttgtacacagtgtgaggtaggcttccagcttcatttttttgcatgtggatattcagttgtcctagcccatttgttgaaaagaccattctttcctcactgaagtgtcttggcacccttgttgaaaatcaactgactataaatctgtgggtttatttttagagtcttgattctattccattgatctatatgtctatctttgtgccattaccacaatgtcttgattctgtagctttgtagtaagttttgaaatcaggaactgtcagtcctttaactctgttcttctttttcaagattgttttggctgtgctagctcccttgtatttccgtatgaatattaggatcagcttgttagtttccacagaagagacaactgagatataatggggattatattcaatctgaggatctatttggggagtttaaattcattttatggatttgctgtatgcttaggaagtcctggctaactcagacacccaagcatcttgccttaaaaacacaaaattttgttttaatttattgatgtagtaggctgccttggtgaaacactgtaattcactgttagactggaattggacttttcaggttctaagagagcaaacagctcttccacgtagcgtgtaggttgacttcctgtagtaaatgtttttttgatgtgaaagtttgctgataccttgcatgttttaaaaaaaatgtggtattctggttaatatacattctggttaatagagaactagcagattatatatatgaatatttatcaaagagttaggacatgttacaataaaattgtgacattaaaatttatataattgttattattactggaggaatcagaagatattttaggaccttgtagtcccgcaggggccacgtgaacattggttattgttatacttttaagtcacttcatttactcaacaaataacaaagtgcctatctgtgccaggcacaaggaaggacagacccagtctctgtccttatggagctaagggggagacggacattaatcaagatgccatatgaaatttcagctgggactcagtgctgtgaaggtgcgtgcaatatgtcataaagggatttgactaatctgcaaggttgggggaggcttcttgagagctctggaggaaaatgggaattaattgtgggaagaattaaggagaaaagttccaggtaattgggtgagtttgttagtgagttgtgtggagatactctggttatatcctgtttatcacttttgggaaagagtatctgaatacttggctctggcctttactctgtcccttaaatgccttgtggctgagcaggtactctttctgagcttgttcacatactgttttttaaatttctgtagccatttttatttacagatacttacatgaaaacatacagaaatctaggcttttggttgattgttttcatataattaaaaaatcattcactttgggaggccgaggcgggtggatcatgaggtcaggagatcgagaccatcctggctaacatggtgaaaccccgtctctactaaaaatacaaaaaattagctgagcgtggtggcacgtgcctgtagtctcagctacttgggaggctgaggcaggagaatcgcttgaatccaggaggcggaggttgcagtgagctgagatcgtgccactgcacttcagcctggaggacagagcaagacttcatctcaaaaaaaaaaaaaaaaaattatttctttgtgaccttccatggttagctatttagaactgctttagtggtaaattgaatacttttctgaacatttttcctagactttgaaattaggagtcatttctgtttacacatacttcagaagcctgtcagggacagagtctgtagtgacagaagtctgtagggaagcagatatggatgtaagtgattcaagacaagtcataatgctttaataaggctctggaagggaagatggaaagacttccgggaggaggtggaatttgacctgaaatcattgacgggcaaacatggtagttggaggagaaattccaagcagaggaaatggaacagaggcatagagccaagagagtacagggagtgggtggaattcatgtgcatatgggtaggtaagcctcggaaagtaggtaggggtcatgttgttaggggcctgaaagtcagaccgaagaatctggatttaattctctgctcaggagaggcttttagaagttttttttttttagtagaggaatggaattgattggataaagtcgattctcctgaaacaggtgctaataagggccacctagttacttctccagcttcctctctacagtcacgtcacattttttagactctgattgttccaaggtcccacagtgtctggtggttttaggcctcccacattgctgttgccttgatttagaagttgcacctgcctcaggaacacaggcacacacgctcacccatgctcttgctgactttctgtgtcttctgtgtttcagcttaaatgaaacttccaataggagaagccttcttgaccttgcccctcttttcagattggatcggatgcccttcctgtgtgcaccatagcactacgtggttttcctagtcatggcacattttagtttgcattggagttgcttgtttacttctctttctctctcaattagatgtgcatttctggaggtaagaggcttgagtacctagacttagtaaatgcttgttggctgaatgaatgaatgaatgaatgagcaaataggaaggactagagtcgggagaaaatcacttctggcaagagttgtctgtagaattggggtgaggaaagagctcgcatggctgaggagtgtgtgtgtcacacacacatgcaattttgtgactgactgaatgtgggccttgagggaaggtgactcctaggttttgaaccataactggggatttagtgaggccagactgagatagggaagacaaggcaggtatatttggggagaatggctgcaaaggtaccactgtttttcttcttcttctttttcttttttttttttttgagatggagtttcactcttgtcgcccaggctgcagtgcaatggcatggtctcagctcactgcaacatccacctctcaggttcaagcaattctcctgcctcagcctcccgagtagctgggattacaggcacccaccaccatgcctggctaattttcgtatttttagtagagacggggtttcaccatgttggccaggctggtcttgaactcctgacctcaggtgatccgctcaccttgacctcccaaagtgctaggattacagacgtgagccaccgcgcctggccggtatcgctgtttttaaggcgtcattgggtagctttagaatgtgtatatacagcgtgacattggagatgtgggtcaaagatcagggagtccttcatatcaccctgctttttttcttcattgttcttccagagggcaagggagggagccttggtgctggagtccttagaggtcagccccctgggcttggggcagggagagaagggctgtgaggaggtctggaggggcagatgcagtggcagcagcacagcacaaaaggtacagacagtacctttgcaaccaatgaatgaatcagttcaaaacaattagaagtcacagttgtgagtgagattggaaggggagcagagaaggggcctgagggcagaaatgtgatgaatgcttacattttaatgccaccagaggggagagaaccagtagaggctgagaaagaatggtcggagaggtaagggaacaagcagaatatgaattcagggttgctgagtgtggagggttgaaaggaggttgtcagtcgtaatgctgcagagttgagtagactgaagactaaggaagggtattggttttgtcaattcgataatgagagaataaaggagtagagatagggtggatgattatttcagaaccgtggtggcatatacagagtactggtagaaatgatggtgaaatgattgatccagtccaagatgagaaaagaaaccactgtggcctgatgggctgtgagtgtattagttatctatagctgctgtaaccaatcatcacaaacccagtggcttcaaacagcccagggtggaatctcctggttcccatgggtcaggcatttgggcagggcagggctgggtctgctggattgggactgctgaactgtggtcgaggtgctggccaggactgggctcaccttggaaacctctggtaggggaggatccacttccaggctcccttggccatttgaaggactcctttctttgggctgttgggctgagggctcagcttttcgccagctgttggcccgaggctaccctcaattcctgccccaggggcctctgcaacaccatagcttgcttcatcagagccaggagggacagtctctagcaagacagaagtcacagtctgcccattacctttgccatgttctgctggttagaagcaacttgctaggtccagcccacactccgggggagggggttacacaaagctgttaacagtggctgggcgcggtggctcatgcctgtaatcccagcagtttgggaggctgaggcaggcagatcacgaggtcaggagatcgagaccatctggctaacacggtgaaatcccgtctctactaaaaatacaaaaatttagccgggcgtggtggcggacacctgcagtcccagctactccggaggctgaggcaggagaatggcatgaacccggaggcggagcttgcagtgagctgagatcgtgccactgtactccagtctgggtgacagagcgagactccgtttcaaaaaaaaaagctgttaacatcaagaggtggggatcataggaggtccatcataaagtttgtcctccaccgtagaggggtggtgacgggattagaaggcattataacagttcttcaggtgaggccttggaggatgcagatggaaaaacgggagctttcagaggcggaagttttggaagtgcagttccagttgaaagttgggatagtcaggtggtgacgcttctcaggaggccttctgtgccctttgtcttcatgtgccttctatgtgctctctcctgttagacaaatgaacattctgtgttacagttgccaccgataaatccatctgtctggctaaaatggaattatttaccagccaattcctggccagtggaggtatctgccctcttgccttatggttttgttgaggatcaaatgaggtaattcatatgaagtgttttatagactacaaagtaatatgcaaacaaaaggtattaaacggtgctacctttttctctatgttaagtagaacccatggaatttaacttacattttccttaataacttgggttcattatgttgtatgtagcttattaaactgggctttatttaacactgtgatttgggtttttggagtagagagtttacttttatgataaatgaccccaaactgctatacctttcaaatccttgtgtcccatttttattgtttaaaaaaacaatctcaccttgccgttgcctgtcactcttttgcttctgtgtgtcagttttgagctacattttttcccctccgatttgttgcttctgatctctgggcttggcaacctgataatgaagcatattagagctgtgagtagttttatagtaatcaagctacgaatgtgggtcggagaaactcttctcacagtggagtacataagcttttgtgcatggacttcgtaaaattcacttttggccttcagagtgttcttggcttccttcctagttctggctgtgttcggattaagggaggttcccagatagccgacctccattccggggctgtggctgccattttcttggcgtccacctcattgctctgttacgagaaacagtgtcattctcttctttagttttgatgaggttttagttctttgggcagtagcaagtagtgataggtgatggtggtctgtggttcatggaccaaaaaatgtttgagaggcatggaggatctttagacaagatcaccttctaggtgtatgtggtagcattctgttccaccgctctcttctccttcaggatgtctccctcccagctaacctgctcggtgttcctcagtgggagcgtttgccttagctttctctcagagcatcgtacttactttttctgcccgcatttttgcattgctgctttgtggagaagcgttgctgcattattagggagagaaccgtgttttcttgtggaaatcacacagtagtatgggagaactggtctggttctaattctgccccgtcctagcttgtggcctttgcccagtgccttgttacccatgtcttggtgtctccatttctagaataggcttaatgtgtgctttgctaccttttaggatcgaaataagattttatatatgaaaatgcttgttatacgtacataatattgaatagaatgcctagtttgttgggttgattttgttgatattttacaatgctctctctgaggagttaaacaaaattatcattagtatgggtaacaataagtactactgaaacaatatcattttaaatgttatacagttttttttactgaatgtattctagttgaatctatttgtacaaatgtggacatttagtaagtgctctttgattattttcagactttgagtatactggcttccaagccaaattaaatttatgaaaattctaatgatactgtgattcatatctagaaagaataatttaaaaaaaactgtaaaatcactttaaacatgctttacgtgcatctctggtaatagagaatcaattaatctgatttctcaggccataaatctggcttgatatattgtaatattagttcctgtgtcagcctcttagaacttgaactgttttgtagtctgttccagctacttgtttgcttttgaactcaattctaggtgttgaactcaatttgagagcctaaaatggtttgtgccccaattaccttagaggttactgtttcatttttttatttagcctgccccaggagtaggaagtcggctacctaccagactttttccttttaacttgactgtatactttaatttttgtctctatcccatgggggagttgtgagggttattatagtatagtagcacttaatggcatattttaaacttcttgaaaagtggtaatatgtgagcacataatatttttgtactgtagcacataattttttcccacactaaccttttgtggttcagaaaaagaataaagttacttgggcttggggtacatgttgaattgcccatctcataaaatcgttaacctgattttagggagtgtctctgaaacatgtcttttgacagaccttgtgctgtttcttatttattattaataaattgatatttcatttattattcataaattaatactaattaaataattaattgtgctctagcccccagttttagtttggttttcttggtatctctgaaaactgttgagtattccccctactccttttaagtttttttttttttttaagcaggtttaaagtagcttttatcatattccttgatttctcaaatgaatagagggataaggttcctttctttaaaaatatctgcaacattgctggactgagaggtcgtatttacagttttttctttttaaaaattttttttagagatggggtcctgctctgttgtccaggctggagtgcagtggcacagctcacagctcactgcagccttgaactcctgggctcaaacagtcctcccgcctcagcctcccaggtagctgggactacaggttcgagccactgcttgttcagtctcttgcttttgtctcagtggcacagtaccaagacatagcaaatcaaagtgaccaagaggatgagtggcaattcggtggccttataggaagagatgtgcttgaaaacgacagaaggcttttagtaaattccaccaccatcaccaggacgagagacgggaccatttttcctttccataaacttaggggctggttattaatttatgaattctataagtaatttgagcttgtgttatgtaccagacattgtattaagtattaccagagatactgggaagaacaagccagacatcctttcaaggatgcatttgataaaatctcattttgagtatgttaggaaaatatttattggagaaggaaacctcctagattggttttagatcccgaatggccttagggattgaaaatggagttgtaggttagcagaggacatttctgaaaggagtaactattttgtaattaaaaagcagtttacagaagatactgtggcagagactgctagttgatcatgaaacccatctccttctcttcctcctcttcctgggcattttccagtcccccttggaatcgtgaccaaattctagccagtggggtgagagcaacgaagtgtgccacttccagacttggcccctgaaactcttgaggcatgggtatcatgccttttccttatctggcttgatgcagagggcctagtgacctagaaagtcttctgccacaaggtagaaggagcacaggcagcagagccactgctgtgagaacagtctgcccaccaggagcacctgttttggactttacctgagcaagaagtgaacatttttggtatttgagccattatacagttagcctccctaactatctaggcacgatgcctaggatgctaagcaaaactggactgagaggtcgtatctacagttttttctttttaaaaaatagtaaaggtgctaagtagtaaaggtgctaagattcaggcgcggctttaattctgtggagacctaaatattctttgtctttatttcaaagaacggtaaatacacttttcattatgctgtttctctgttccaaagcctgtaatcacttcttactatatagcatcttgtttcattaatccatcttccaaaaactctaatatatgtatatattatccatatacaatgaatgtgcctgtgtgtaacatcctgatctaggttctctgagtggagacaaaatgaataaaacatagtccatggcttcaaagagtttctgcttgatagccaggtagttactgaatttccatactgctatcatctgtcccttgttttaacctttaagtcatatattattttttcattacctttttttaaaagtattgtttcaattagatagtatactttttgaaaacagggaatatatattatagagctctgcatctctcctcttgggtatttcttttttttttttgagacggggtctcactctgttgcctaggctatagtgcagtagtgctgtcatggctcactgcaacctcgatctcccaggctcaagcaatccgcctgcctcagccttccatttagctgggactgcaggcacacagtaccacacctggctaatattttaatatttgtagagacagagtcttgccatgttgcccaggctggtattgaactcctgggcttaagcagtcctctcgccttggccttccaaagtgctgggattacaggtgtgagccaccatgcccagccttcttgggtacttccagcagaaactgggcactatacttgagtaaccatccctagagtttctactaattatcttgtgtggatattctggtatagttttgtattatgtactaacagatgaaagtactttttaaatcttctaggaattagtggaattatgctgttgaggaatgttaggattggaaggatcttttatagatcatttatctaattcctgatcttttagtttgatcatctggtttctgatactcaaggtgtggccattaattgcagcatgggcatcacctgggggcttgttagaggcagaatctcaggttctccctcagacctgtgaatcagaacttgcattgaaagaagatcctaagataacccgcatgcacattacatttggagaagttctgctcaaggtcaactactcatttgactcttgagaaaactggggaagtcagagagttgcccagtcatacaactgtttatttcagtggttctcaaccttggatacatcttgggatcacttggggacctttaaaaaaatactgaggcctgggtcccatccccagacattctgacgtaattggtttgggcatcagagttttggagatttcactagatgactggctaaggctgagaaccattgatttgattaatgatggaatccaggtttcttcatgctctaatcaagtattccttccactccaccatggctgtacattcagaaacaatgaaaaacatcctatcaaatttttacagtaatgcatcactccatttcatttcctttataggaatttacccctattggatagtgtcccatttaccatctgtcttccccccactagaatgtatctccaagaggacaggacccttgtctgtcttgttcagtgctgtgtcccagcttgcgaacagtgtctggtacatgttaggtgctcctttaatagttgtagaacaaatggaaggagctaccataaagaaggatgtgttctgtgagaggaaaacacaggctactctaaaggtaccctgtgggcgagaggcttcctgaagggtgaggggtctgagttgaagtgcagaatcagcgggggaggtgcttgaagacctgcttctgaggaaggacttgaacccagatctgacttgaaagcttgtgcttttccattccactgtgttgtcctgtggacacagtggctcactgatttgcccggacttcttagtagtgagtggtggactggaacacaccaccgcggctctgcaggtgcttaaggccagcccgcctccctctatggcagagccgccccagtattgcagacaggcgcctagagggagatcaaaacacgaagttgtcctgtgaaagttcctggcccagtgtttggcacaggggtatctagtacaaggtagccctttcttatcatggaagtttttttgtgctttggcttgttttgagaacctatggttttcaaagatagaatgacttgatttcagttttaactttggtttctttcctagttaactatggagacttcattatgcagtgctgtggagagagtgtgattggtttttgtctatgatatttctgtgtcatatgttattttagtgccaagttcttcctgttatttcagatattctgtcactgatttacttattgttagactttgaagttgggtataaaaatccttttttatgaagctattcattagtgtgtcccactgaaccaaagtgatttttaaaaacttttcacctaagaccattgttaagatatctcaaatggtaatcttataccgtcagtttttgataataggaagccaggaaatgttaagccttgaatgtaagacattatttttaacatcgtaaaatttcaagttttaattcagaaactaaattaaaatgaggtattacattcatgtgattagtgggctgttactggtgactcttaaagatgttacaagaagtcagcgtgctgctgacttttcccctattggagatcttcccatgaaccacttttcctaaggtatgatgattccatgctcacagtcatgggtagaaagtaatgttggattttccaaaggatacatgaattccgagccttgtctagtctatagggtgaatccttggacatgactgttaccacagatgttatcatagttaactactttttttgtttttgtgtcagggtctcattctgtcacccaagctagagtgcaatagcatggtcatggttcactttaggctcaaattcctggctcaagtgatcctcccacctcagtctcctgagtagctggggttacaggcgtgagccactgtgcctagctcagtatactactattggttaaattggagagggaaacagtcctagaacaagagttttacagaaatagaaaagaaagaattaaggagctcatggttatcctggtagctaggagtcacattatagagaaagactttatttatatggaccctgaaaacaatttgacttctgaagcacttgatcatgggcataagggagaggaaaattaataattcttggaagtcaactttagtcagattgcaacattttttggcataaaaaactcaggcgcggtgggtcatgcctgtaattccagcattttgggaggccgaggctggcagatcatttgaggtcaggagttcgagaccagcctggccaatatggtgaaaccccatctctactaaaaatacacaaattagccaggcatggtggcggacacctgtgatcccagctactcaggaggctgaggcaggagaatcacttgaacctgggaggcagaggttgcactgagctgagatcccaccactacactccagtctgggcaacagagtgagactccgtctcaaaacaaacaaacaaacaaataacaacaaataaataactcaggcaatcctgtttgttcttagaaaatgttaacattgttaaagctcaccctcattaactatggtaacaatagtgttttgtatttgggtggtacctttgaattgaaagcacttgggtatgtattacctaatcctcctcctgcctcagagagaaggagagagaagtatccacccgccctttttggatgaggtagtacagagaggttgaattactttcctaaggacagctagtaaatgttagaactgaactctttatattttattttaattaattaattttttgagacagggtttcactctgtcatccaggcgggagtgcagtggtgtgatcatggctcactgcagcctcaacttcccggattccagcaatcctcctacctcagtccccccaggtatctgggaccataggtgtgttgccaccatgcctggctaatttttgtatctttggtagaggtgaggttttgccatgttatccaggctggtctttaactcctaagctcaaataatccacccgcattggctccgcaaagtgttgggattacaggcatgagccaccacatttatttatttatttattattattatttttaaagatgaggccttgttctgttgcccaggctggagcaggagtgtagtggtgttatcatggttcactgcagccttaaaagtcctgggctcaagcgatcttcctaccacagcctcctgagtagctgagactacaggcacaagccaccatgcctggtagcttttaaatataaaatgttgagggtggttgttgaacttgtaaactatctttggttttctaagtgtataaatatgtggtttataatgtaggatgaataatctaaaattttatttaatactgcagccaaacaaaaaagatatttttaggactgaaaataattggccgtcaatattcaaaaaattttctttttttttaaaaagttaccgttgtgtaggttttaggtgaaatctttaattttatctgagtgaagcagcctgacagccagagaccttgtttctttcctgttaacggaattccccttgatttacttgccatgccataatactagttggcgctctgcacattttttgggtgagtcgggtgttgggtttattgttgggaaatggttaaaaatgttgttggtgttgactgagcttcaaaatgaatatgacattggttcttagcaaaaatttcctctatgtacagcacacatacttcccatttaaacaaattacacaagttatgcatgttcatcagcacagaccttttctcacatatgtatctaaaattttgaagcagccttaagcttgcagtgcaaagaacggtttccccctgagccatttgaggataaattgctgataagttccatcactctcaaatacttgatcatgtacttcctacaaacaagaacattctcctccataaccacaagaacagtaatcacaaccaggaagttaacactgagacattcctactctccagtcctaaagtcctgttgctgtttgccagttgatccagcaatggcctttgtagaaaaatatctaatcagaaccttgggtcataactggttgtctcttcaatctcttaatacagaagagttttcagtccttttagactttcatgaccttgacactcttgaggattgcaggccagtcattttgtggaatgttccttgatttggatttgtctgatgtttcctcatgattagattcaggttttgcatcttggcaggaatatcacagaagagccagattatatctttttgaaagattagttttacattttattttctgtttccttagagcgtttcccaaagtgtattctgcggaactagcacctactgtgttctcaacaccgtgccacctatagaaggtaggatttgaaaaagcttttgacttacaggaaggggtgggcttggcagtggcagtaattatcatctagtacagtggaaacagccttcagcccggactcagaagacctgggttctgcacttaactgctgtgtgatcttagatgagttacttaatccttctggggtagcaaaaagaatgctctcctcataaagtttctgtggagatgaaaaaaggcaaaagatttaatcacacggagaaatcaaagcacttaacaaatgtttgatactaatacaacacttctgtaattctagtgtccaataccaggtgacttagagtaggagcagtgtggtattttgggaaaagccacaggtcatgtttgaatcccagctgagccactcagcagctgtggatcttgggcaaattaatctgagcctcatgttcctcctctgtaaaatgggagtaattaagcccttgtgttttatcgtgaggattaaatgaaagagtgcaatgtaagatcctttctgggtgcctgatacacagtagagtcccacaagtgcttactccctaataaataatggaaaatagatttacttaatcacatgtacctccagttggaattgaatgaagtagaggaggagagaatgtcccaaaacccaaattgaagtgatggcttacagggctgctgtgccctcactttatctgttccctcatacatatttttagattgaaaatgtaaatgtagataaacagtgagaagtttattgaacctgagttatgatttgacctaagcctggacccgagattttgtaatatgatcaacaggaaaaaggtaaatctgggctacctaaaaatagaagcggtaagttgatcatcacacaactctaagaacaagaaggggattgttaaatagcaaaactaattatatttttctacttaaaaagctgttagtttctgtttctttaaccttttaaaaatcttttgtagaattactactgggtttaattcactttggagactttggaaaagaataatgcaaaatcagatcagtgtttggcacatagtgcttaattaatatgtattttggatatatggtgatttgaaggccttaggttagtaatggctgtatttgctgctgtgagcattatgctgacttgaatataacaatatatgtttatgttttcagttcctatcctactaattaaatctaagcacataataattagagctaaacagaaaattgtagagcttccttttgattttactactccatgttgttgatcaaagatattcccaataagatttagcaatttgatacactgttataccaaactgtttgaacagtttggtctagagtttgaaagattaatcgtaatcaacttgaatgaataacagtgttcatcattattcatagaaccaacattattttttattatgaatcaaagtaaaatgaatgtatcatttctagattagttaatatagttataatttaccttggcagaagtcacagaattttcgaaggaaaaggtcaaatacatttctttggatttaagtaaaggatttggcaatgtgaatctcatttttttgaaacaaaacatgaaaacagtaattctgctttttgtctaagtgaatgagcatttttttgcatattggaaagttatattatactacaccttgtaggttgactagaaaggatggttcgttctttagaattagagttgtcagtcaagcaaatcatctgtcattttcaagagcctcactagttatttttttattgtgaagtaggttagaaaattattttgtaaagtctaataccatacacatatattttgttagataatgataatgaagtgttttactgtcatttggttgacactcccacttttcagtgtcaaagttcaactatttgtattgaatactgaataatgcagtggaaaccagtatatgccttaattttactgttcactcaagatactattattaggatttgaaaactggtgcatgtgtttagttattttatcattcttagttatcccaaaacattaaaaagcagattttaatttaaaaacagatttttatgcagtatagccatgtaaagttcttttccagtgtaaaatcaaagtttctctgtatcccacttcacctgtagaaacactgaaatttaaaaatatgagttttaacattttgcctatttgaaattccagtaattcttttctcagtattaaactcgcaatccttataatgtagtaggaaaatttacccattgttatgtttcttaaaaacatccagtttatattcagcgtgaacctaaaattctggaaatggtacactttaaaaactgatcaaggggaacccactggccagtcatattcctgttccttttgactctgtggccacacctccgtgtaaagtgtaatgtttagaaactagattgagagagtgcttacacagccctgccctttggtcacatttaccactgcctgatttggtatcagagtggaagactgaagccttttctatagcagttaattgtgctgttgagaagagtacctttattacataaataccacacacacacacacacacacacacacacacaaacacacacacacgcacactctttatataccgcacagtagctgggttcctcgaagaggctaaaagaacagaaaattaacatcagattgtgatcacaaacatagaagctggggtttaaaactctgctcgtaagtgttcagaattgtacttcaaactgatagctttctcagagatatggctattcatatacaattcagagcaagcccatccattgagcaaccagtatagtgccgttttcataaaaggtacctgtaaatgttgaatatttgaattgagtatagattttagaatttcacctctattttcagaattgtacatatcatgggggattttaaaaaatggaaataaaagtactttaggggaagagagaagggaggtaaaggctcacgtgatctggtattctctgctttaaagttttatggcccgtggaacctccctcgggaggatgaagtgcagggagcataagcacataagattaccgaggttttatagtgtgtaattcatacagaactttctatgaactttcttttagttgaacagtttccttttggtttcacaggaagattttttgaaaggtttaatcttattttcctattaaattaaaatttgaaattcttgaaagcagtcagtttttaggtttttaaagtttttatactgcttatagaaatagaggatgggtattataattcaattggttatgtagttcatggaccaaaaaagatttagtatgccaaaactctcttaagttcatctccataaaatctttctatatgatgtagtaaattttttagactttatttctatgcccaatattttccttttaagatcttttccttgagaagaagtgtgttaatcagatgaaaaatgtttggagaggattttgtgaccttagaaaatattttttgttctttgatgtttttcatctgttcaaaaaaatagactgtactgaacaaagccgtagtaaataactggaaaaagatattgttgtatttcacttttaagattattaaccaatgcctgtatacttatgtaaggttgcttaattgtaaggcctattaagttatttaatgacagtaaattttatagggatttgtgtctggagaagaattagagataatctaatcttgttgatttgggaaaactgaaactattaagtaacttacccaaggtcacacaattagaaagtagcagaactgggccagatcttggactcttgactctgagttcagtgttataaaaccttattatatcatgaaaagttgtttcaactgtgacttactggagcaaattaagtctttgatgttttaatgtgcagctccttagtacctagttatgtgtaccctttgtatattggggatcttatgtagcataaaaagcctgggatgaataatttgtaactttgacctaaatgtgccaaagcttgtgagaaattttgagtcaggcaaagaaactttgttataggagtgaaaaaataaatgatatgtaagcaaacaaatgagtgaaataaatgttatataaaggaaatgatctcttctagaaatcatcaggtagactgattattaggtagtcagacataccatctagtctgaaagtaattattttttctctaactcatttagaagagttacattttgatgaaatacattaattatgtagatatgtatatgtaaatcaagttaattaaaatgatgattttatgttcagacctagaaaggccagcttctgtattacctgagtagctaactgcaggcttaaatcccttatatttataagatttgtgatttgcttttgaaaggataaatctcttttatagtctaggggatgaagtagtatttacgaacaaaatagtcatatattactataattcttcttacctaagaaacttaacattttttcaactgcttaataaaagatttttgggctttgtgaggttaattttataatttttatgtgcttcatcaaaacatggggaaagaaccttttaaaataactttcggttatgggcagctgcggggattttccctgttcactcacatgtcagggagcacaagcccgatcctgttttaaatcctcttgaccagattcctgctgccatcaatctgataaatgggtaaatgagtattattaactaagaggaatagtggggcctctgatgctcttggtctcacattgactaaactgagctgctatttctgactttgtcagtgtactttaaaggagattttatctattattttctctaaatttattgttttcttctttgtagatgatcatgggaacagcaatagtagtcatgtaaaaatctttttaccgaaaaagctgcttgaatgtctgccgaaatgttcaagtttaccaaaagagaggcaccgctggaacactaatgaggtagataagtttctttttttaagggtataattattttaagggcaaattttttaggttgcttcacatagtcctactttatgttagctttaaatttaaaatactgatctaggaaattgtaaatgacattatttaatctggatttgacagaaaccaaccaacatgttttttgatctgtctctgatctgcttggcttgcattgaaagatacacaatgtgcacgttgacttaactaaagtagcatgagtttctgtctgtgttttcttgcattttagtgtcttgcatttagtggttaaccctgcctgcatgccagttaaacgttagttgttatgtcttcatgaattaataaatatacagtcccactgttccacagaatgtgtagtgtcttgacaatgtgaatttttgtagagttggaaagggcaggtttcataggagtgaaacagcttttcgtcctttctaatgaagaaagtttgcttaatgctaagaatttttattaagattgaaggctgtacagtagattatgtatttagcatccaattagaaagtagatttatgaagtagaatgaaaaaagttaatcatcttggatgatgtttccttttttggtaaattttaatccaggagtcttactgttaggagtggattgctttgtcatcttttttattttgaaatctgaatatttcaatttaaggtaatacccgtttagtgtggtgatgagaattgggtatacgtccatcaatttgggagttatattcctttaattcagatggctggggttgctggttttgccaagttccatttgtgtgccttggctcaacattgatgtccaagttaaagcaaatttagcaccctatccttattggacactcagttctgttaaaagacacaagaagaaaatagtgctgcctattgagccttattttttaaagattctttggcgctaactacttcctgattcagaatgcttttgttttgcgtggtgggaggttatgtggataaaagtctctttccttatcacaggttagatttaaatactcactggaaccttacagctttgttaacttgtctcaactgattgtaaaattctttgaaggactctatgttttgatcattttcataaattacattttcccgtcagacagaatgtttttgctttgacaaatgtttgctagtttagaggcctgctgtttaaccagttatttattaactatttcagacatttttagacgtgaaaatgaagtagatatgcttaaaattagtcttaatcatagtttgttactctttcagcaaaatagtattatataatttggaagccatttaataagtcggaacttgattatgaattatttaaaaactcagtgtatttcttagtattccctgaaacgtagatttgataccaaattattatacacgttagttctagtttatttataaatgtaacccaacccataataagtatgtatttttccatattatatttcctgtggaattggcagcttatttattttattttttcccatggacccatgtcttgtggcagtttattttaactatgatttgacattatatttgaaaccagaaattgcttagtgaattaaaatcagtggcctgaagagtcttataaagctggatgtagcagtgctgggaatttagttggtagattatttccatcagtggcttcaaaactttttgaaacttttcagcataacccttcaactttcacatgtttaataaaacctctaaattatttacatgttgcaccttactagtatattagatacgttttaaagcatccgataaagaatttttatagaggatgagattaaaagaaaaaaatgagaagtttttccttattttctttctggacctcagtccacatactcccttggaggccagaggctgccataattcagattacagagaggaaaatgcatcccattctctcactggtgtaatgcaaatttgaggatctagatgggaaaacgtggattgttttgcatcagctatcactcatgctgaaatctaggtagaggagcgtatgttctgaagggtggaggcagcaggaggtggcacagctgatgggtgaagccatgcagcaccctttcccttgggatgggctgttctttcagttaattgtcagctcagctgacaaaagctcctatgagggaactgaatttacaggttgactcatttctctgtagaggaccttgacttttttcttgttttattttttggctttggaaaaatagaggaatattaagtgtgacagcgaagacttaccctacgaattgttaattctgcagaatgttatgtggcgatgataacctgctatttttttttttttaaactggctttggtaatataggtggaataaagcaatcagcggtgttactaaagcacttctttgatctagctgggaattggcattttcttacgttcttcagcctgccattcttcatgttgacatgaaaacctgaaggaaacgtagttcagtggacttgtttctcattggggctttgtggtcctatgtcatgctaaatcatatttagtcaaaattgcccgtgaaatcccttgacttgctcataaagtaaagtttagtcagactgcccttattaagagcccgttttccttccagagttggaatagatttctgtgttttggatgaggaccacatgaagtagttggcttgtatttagaagctgtgttgtacaaaaactctatttcttagatcccactgaaggggctcacactggaagaggcgtgtgggaatgcgcacagttgagagcacagtagatttgtgttttccatctcactccctgtacagcatatgttcacaaagtaagactggtggctcgagctgcctgtatgaaatgtcaactgtcatctttctctgttctccatgttcgtgtgtgctcgctcgctctctctgctggatgtgtacagttgaatttctgggtataatgtgactcctctatactaataaggaattcctttactcagacctgtgtttaaatatttgtgattgtttgaaaaaaccttttatactgtgtgtgttgtgagtgagattgtgctcattccatccttttttttttttttttttttttttgaggtggagtctcactctttcaccaggctggagtgcagtggcatgatcttggctcactgcaacctccgcctcccgggttcaagcggttctcctgcctcagtttcccaagtagctgggactacaggtgcgtgccaccatgcccagctaatttttgtatttttagtagagacagggttttaccatgttggccaggatggtctccatctcttgaccttgtgatccgcccacctcagcctcccaaagtgctgggattacaggcgtgaaccactgcacccggccccatcctaccatttattgagcacctgttctttactactgactgggtattttatataattatttgtaagccttaaaatagtattgcaaggtgggtaacatttccttttagagatgagggagtgtaggtagacagtagttattttttggtcaagagagcatacttgatagagcctgtctctgagcttaattgcatctgtgttgcttgttaattcttaggaactttcattctattgtttactctataggagtttaatcaaaggcctacaaacctaaactacagcaagtctattctgtaacgtagtttttttttttttttttttttttggagacagagtctcactctgttgcccaggctggaatgcagtggtgtcatctcagctccctgcaacctccacccctcaggttcaagtgattcttgtgctttagcctcctgggtggctgggattacaggcatgtgccaccacacctggataatttttgtattttataattttgtagagatggggtttcgccctgttggccaggctggtctcgaactcctgacctcaggtgatctacccgcttcagcctcccaaggtgctgggattacaggtgtgagccaccgttcctggcctgtaatgtagttttgaattaaaaagagttaatatagtcttaatattgtggattcatatgcaaatgtttggtgaagctgaaagtcactaaaaggaagactctaagaaggtaagagagatcgttggacctacttaagctacttttaaccttttctaacccattggaatacctaaaatcctttcccttcttggatgttatttgcaattgcagaataaattaaatgttacatctgaaaccaaatcaattttagattgtgctcccgcagccaccaatactggtcctcaggtggtaaagatgacacaaggagtgaaggtgatgatggctgcactaattatggaagccagtatgtattgaacatcctttgtatgctaggcactagtgagtcctttacatgaatcatcacatttaatctttcagttaatcctatgagatagattatttgactatccttatcttatagatgaggaaactgaagccatggatatgttaactaatgtacccgcagtcagagccgggaagtgggggacgggggagttcagccgctgcagcccgactttgagtcccataatccctcattttgtcccacagagcaatatcaagttgacttttccaagatcttgtagctatttagttctaatcctttcgttttatagaattgtttggcttcttcatctgattttaaaatgttgtaacaaagttaatctaattttgcattatgattttttaaaaagtggcagacactcatttcttaggaaagtagttttgattcctttttttaaaaaaagttttctcctacgtgtattttgatagttttgattctttttttatttatttattttttatttttttttttgagacggagtctcgctctgtcgcccaggctggagtgcagtggcgcgatctccgctcactgcaagctccgcctcccgggttcacgccattctcctgccgtagcctcccgcgtagctaggactacaggcgcccaccaccatgccgggctagttttttatatttttagtagagacggagtttcaccgtgttagccaggatggtcttgatctcctgatctcctgacctcgtgatccgcccgccttggtgtcccaaggtgctaggattacaggggtgagccaccgcacctggccttgtttttttttttttttgagatggagtctcactctgttacccaggctggagtgcaatgacgtgatctcagctcactgcaacctccacctcccgggttcaagcgattctcctgcctcagcctcctgtgtagctgtgattacaggcatgcgccaccatgcctggctaattttgtattcttagtagagacagggtttcaccatgttggttaggctggtctccaactcccgacctcaggtgatccgcctgcctcagcctcccaaagtgcttggattacaggcgtgagccacggcgcccagcttaaaacaatttattgaggtttaatttatgtattacaatataaactgcacccatttgaagtgcataattcaatgagtttttgacaagtgtatgctggtgaaactacctccaaaatcaagacacggcacatttctatcaccccataagtagcttgagagagtatttttttgtttgtttgttttgttttgtttttttgagatggagtctcactctgtcgcccaggctggagtgcagtggcgtgatctcggctcactgcaagctccacctcccaagttcacgctgttctcctgccttagcctcctgagtagctgggactacaggcacccgtcaccacgcccagccaattttttgtatttttagtagagatgggctttcaccgtgttggccaggatggtctcgatctcctgacctcatgatccgcccgcctcagcctcccaaagtgctgggattacggacgtgagccatcgcgcccggcccgatagttttgattcttaatgactattagtatgtggactatggatagtgaaaaaactatattaaaaatagaaattttgtacctgtgtgtaacttgagcattaagcctgacttttatattcagggcaagggagaaagaatgtattaaacacagagcacattcattaaagaacctactcttgtttcataatcagtttggtgttcacatcttcatcaggtgaactgctataaggtttctgcattttaagttagtatttttaaggcctagagccagaaataattatgctaacacaactgtctgaattcacaaatgactatttcataattacgtatattagtactccatatatgttgtccagactgaaaattgttttgtttagtcattaattagctgtttgacttaaaatataactactgcattccctagtctctggatctagatttcacttggcattcttccaaagccaaactaatgcagcaccatgaaccttttataatgaaaatgttctccctaaatatgttcaaatcacttttgtgtgttactatttttgaactaatgttctttttttgtttttcctgtaatacacagtttctctagagtaagcaaacaaaatagaattctagtttgtactgatccttaaagaaagtttcatcagatgtttttagttggtggtagctttagagtgtcatattaaatgcattttttaatggtaaaaatgtctatgtagagagcagtataggttgatacattctaagccacaccaaagcgtctgcaggagaaaaaacaaaacaaaacttgagtaataattataatgctttttataggaggaaacttactctttaaaaatcttgagtactttttccccctaactttttatatttaggtaagaaaaatggcctttaacactgtaagaattattaaataataattaatttcaactgtttttaacatcaagccaccttatttttttttattttttttttttgagacagagtctcattctgtcacccagactggagtgcagtggcacaatcttggctcactgcaacctccacctcctgggctgaagcaatcctcccatgtcagcttctgaagtagctgggattataggtgctcgccaccacggacctggctaattttttgtagagacagggtttcaccatgttgccaaggcccatccaaacaactgagctcaagcaatctgcttgccttggcccctcaaagtgctgggattacaggtgtgagccactgtgcctggttaccttaccttttaaaaaatttatttagtctttttttggtgtcgatacataatcttgagtgtttcttgtgtttttaattttttttcctttgtgtaactttgtgttaggtttagggctgtaatttttcagtgattggtttttctagtgtatttatatgttatctctttgaaatatagacacacattttggggggatcatttaagactcttcagacttcctaaatgtgagctaagctgaaaagcaccagtactctaatcataaaggcaggtgagatatttcagttttgatggcgtggaaagtcagttaacctttaggtagggcttggttttgtttagcttttggcagggctagtggtttgaacggtcccagattattttgttccaggcagggcttttctgattaaattgcaaaaatgaaaatgcatataaacaacacagagagccaagttttaagagtgacattatgtgatttttgaacacagtatatagtacgaagtttcaaattaaaagtgatacttgtgtagcagttaggttaaatatagttcctctgtttgctttgctagtgtgaagtgagatacatgatactgaaatacaggtaggcacaagcctggagatcaggcagcctgtgtcaagtgtgcagtgcctcagcagcagcagcagcagcagcactccacaggatatattgaaaagctggggcggaatgtcctcccacacaggtgaggggagacaggtgaaggcaggtttgacactgaggaatagtaagagaagtaaattgcaccctcagagtacagcaatatttatagcatttgaataagatgttaaagaacattttcttttaaggaagaaattcctgtgggtcttcctcagtttcaatctaaactagttttattatactattacttcagcatgtggcacttaacctggccatagtcagtgttcaataaatatttgttggatgaattaacgtaaaaacacaaaaaactcagtataaaattaattcttggagttcttttgcaaatataaaactcagatatatgcattacataaaaagaaaatacaaaactaataaagttttatattaacagggttagttaaatgcaatagatgatgttttgccaaaactaaattgtctcgcaacatgagtatcatactgactgttctcaagcaggttcttttgaatttggcatgcggtactatcttgtgtcctgcaattattttatactgagaagctgttttttacatatcaagcatttgtataagtctgtcattaagccttggcacaaatacatcatttagttttaaattcacttctggtttttctcattagcccaagaaaaatttaaatgacactactgggtactaggggaaacgtaaccacaaatcacaaacttgagcaatgagtttgtgtgttagaacatactcggttcaggtgttactttttcagattatacattaaattaagatgcaaagttaaaaattttatatggacttacagccccttgataatacttccacagagccgcagttgagaaacactgctctcttggaaagggtgcagagctggtgtcagaagcagattcgagtcttggctctgccgctactcagctgagtgttgggtaaggcacttaacctacttggcctctcttgggtcttaggtgatggcgcttggtgacctttgaagatttgtctttgaagattattgttgcttttgaaggttttctttaggaatgttggactttccagggaggcttgggtccagcttcggagtttatttgattaattttttttttttttttactgttaatcatctttttacttacttttaagttgtacaattcagtagttgtttatttttatttataaatttaaaaatttattttttaatttttattttattttttgtttttttttttaaaaccagaacatttactgcatgactaattgttgaaattcttaagctgatcaaagtgctccaacagctgccctctttggtttaggtgttgtttcctcacggagtccatgcctgaatctgtggtgtacaatttttaggtgcctcgttcggccagtcctggtggcattttgtcttttagccttggcactccagttatacgtcctcctgcacttggcggggtagccacatttgccacaggtcaacttctgaaggtggtaggccttcacgccacagcggtggcacaatgtgtgtgtcctattgcaacactttccaaacggtcatctcacttctgtggctgagaccagagagacctttttaatttttttttttgagacagagtcgtgctctgttgtcctggctggagtgtagtggcgcaatcataacttaccgcagcctcgaccttccgggctcaagctatcctcccacctcagccttctgagtagctgggtctataggcgtgtgccacgcccagctaatttatacattgtttttggagatggaatctcgctcgccatgttgcccaggctggtcttgaactcctgggctcaagcagtcttcctgcctcagcctcccaaagtgctgggattatgggtgggagctcccgcccacactcggccaattcagtagtttttaatacatctacaaagttgtgtagccatcgccactacctaagttcagaacatttttcatcaccccgcagccttctggactgagtggagtcagcatgctcaggggttggcagcatctgttcagggggctcgaggttcttctttggtgtcttttcaagtttctatacctgtccagtactgaagctggaattggagattgaccttttgtccaagtcataacttaatatgctatttcctgaaactgcttttaagaaatgttaaggtgcaaatgaggatccagtttgggcccacatttttctaagttggatgaagagcagttgagtggagtttctagttgcactcgagactctgtactgtgcagacagtttattggtggagttgcctcaggataaaaatacccagctcttctcagtagtgggtgggagactttgggtgatggtgatttccgtaaaggagaagctgagcctggttggaaggaaaaaggaagaatatacggagaggctggcattctttagctgagtggatttaggcttgagctggagtcagaatcacctgggaggcttgttcaaacacagattgctgggccccatccccagagtttctgttccagtaggtcctgggtggggcctgaggatgtgcatttctaacaagtgcccaggtgaaagctcacttagaggaagaatctcagcctcctggaagtgtgttctaattaacttcactggactgtaggctcagctttgccatccccataccactcatgcatgttttggtgtgctttggctacataggttacagttgagctttctagagcttttttctcatgtctttagctagtaggcacctaaaagttgtagaatgcataggttttatttttggcatttatctgaagtatctgttcatgtcttgacatataggaagctcttttaaagtttgggtggcagtggagagggcatatagaagcatattctaatttttcaatgttttttgaaagggtagcatgaacaatagtctccccactccttcttcatatccgtttggctcaagtagctgaaaacagcagaaccttaaagctgagtgtcacagtctgcctgcctacctgcctgtctacctgtctacctgcctatccagctacctgcctacccaccttcaagtcttttcgaatactgcctaccccaggtttctgatgataaattctgttatcttggtaattatgaagttattttgaaggttttaaaagaagctcctaaaaaataacctaagttttacagtattagtgcttttagaaagctggaaaagcaagtgaagaaacaacaaaaagaaatcctttctagatggatgagaaaccacagatgggttggggtgaatgcgatgaaatagaaatgtgtgtttgggagagtgttttctctgtaaggaagaatattctctgtaaggaaggcaggctatgtggctttcatgaggtcttcttagaagcttctgtggtaatgttcactggtctggcgaagggggtagacttgaaaaaattgtaaaatggcgagaacctggaatttacatttggggagaaaagaaactgggaggcccttcagctctggggaattggacaaggtgaagcagagtccacatgtgtgtgtatgtgtgtgtatgtgtgtgtgcatgtgcgcgtatgtgcatgcatgtgcactcatccaggtggggcgtctgcggtagcaccgaggtggattctgaggcaagcttcatttggccctgagttcattttattgtgactccaaaggagttcatgggggaaataaaggctctcatgtgcaagaaacaaggaagcagaaaagtcatttgacctaggctagaaaaggcggccacctctagtctatagtcagaagagaagcagctgttcagaggggctgagacaggtaatgctggtcccaggccaagcctcttgaggaaagagaacaacattccgaaattctgtgagtagctcataccctgaaggagttcttttttttttttttttgagatggagtctctgttgcataggctggagtgcagtggcgcaatctcggctcactgcaatctccgctcactgcaatctccgccacccgggttcatgccattctcctgcctcagcctcccaagcagctgggactacaggcacgcgccaccatacccggctaatttttttgtatttttttagtagagatggggtttcactgtgttagccaggatgggctcgatctcctgacctcgtgatccacccgcctcggcctcccaaagtgctgggattacaggcgtgagccaccgtgcctggcaggagttcccttttaagatcgctgtaggaagagtcagaaggtcaaggacaaggcgccgaggtgcctaccctcttagtactttgtgttggggagtggaggctgtccagagaggctggccaaggggaggctccccctgggaagatggggatcttttttaggtggtgctgcaaagggacactttttcagagagacaaggggaaaacactcgcatatatttacttctttagaagttgagaaagttaaaagaatgggaagatgccatctgcttcccatttctgagaaagggtacattaaaatagcttgaaattaagcagaatgtataaaattaacgtctgagtatagtcatttcccgtttttcctgacacatctttcagctgtgtagcaacagatccgcattcctggtgtcagaagacagttgttaatgtgctagttaaaattttattttatttttgtactgttgagcaaaatttagacttaactctgttttatttaagaagcatttttgttaaatgctttaattattattaatcaaatttttttgtatttaagcagttttcaacaatctattcctcaagcaattcagagaacctgctgtgtggtgattatgtattttttatttcataaatgggggtagtgaggcataagtgttttggaattagcatttgtcatcatctaatatactgtgtaaattacatcttttcactgtgtattgtctggctgccactgctagactcttaagttccaggtggacagggatcttatgccaggtggacatggcatacatgtatgtatggcaggcactgttctaagtatatacaatagtccctggagtgtccagggactgttcattgaatgaatgagtaaagacttctgtcaacaaatatcatttagtctagtgctcaagtgggctgtaatactctgtttctgaattaaacagtctggcttggtgatagtcactgacagcaccaagcagatccatgggagctaccccagaaaagcttgtgatgcagaggagaggagcaaaatgtgcgctccctgtgtgcaaatggattcccacaaccacggaaggaagaactgcggcagacatgcttggttcttaatctcagactcatcagtcagggaattcactcctgtctaaggggcgagtgagggtgaggcaggaagccagcatgtcccctgtgaaggagctctttccaggtagaagcatgaagcccaggaaaggcaatttatacagcacatcaccaatagagagatggccaaaccactctgaactctaccatctgaagtgaacaatttctaattatgtatcttcagatttttttctttcagatttctttctgatatatgtatctacagatatttctctgtgccggtgtgggcattttttctatatttattaacccagaataggtttactgtacatgtagttctataacctggcttttctcttaatatgttatatatctgttaggcattttttgacagtgatccacagcatcatgtttgtttcttgattgactgagacagattctctctctgtcacccaggctggagtgcaatggtgcgattatagctcactgcagcttcaaattcctggacccaagagatcctcctgcctcagcctcctgaatggttaggactacaggcatgggacaccatgcctggcaacgttttttattttttgtggagacaggatcttgctgtcttgcccaggctggtcttgaattcctggcctcaaatgatcctcttgcctcagcctcccaaagtgctgggattacaggtgtgagccatcgtgctcagccaacattatgtttatcgactgtttattaatgttccatttaattttggctgggtatggtggctcacgcctgtaatctcagcactttgggaggctgaggcgggcagatcacaaggtcgggagatcgataccatcctggctaacatggtgaaaccctgttcctactaaaaatacaataaattagctgggcatggtggcatgtgcctgtaatcccagctactcgggaggctgaggcaggagaatcacttgaacccgggaggcagaggttgcagtgagtcgagatcgtgccactgcactccagcctgggcgacagagcgagactctcttaaaaaaacaaaaaacaaaaaacaaaaaacccccccaaaattccatttaatttaatgccatcatttatgcattcagcaatatttttgagggcctactatgtgccaggcactagttggagttgctgagggtataagatgaggttccaattctcatggagcttatcgtttagagggaaaacaatacaaaagtaaacaagtaggtgaggatttctgagtgtgctaagaacaaagtagagcagggtactgaggtgtgagcacatcagtagatttcgtaggaaaggcctttcttaggaagttatatttgagctgagaactgaatgataaaggaaagccagctacttgagtatctgggggaggaatattctaggcaaaggtaatagcctgtgcaaaggccctgaggcaggaatgtgcttgctttgaggaaatgtgaaaaaaaaagttgttgattggaacagtgtggggatctggcagatgagctgggtgaggtaggtaagggctagatcttgttgtgccaagtaggcataaagagttgagattttgggtcgggcacagtggctcacgcctgtaatcccagtactctgggaggccgaggtgggcagatcacctgaggtcaggagttcaagaccagcgtgaccaacatgatgaaaccccatctctactaaaaatacaaaattagccgggcgtggtggcacatgcctgtaatcccagctactcggaggctgaggcaggagaattgcttgaacctgggaggcagaggttgcagtgagtcgagatcgtgccattgcactccagcctgggcaacaagagcggaacaccgtctcaaaaaaaaaagagttgagattttgttttaagggcaacatgaagttattggaggatgagctattaggaagtgagcaacataatatgaagctttatgttcaaaggctttcttggctactgtgtggcagtcaggggaagcagagagaccagttaagagtctgttgcgataactggtgatcttggtaagaaatgacggtgggggtggagggagtgagaagtggatgtatttcagaggtggagctgtcaattcatgggattggatgtagggggtaaaggaaaggagaaattttgtggcctcagctactgcgttggtgctggggctcgtcagtgagacaaggaagtggagattaagagtgttcttctgggatgtcctggttgtgagatgtctgttagacaccagagtgatgatgttgaataggcaacttccataagtctggggagaggtcctgtctggagataaaaattggagagccgtcaatgcgcaggtgacatttaaagccatagactaggtgagatcacctgggatgcagaagatagatggagaaagggagactaagccccgagcagtgcaggaggagccagcacaggaggctgcaggggagccagggaggcagtgctgaggcaggcaggtgtgaagtggaagccaggagaaggacatgttttaaggagggtgcgtcacttttatgtttgctactgtaaccagttatcacaaatttagtggcttaaaacaacacagatttcttaactgttctgtaggtcagtcatctgacatgggtctcactgggttgccatcagggtgccagcagggccatgttctttatggaggccctagagaggaatctgtttccttgtttgttccaccttctagagtctgcttaatgttccttggcttgtggctccctccttcatccttgatgccagcgacgtagagtctttgtgaccctgctctcttctcattcactcaccctgacctcttctgcctctttcttccacttttaaggacccttttaattacgccgagtccacctggataatccaggataattttcctattttaaggtcagctgattaacaacctaaattctatcttcagccttaattcccctttgccttgtgatgttatttatttacaggttctggggattagggtgtgtatatctttggggttcctgttcttcctttcacagagggtatcacaaaggttactgggaagttggataaaatgaggacggagaagtcattgttggatttggtcaactgattagtaacctcaatgggtggttccagtggagtgttggtgcggtggcccaatgggagtgagttgaagagccagcgaggtgaggacgtggaggctacacatcttaatggttcttggtggcagttttgctttgaaggaaagtaaatagtggcaagaattacaaaggaaaagcacagaggacagctctgagaggatgaaatgggagacggaatgtggaacagaggttcagggacgactgctggaaggaaggggcattagtgtagtgtctactggaagagattaactggatgaagaacctggagtgaaaccaagaaatggtttatagggatggggacatatgaaagtgaaattcacagggttatttttaatagaacagcagaaggtactgatgactcctgttgcttgcgcctgggtcagtggacaggatccttgtcagcagccactacagggcccgcaagcccacctcagatgctgtcattccacgggtggtggccaaatctttgaagtcagtgtagaacctctgccctttcttcctggggagcctggatcagccatgatcttgcccagactcagcgccatggtggagggacatctcctttcctctcctgccccccaaccacttcccttacacttctgctcttctctcctcacccgctaaattgtaggcctgcctccatttctttctttactttgttacgttttaataacatttattcactccacaacatgctcacagaggtggaagaccaagttagtgcagacccattcattcctggacccagtggctctcaagtgggagaggtgctggtcttaaagggtgtttaggaacaagtgggcgtcatagtgagtgtaaaaacgccctcgccgtgaggctcagaagagccaggcctcctcctgctcctagtccagtcagtgctcctccttcatatgggtggttcgcagccctgctgcatgttagactcaccaggacagatttgtaaacatatcacgacctgggccctaccacaaactaattcaactggagtctcagggatagggcccaaactgaggattttaaaaagctccctaggagattctgaagtgcagccagggctaagaactacagccttaaatctactgttgactgctttcaaaagaagtcttcactgtgcttaaacaaattgtggttaaaagtaagcaaaagggccaggcgtggcggctcatacctgtaaatcccagcactttgggaggccgaggcaggtggatcacctgaggtcaggagttcgagaccagcctggccaacatggtgaaaccacgtctctattaaaaatacaagaaaattagctgggcatggtggtgcatgcctgtaatcccagctactcgggaggccaaggcaggagaattgcttgaacccgggaggtggaggttgcagtgagctgaggtcgtgccattgcactccagcctgggtgacaagagcaagtctccatctcaaaaaaaaaaaagaaggaagcaaaaggaaatctggaggggaacatttgtaataggcaagtggtcattattaaatgtacagttatattattaaaatgtagatcatttgaatcaactgacacgtctgaatttggattaaaactcctaagcagtatacggtactcaaagcttggtactggtagggcacagtttgttcatttctgtttttcacgttgccttctttacacttttttcctttctgaatagcctaatatgacgaagcagctatttgtaacatgtgggaattattttttcttcttttcctcccatagtctgtctccatctttgagctgctgttctttctacagcttaaggttcttagatgtccattccattccctacccagtcttggaacactgtgagatgagcattcctgataagtggtcatccaatttggaaagacagtattttacaaggtgatcagtttctgaggaatttcagttagaaaactttgtgtttttggtttggtcagggaaagatccagaaaagtgatcaagaggttagctcaaacctgatatagggagttctcagaatagagattggctgttaatggtctcttataattttttccttgaggatagttttattagtatgagagtaacttaaccatcctcattgtgcagttcttccgcctcagtctcccaggtagctgggattacaggcacgcaccaccatgccctgctaattttagtatttttagtagaggcagggtttcaccatgttggccaggctggtctcaaagtcctgatctcaggtgatccacctgcctcagcttcccaaagtgctgggattataggcatgagccactgcgcccggccccaaacttttttataattctctatgacattgacatactcccacaacagcttcagtataatttagatgcccttatacatctgcgtggccaaattaaaaaagacaccatcaggtgtcagcaagaaacagagcagggggagctttcatgtactgctgatgggaatctacattagtttaaccactttgggaaactagaattatctatgagagtggaagatttgcacaccataaagcccagcagttctactccttatgtatattcttgacagactgtatagctgtgaaaactaatgaattgatgaatattcaagaagtgagtaactctcacaaacataatgttgagagaaagaaaccagacactcagaatatatattgtttgattctgtatacaggttcaaaacaaaggcaaaattaatttatggtgttgcaagtcaggagatgtagttacctttggagagtagggaggatatattagcagggcttctggggtgttggtaatgttctttcttgatgacaggtgtgatacacatgcacacatacacacaaatatatttacaatttgtgctgtttcctgtttgtatataatattttaataaaaagttcactgaaatggggctgggcacagtggctcgcgccagtaatcccagcactttgggaggctgaggcaggcagatgctggagcccaggagttcaagaccagcctgggcaacatgacaaaaccattgcattacaaaaaaaaaaaaaaaaaaaatgcaaaaattagcccagcatagaggtgcgtgcctgtagtcccagctacttgggagcctgaggtgggagaattgcttgggcctgggaggtggaggttgtggtgagctgagattgtgccactacactccagcttgggtgacagagtgagagagaccctgtgtccaaaaaaaaaaaaaaaaaaaaaaaagtttactgaaatggtatatggtgtagagtagattattgaacagcagtgagaaatgagcaaaatacagctacatgcagcaccatagaagaagattctcacagaatacatacgatcagattctagttttctaaagttcaaagagtcaatgctaagctattgtttaaggacacataagtaactcgtggatatcagtcaggattcagtcagggaagcagaaccactgtattatgtaataagggatttattttttatagcaataagatattttacaactgtggggaaaagctggaaaaatgacagtctggaaggaagaattagaggaccagagaagagccacgaaagcacctctcctgaagcacctgtacgggtggctgagttagaacttgtgggaggctctgagaagccaggcatgagcagctgctagaacgggaccacaaaggaaagctgatgaaaaagtctatgaaaagctattacctctgcatagcaatcacttctctaggtctgctggccagcagctgatggtccaggggcttctgttcgctgacaaggccggcagttgggggaaaaagctagtgacagaagcagcacgtggacaagctggaaccctctggcatctccgtttatatctgctaccacctctaactacctcggccctcaggaagtaatggtggttttacttttcgctttttaaatcttgtccagattcagggaagggaatcctgagaaaattctagcctaaccaaattgagttaaaagctgcaatagtgatggttgcacaactctgtgcatatattaaaaaatatactttaagtgagtggactttatgatttgtgaattatatctcaataaagctgttatttacttaaacaaaactgccacatgttgaaaactttaaagaaacaatgttaccatggatgatttaagtgctgcttcttggagatatggaagtttcagtttagtaattgcttcttagcaggttgtatctatgttactctacactgctattctttggaaagctagagcgtagtaactaagatctgtttgttaatgacagacctcaaggtctcctgacaggtctgggaataagttttgaaaataggttaatgggatattgtattagtccgttctcatgctcctagtaaagacatacctgagactggataatttataaaggaaagaggtttaatggactcacaattccacatggctggggaggcctcacaatcatggcagaaggcaaaggagaagcaaaggcatgtcatacatggcagacgagagaatgtgcaggggaactcccgtttataaaaccatcagatctcttgagactcattcactaccatgagaacaatatgggggaaacagtccccatgattcaattatctccacctggccccgcccttgacacatgggaattattacagttcaaggtgagatttgggtggggacacagccaaaccatataagatacattttctcacttttcaccatgtatatttggttttaaaatttgaactaggatttctttacttatacttaaaagtaggttttacagattcattaaaactttcatatcaaatctgttttgataatctgagatattctcatcatctcaaactattggaaaatgcccttatctactctccatttacgtggagccacttttcatttgaatgtttgttatggctctttttattctctttataaggagacaattgcccaaataaagatatgcagctttcctgcctggggctgtagttgtaccatagtaaggaaatggatatgaaggttttttaaaaagttcaaaaacagagtagcttgtatcatttatatgcaaaaactagaaacatttttagctgtagttacgaagacttctagctttttgtcaactttttaactaaaaggagtcccaaaacacaggttatttctacatggattaaatttataataataaagaatcattagtattactaaaccatattgacagaattcttgctaaaactaggctagacagacaaggatggatactgaaggttgacactgaagacctagttgggaagaggattcagaggagcttggctagagtttggtcaaggagacactcttggtcagtatgtaagtctggctaattggaagtaaataaaaggcagccatagtcttggagggaagacagacataaaaaatgattgcaatatggtataaaaggtataatagaattataaagtatgtgtgtataagatgtatctgcggcaaaaaggagcagtgatggtctgcttgagcacatgaaggatggatttttttttttttttggagacggaatcttgctctatctcccaggctggagtgcagtggcgccatcttggctcactgcaacctctgcctcctgggttcaagctgttcttttgcctcagcctaccgagtagctgggattataggcttgtgccactgcgcctggcttatttttctactttttagtagagatggggttttgctgtgttggtcaggcatgtctcgaactcctggcctcaagtgaaggatggattttttttttaaaaatgacactaaagctgtattttgaagatgattagaaagtttgctaggcagacaaagagaatcagcaagaaaactttctgggctgaaggtactacgtttagtcaaactattaatacttcctttcctgtgcaaaggaacggaagaaggaagtagtttgagttgcttggataattcgctatggctagtttagggtttaaggagagagatggatgagttaaggttagagagtagcagctagatcatagaaggctatgtatgccacgttgcgtttaaattttgtttttttttttttgagacagagtcttaccctgtcacccaagctggagtgcagtggtgtgatttcggctgactgcaacctctgcctcctgggttcaagcaattcttcctgcctcagcctccctagtagctgggattacaggcatgcactgccacccccagctaacttttttttttttttgagatggagtccccctctgtcacccaggctggagtacagtggcgggatctctgctcactgcaacctccgtctcccgggttcaagtgattcttctgtctcagcctcctgagtagctgggattacaggcacgcatgtggcacccagctaatttttttttttttttgtatttttagtagagacggggtttcagcatgttggtcaggctggtcttgaactcctgacctcgtaatctgcctgcctcagcctcccaaagtgctgggattacaggtatgagcctccgcgcctggcctaagatttttatttctagtagaaaaagagtttcaccatagtgaccaggctggtctcaaactcttgaccacaggtgatccacccacctcaccagtgtgccaggattacaggcatgagccaccacaccagcctgggtttacattttaacagatttttttgttgttgttttctttgaaggtctcactctgtctcccagcttgatcatagctcaccatagacttcaactccttggcctcaaacaatcctctcatacctcagcctccagcgtggctgagaccacaggggtgcaccaccatatctggctaatagttttatttttattttgtaaagacagagtctccctacatttccccggccttgaactcctagtctcaagtggtcctcccgtttcgtcctcccaaagtattgggattacaggcataagctactgcatctggccttttagcacagtttaatcagaagaggaaaatgagcagatttttattttatgcagttaccctgtggaccatgtagagaatggtttggaagaacgctgggagtctggtgaggaatccatcccagaggtagtaactaagacctgtttttagacattggcagtagcgaaggatctgacttgggaggtagagttagtagcatttatgtgacctctaagacgtgatcctgtcacactttttctctactctgttaggttcagtacttgagggcctttgaattaaactgacagatgatagattagcaagagaaaaggtagattttaattttgtaaatacttaggggagttcacaaataaatgtgactgaaaagagttgttagaatttggggtttatgcaccatcttaatagatgaagaggagagggagaaagggtacttccgggaaaacaaagaactatttggaaagataaatgggctcataggagaataaatggaagctgtatattttcgtgacattttctgtttggttgtcttctcatctcagatgattagagttgcccctgtgggaaagggttcatgacaattgagttctttgagttcttttgggaggctctgcttttaggcagataaggggtttcaggaactcaaatgccttcagctcaaaataatttttatgctatagtggcttattctggatcctttcacggtgaaggagaggagaaattcctgagattctggtttgagtgatggtggtactgtagataatgaaatacataaagaagagcaggtttcaggacatactgtattttcatttgtatggttgagcttggagcacctggggaacatctagagatcctagaaagcagttggatgtagatttgggacctagagagagctcaaagaagctgagagtacggataaaattttccttggagagtaggagaatgagagaagaaagagcttccagaaatgaactgaaggaggctggaaaatgagagaggatgaaatgagagaggggacatagaaaggaaattgagcctacaaaggagactaagaaggaatagttgaagatgaggggagctgggagagttacagaaaccaaggcaggacatagtagcaaggagactgagcaatagggatcagcagtgccaaggtgcagagtaaaattatagaagtgttaaggaaaaaaaaaattatatatatatatatttagtatatgataaaggtacagttttgaggaggaaatggagggctgtttatttaaatggacatttgggacaattggcttaccacttaaaaaatattaggttaggccggatgtggtggcacatgcctgtaatcccagcactttgggaggctgaggcaggaggatcacttgaagtcaggagttcaagactggcctggccaacatggcaaaaccccgtctctactaaaaatacaaaaattagccagatgtggtgacgcatgcctgtaatcccagctacttggcaggctgaggcacgagaatcacttgaacctgggaggtggaggttgcaatgagccgagatcatgcaactgcaatccaacctgggcgacagagcaagactttgtctcagaaaaaaaaaaaaaaaaaaaagttagtttaggtccccacctcatgccttataccaaaataaatctaaaaattaaatgtagaaattgaaaatagtaaaaatattaggagaaaacgtgggtcaatacttactttgtgttcaagttaggaaggaccatacccattctaattataacagaaagaaaagactaagaaattttcatgtaaatccagcatgtctgtgtgctaaaaatatcataaaattaaagtgtaaatggcaaactaggaaaagtatttgccatagatttgacaggcagaggtttaatatccttcatatctaaatgatctatcaaaaaaatgaataactgaaggtttctggttaagtaggactcattgaagatgtctttatcttccatccttccaaaattttgataaaatgacaggaattacagaaggggtagacccacaaagagtgaaaaagggagagtagggaagatttttctggttgatgatagactaagttgttgggccttatttcctgctgagagcaagtcgagatgatggacaaaatttaaaacaaaatttatgtgaaggaaatggagagttaacaaaatagtgaagatttgtgggtgtaagaggtggggcgtggtgatgaggtagggaagcccaagatgtgagaccagcatttgcagtcatttctttcccagaggaatctgctcattccagaagaattaggcagatgagaagctggacggctgaacagagtttttgttagactcagagggcggaggacaaaaattggagtttggctcagatcagggagcaggaaaacttcttaggctttgagtaggagacccaaaagcctatatcttagagatagtagctcctaacaggtattgaagtccagctccagaccctctcagttcctggctggatcaaggtgttctggaaagaagcaagtataatttctttcattaatagaagaagataacatcactcagaacctcagatgagctctatgtttatttacaatgtttggcactcagaaatcaccaggcagatgaggatttaagacaatgttactgaacgccaagagaaacaacagactatggaagtggatcgacagggatccagatagtgaagttattagaaaagggtaaggtatgtagtatgtttacggagttaaaagattaagaatagggaaattggaaccacaccaccccctccccagtagaaaaaccaaatgtaaactgtagagttaaaggactgtaaatgaaattaagatgtcagttaatgggtttagcagtacattagtaataagtagaaaacaaatgttcagaatgaaatatggaaataaaaatggtctggacatacattatagagtgagtcttagggattctgtggaaaggtctaaccaacatgtaattgaaatcctagtaggaaaggaaggaggagtgctgcagaagcagtatttggagtgatgatagctgagaattgttcataacaggcaaaagccatctcatcacagatttaaaaaatactaccagaaatctaagataaggagaacattttaatagtaaccagaggccaggtgcggtggctcactcctgtgatcccagctctttgggagactgaggcggatggatcacttgaggccagaagtttgagatcagcctagccaatgtggcaaaaccccatctctactaaaaatacaaaaattagctgggcatgatggttcatgcctgtaatcccagccacttgggaggctgaggtgggcagatcagttgaggccgggagttcgagaccagcctggctgacatggtgaaaccctgtctctactaaaaatacaaaaattagccgggcgtggtggtgcacgcctgtaattccagccacttgggaggctgaggcacgagaattgcttgaacccagaaggcagatattgcagtgagccaagatcccaccaaagtactccagcctaggtgagagtgagactctatctccaaaaaaaaaaaaaaaaagtaaccagagaaaaactacgtactacattgaaaagagcagtgagattgacagctaatttctcaatagatgtaatagtgcatccttctcagaaggcaatgaactaatgttttaaaaatgtaaaaaagaaggtaaacagccaaactagaatgttatacccttcaaaagtgaggacaaaattatcacttctttagatcaacaaaaatgagaaggatttaaaagaaaaagccaaaaccccaattctctttcttctacactcacaaaacttctcataccaaatgtgtagggtttttttcataccaaccaattctccagttctctgtggactccgggtattctgcaatttaactcaatttggatactaactgcctggaattacttgcttcacaggttgagagcttggcctcacaagattgcttagaaaccaattgcaagtccaggtctccgatatttcttaccgactgctatgaagtgattcctataaccccctcctcagattcagtgatttgctagaatggctcacaaaacagggaaacatttacctaggtttacctgttgattatacagaatacaattcaggaacagctaaaagagagatgcatagggcagggtatggggaggaactcagaacttgcacaccctctccaggtgagtcaccctcccagctcccctatgtgttcaccatcccggaagctgtctggactctgttgtttgggtttttatggaggctctattacgaaggcatgattgatcaaatcattggccattggccgttggttattgaactcagtctctaacctctctcccttcccaggaggtggtggggtggggagcagagtgacaggggatgaaagtctgaatcctctaatcacatgattggttgctttggtaaccagtcgccattctcccgagagtcctctcatcataaactcaggtatgtctgctcttcttactaccgtgtttcagggctcaatgccaggaacttgaaatgaagaccaaatatatgtttcttattatatcacagtatcacagagttaattacaccagacctgcactaaagggaataatagaaagattggtctttggcagaagagaaatgatcctgcatggcagctttaagatgcgtggaaaagtgaagaccaaagaaaggagaaataagatggtaaatgtaaatgaacactgttgggtaaaataattatttgtggtttaaaatacacatagaatttaaaaatatagtagtagcatataagttgtgggggtgttaaataaaagttaatatcttacggtcttttcattgcccaggaagtggtaaaaatattaatttacttgagactttgataagtcaaggacacatgttgtaatctctaagatagtcattaaaagagtagtaaaatatatgtaattaacaaattaatagaggggaaatatggaatagtaacagcagtagtagtagtaaaacttgattaatctgaaagaaggcaagacgaccaaaaacagaaacagagcatgtgggaaaaataggaagtgaacagtaagttgttagatttaaacttagtctatcagtaattatattaaataaaaatgaaccaaaatttctaattaaaaagcaaagattgggaaattggataaaaaatcaaagcagatcacaactctgtaccgctttcaaggatgtagaaaagttgaaaataaaatggtagaaaagccatattactcaaacattaaaagaaaactggtgtacctttattaacaaagtgggctttagggtagaaataattgcttgggataaagacatacataatggtaaaatactcaattcagttctccaggaagttacaacagttctacctctgtatgtacctaaaaacactatctcaaaatacataaagcaagaattaacaaaaatgacaaagaacagacaaatctgcaattcatagtggaaagttttaatataccgtcttcattaactcagaaacaaagtatcagtaaggacatagaagatttccataacataatgaacaaacttgacctaattgaaatctcagtgggtttatgtgtaatctagacgtactactgtcctgtgcttcataacgatgtttcagtcaacaagggactgactaaatatatgatgctggtctcataagattttattggaactggaaaattcctgtctcgtagggatgtcatagtgtcatagtgtaacacattactgtttctatgtttatatgtgtttagatacagatacctatcgtgtcacagttgcttgcaatattcagtacaataatacgcagattcatagcccaggggcaataggatataccatatggcttaggaatgtggaaggttgtactatctaggtttttgtaagtacatctttgtgtaagtacgtttgtgtaagtacattgtcatctttgcacaatgatgaaatagcctagtgatgcatttctcagaatgtatccctgttgttaagcaacaaaagactgttgaaaataagatacattcaaaatgaaatatggaatataatgaaatatgaaatacaacactgcacccaataactgtagactgtacattcttttcatatgcatagggaacattgatcaaaattgttgatttatagagtaaatctcaacagatttcgaaagactaaattcagaatatcatacttacaaagacaggtttaatatttgaaaaattgatcagtataaatcactaaattaatagagtagagcagaaaaatcatgtgataatgtcagaggtgcaaaaattgcctttggcaaaatccaatacccattcaaaatggaatctcttaatacattatgaatgaaagttaacttccttaatttgataaagattactcagaaaaatcctatagcaaacaccatgtttactggtgaaatgttggaagttttcttttgagacagggaaagagaagttgttttcactgtcaccaattctgtttattattttactggaagtcctacctagttgagtatggcaagaaaaatagtacagggatgagaaagggaagaataaaactgtgattttgtagatgacatgattgtatatgtagaaaattaaaaaaaacctctttataacttattataaataataagctaggttgcaagattcaaggtaattctggacacaattgcaattttatatgccaacaacaaacacaaattccaaatttgtatcaatctggatccaatcaggagagagaaaccagttgtattagtttgtcctcatagggctataaagaaatacccaagactgggtgatttataaagaaaagaggtttaatttgttcatggttccacaggcggttcaggaagcatggtgccggcatctgcttggattctgggggaggcctcaggaaacttacaatcatggcagaaggagaaggggaagcaggcttgtcttacatcgccagagcaggagcaagagagagagagaggaggggaggtgctacacacttttaaacagtcggatctcctgagaactcaatcatgagaacagtaccaaagggacggtgctaagccattcgtgaaggtgcacccccatgatccagtcacctcccaccaggccccacctccagcactggagattacagtgtggacatgagatttgggtgtggacacagattcaaacttcatcaccagtaaattgaaagcagcgtttaatgtggataattactaattataacagggaatcgaagtaaggagggatttggttaggctagtgaaaagtgaagagaattgtaaagaatatgaaaatagcagataaacagagcaactgctgcccctggggctgaggtagagtctgcaaggaagagtctctccttcccccaggaccaagatccagacctcatccagagagggcatggctggtttactgcatggccaagaagttgctggcatgtcatactagtggaacttaatggaaatccaccctctgatacctgccagaagttgctcactagggcgccacacaaaagctcttcatggggaggtgtctcactggaggtaccctgctacaaaacctccagagtgggatgctggggggagctgctggctgctgggtatggcctgctgttgtgtgctgtagtctctggaggctggagcagctgcaggtgcttgtagagatgggtactggagaagccacctgcgttgcaggagctggacgccatacaattaacacaatgtagagcaatctggaaggctgtatatatcaagatggccaagatggaaccagtgtttttttttttttttctctgtgacagatagaattatgatgcttccccctgccgcttttttttttttttggtattcattcagcatttatttaatgaatgttgagtattttctctattccagacaatgtgtttgttacgagatacataacagcagacaaaatagacattgaacttgtttttgcagtttataggctgataggacagtcagtcattcatctgagctcttttgtgccaggcactattctagtcactggggggatagatggatagattaaatagattggttagatagatgggatggatgtatggatagatagatggatcaagataaaatcttgctttcaaagggagacagccattgagcagataattaattataagaatgggtacatacttacacagtgctataaagggtgtaagaaggaaaaatacaggctgctacaagagaggacaatgtaattcagatgagaagccagggcagacttctcttagaaagtgatatttttatgatgaaagtgatgaggaggaggttagcttggtgagatgagtgatcagagaagaatgatctagatggaggggaggcttgcgggcagacttcatgatgggaagagctcggcatgtctgaagtgaggagtgggaggtctctagagggtagggggaggtagagagtggcaggagaagaggccacagcaggggtcatgctactcacagccataggccaccttggaaactagggtgtccctgtgaagggttgcccgtgatagaggtctgaaataggagattcttggactgttttgctatttacagccaccgtgtggggtgctgagtggtcaggggattggaggcaagaatggaagttgagagaccactgggtgcaatttgcaggaatccagtgaaagttaacggtggaggtggcgccaaggcccagcagtggagctggagataactggatggcttggagatggggtttggaaatagagtcattcagaactggtgatggattgagtgtgggctgggagagacagggagacattgagaataactcccaggtttctggcttaagtcattacatggcatgtgatgccattttctgtgtacttttgtagtgaatacgaattacttgttcaattaaaaaagtaaaataagtttggatttgcagatgaagaaggctttggtgaccaaacaaacaaaaccaaagcagttgcagtgaaagtgaagaggtggagatagttgctacagactactgcagttctgcatcttcaaagaagccagaaagtagcaggcaaggtagggtcgggctgtaggacaaggacatgtgttttgtttacagagtaggatagatgtgagcaactttcattgggagagagagctagaccatagagggaagagaaggcattcgttaactcaacaaatatttgaatgtctgtatgacaggcaatactctaagctcttggaacatacaaaacataaaaaacattcctgtcttctggagcttaatgttctaaagtggggacactgaaaatcaaatcatgtgccgagtgcactgtaaaaagaaaaaaaaagcctattaatggggagatctagggatgttgaggtgggacggccagaaggatgtaattttatgttgtgggtggcactgatggatttgatgccactagaatgcaagatatgccagggcagagattttagttttactcactgctgcatctccagtttagaatggtgcctggcacatagtaaatgctcaataaagaattgctgtgcgaatgaattaatgattcaggatcccaggaatgggaaggaatgaggagtgggatactgaagaaagaaagataggccagtcataaatgaagacatattgtagggatgttagtactgatatctccaattcaaattacagttgtttttgcttttaaaggattttaactgttcaattgtattttgaattctttgaattagctttgtttcatggcattcattttgtttactgtatgtttcttagacacagtaatatagtttacagaactacttatccttagggacattacccacttaagaagtgactgttttcagtattattacaataaaattgagattacatatcactttgtatattgaggttctgttacaacctgtcttttcagcattatccttaaagtggtgtgtgtggtggtggtggtggtggtggtggtggtgtgtgtgtgtgtgttggggggggggtgttgtgattgttttatgcccattacagaaaccagtttagccggcattatactggtgtggttatatattaaataagttaaatttcttgcagctactcttttgatcagttaattggtctgatcctatagtgggtattttcatgggtctctgctaagtttagcctcacaatgattttgtgtgtctgaaatcgtattgacaggctgtagctccttctaatttatgcatgcgtgaagaagattgtcctctatttgctgagtcttatgcttttatatgaggaccccagtgtcgtaactttgccataactcaggaagatctaacttctgactgtgcagtatagagcattcctttgtctaaaaaaataatatggatgttttaagaccattcagtcataactggaagctgccttatagttaaaggactttacatattaatgaagaaagggaacatacaaatcattatgtcctttttgccatagattgctgtcccctcccatagaaattatcttattatattttattacaacagtgtatgtaaaatatatacttataaaagtaataaatggtctttgaaaaattctaataacaggagtgtagagattataaactgattttatcctaaaattgtacatcctaggagataaccattgtgagcaatttgatttatatccttttttggactttacaaatgcttgtgtaaatcgcgtgtgtgttgtatgtatatatgtttgagtgtacatacaagaggaatcatatacagcttccctgttttttcctccccatttatacaccatgttgtggacatttttgtgtcagtgcctgtgtgtgggtatgtgtgtgcataaagacatagcacgggtatgccataaaaagttttcagccaatcccttattggttgtcgtcatattttgctcttacaataagtgatgcacttaacatctccagttatgttctaggacagaagtgcttgtcagagtgtaaatatttgacatatgcccttagaaatgttgtaccaggccaggtgcagtggccactcctgtaattccagcagtttgaaaggtctgggcagaaggatcacttgagcccaggagttcaagaccagcctgggcaacatagggagacctggctttacacaaaataaacaaaattagctgggcatggttgtgcgttcctgtggtcccagctgctcgggaagctaaggtgggaggatcacttgagcccaggaagtcgaggctgcagtgagctgtgatcgtgcgagtgcaccccagcctgtgcaacagagtaagtccgtgtctcaaaaaaaagaaaagaaaagaaatgttgtagaataccaatttggactctcattagctaaaagtgagagcatccatttccccaaacccttaccaatggtaagtgttgtcagtcttttaaatcctttctcagcccaacaggtagaagactcagatctccttttaatttacatttctttgtatattcctgcaatttagcatggtttgaccatttatgctatttttttggatatgttactttttataatagtcttcagtctttttttctagtaggttcttcgttctttttctttctgatttctgtttttcttttaaaagaagtatgtataatatttctccctttagtcatctgtatttcagtcttagttttcttaactcattatgtcctcatgccaatcctatgagtcatgctcccaaactctgaatctttttggccttgatggcatgtgtacttggtctttcccacaccagtaattaagtattctccctagattttcttctttgttttgaatttttatccttagatgtttaatatagctgaactttttttatatgtgaatgggatgagttagagctctaatttcatttttctccaaataagatggttattattgagtcattgatcattttctactgatttgagatgttgccattaccatgtgctaagtttccacaaatatgtggttttttacctgaactccttgttcattgatctgtttattctgtgcctacaaaattaccacattgttttttctttccttatacactgatttagtttttgtcattctaacatattgtaaagaggaaagtattgctcctattctgttcttaaaggtctatcagggccgggcgcaatgactcacacccgtaatctcagcactttgggaagtcgaggtgggcggattacttggaggtcaggagttcaagaccagcctggccaacatggtgaaaccccatctctactaaaaatacaaaaaattagcctggcgtggtggtgcatgcctgtaatcccagctacttgggaggctgaggtgggagaactgcttgaacccgggaggcagaagttgtagtgaccccagattgtgtcattgccctccagcctgggtgacagagtgagactccatctcaaaaaaacaaaacaaaaaaaccaaaaaactgtcagaagtggagtgtgacttacttttttttttttttttttgggtcagagtcttgccctgtcacccaggctggagtgcagtggtgtaatctcaactcactgcaacctccacctcccgggttcaagtgattctcgtggctcagcctcccaagtagcaggcacatgccaccacgcccggctaatttttgtgttgttggtagagatggggtttcacctcgttgtccaggctgttcttgaactcctgacctcaagcgatccgcccgccttggcctcccaaagttctgggattacaggcatgagccactgcgcctggccatggagtgtgactttacagtagagattcatttgtctaacatctctgttactggtttcagtaagatcacatcatcttttttgtcctttggcagcagaagttgtaggttaacgaaaactaaagcaacttttcttgtcactgagatggaattgaaatgatctctaacccatacttcttcagccatgacttctcacatcttagaacacattaaaaataagaatatttgtaggacgtactggagaatgaatgagtatccttgaggtcagaaaccactggtcaggggttagcgtggcttagttcccctcacaaggcacgtgtaacccatttacattgaactgcatgtcagtagggaagtgtttaggaagtgctgctgtaggctaatgttcttcaactttaaaattttctcatgacacgtcattgtagcttgatatggattggccaaactgctttaaaaaatttttaattgtggtaaaatatacatatataaaatttgttgtcttaaccatttaaacattcacattgctgtgcaaccatcagcaccatccatctccagaactcttctcatcttgtaaaaccgaaactctgtacccagtcaacagtaactccccattctccctacccctcgcccccggcaaccacccttttactgtctgtctgtatgaatttgactattctaagtacctcataaagtgaagtcatatagtatttgtcttttttttttttttttgagacggagtcttactctgtcacccaggctggagtgcagtggtgcaatcttggctcactgcaacccctgcctcccgggttcaagctattctcctgcctcagcctcctgagtagctgggattacaggcttctgccacaatgcctggctactttttatatttttagtagagacaggatttcaccatgttggccatggttggccaggctggtctcaaactcctgacttcaggtgttccacctgcctcggcctcccaaagtgctaggattgcaggcgtgagccaccacgcccagcctagtatttgtctttttttgtgactggtctatttcatttagccttatatcatcaaggttcgtccatgttggagcatgtgttagcctttcctgccctttaaaggctgaattcgttatgtgcacaccacattttgttgatttgttcatccatccatgggtgcatgggttgtttcagcctttgggtattttgaataatgccatgaacataggtgtaaaatctgagagccagacgtcttgaaagagttttgttttttttctttcattttttaactattccaatttgaatttagcttccattattccgccaaaccttctttcttagatcactattaagtagaaggaacatttttcctttttaatgatttttcagacatactcacccactttggctgtgccatcctcccttggctcttgggatggtgcatgccccctgtttctctcccacttaggagatttcctttgtgaccctcctctcgcatcatttaaaggtggaatttccccagagcttgaccctgggccttctgtctgtgaccattaaatgtgggtatttctcagcaattagagcgaggctcttttcttttcccttgttttggaaagaagagagtcaaaaaagcttaatcaaataatctcatcttttacccaaaaaagataactattttcttcgggaaaaaaggtgacaagaatataaatcatcagaattacactaatttgtttctgaaggaaatgataaactttcccccagctttgttgaggtataattgacaagtaaaaggtgtatatgttcaaagtatacaatgtaatttgatgtgtgtgtacattgtgtaatgattagcacaatcaaccagcacgtccctcactatacggtgttttactgtgtgtgtatggtggaggagaggagtgaggacacttaagatctgcttattaatttgcttagcaaatttcaaataaacaatacagtattattagctgtagtcaccgtgctgtacattacagccccagaaaatattcatcttataaccaaaagtttataccctttgaccaccatctccccattccctccccaacccctgtgagttcaggcccttctctatattccttcttattctaggtgacccccatctgcttacagagatccaatctgctgatggctcctaggtttgtttcatgaggtcagagctctttgctgagccccactccagagctgcctccttgctgtctatgctgagtgtctgatgggtgctccagcctcatgtctgagatagagcttcatgattttcctcccacgtccccttccgtgttctcagtgaagggtacttgagcctcccaggcgatcaagtcaaatttcagggatcagttttaaagtaaactttttaatttaggatagtttcagagttatagaaatgtctgaagaatattaaggagagttcctgtgcactccacacctgtttcccctgctaacattactgtggtacatgtttcacaccagtgaaccagtaccaacacattatttacactgaactctacacttcattcagatttccttaattttcccctaaagtcttgttctttttcagaatcccattcaggatgccacgttacatctagttgtcatatatcttcttaggctccattagactgacagtttgttagatttcttcttgtttttgttgaccttgacagactaagtattttatacagtgttcttcaatttggatttgtctactgtttttctcgtgattagacttggataatgggttttggggaaggaagaccacagcggcaaagtaccattctcatcacatcatatcaagggtacctgctctcaacatgatttactactgatgatattaaccttgatcacctggctgaggtagtgtttgttagatttcttcactgtaaaattactgacatttttgacactttcctcttctttttatctgttttgaatccaaaacaattcctgctggttctttttcccaaataaatttccattctgtccaagtcactctttgcagccactgctgcagtccaagccacaattgcctgtgcgcagacggtattgagcgatcttctgactcatgccctgcttgtgcccttgccttctccagcccagtctccacccagatgccaatgtggtccttttcaaatgccagttggtcagtggtactcttgttcccaagcctttgagcggcttcttgttgtacttgagataccaccccaccttctagacacagtctgccaggcctgcttaagctcgtctcttgtcacctctctcatctcctgccaagcccctctcgccttgtcctctgttccagccaccggtttcttgcccgagtcccttcaacactctcagctcccttagacatgtcgttgcctctgcttagaatgatggtcgccctccaccttggttcccttgggaccccagcttacatgccatttacatgttgtttcttcaggggacatttcccatccacttgcagggtccatggggcactcttgctgggtgtttctggagcatgccacactgtacccctgatgctgggagttacttgttctatgtcggaattgttcctcagtgctggggtggacaaggctgagacgtgcctcggcatgtcactgtgtgtccctgttacctgtactgagcctgtgccagagtggatgcttgataagtatttgttgactgggtgaaattttttaaaaattaaaacatttttaatagaaatggggtctcactatgtggcccaggctggtctgaaacttctgggctcaagcagtcttccctccttggcctcccaaagtgctagaattacaggtgtgagccaccgtgcccagcctgaatgggtggattttatcttttgaatggaaaacactcttcatttttagcatgccagtatgcaaaaaagtacttgaatttatttttcttagtccattgatttaaatcccacatgtattcttttaaatctgtcacataaggtgctgtggtgggtacagtagtggatctagaaagtgtgttcagcctctgccactcctgagggcccattcattcattctctcattcaccagacagttactgggaacctgggtctgccaggcctagtgcagagtgtggggttatgagggcttgtgagtgagcctgttgagggagagggagaaacttatagatccttcagcatttccagttgtggttaggatagatttgggcggatttagtttgaattctggctctaccatttttaagatctgcactcttgagcttaacctctacccgtctgcaaaaatgtgggcagcattgtctcccttgtaagttgtggaaagaatcagctaagaaaaggaatgtaagaggatcagtataatcatagtaatcacagaactaatggtttttgcctttgaggtcctgagtactagcctaagtagttacattaattatttttgtttattctcacagcaactctgtgaggtagggatgttactgttctcatgttgtaaatgaagaaagtgagaccttagttgaaaaattaaatactttgtccaaggcacagaagtagtaagtgggagagctataacctgaacccaggttcaaggacggcgtgattttaaagcccagaaaggactccttacattctgtgtagctaccccatcttccagtgtggctttattctttaaagttgtaaagactttttaggtatcttggcatttaaaaaaatgtaatagtctttagagggacgattaccttaagctattatcaacttgaatttgtttctttattcacattttagcagctttgacatctgtgacttggtgcctgtgttgaggagagagggtatatgttgggactggaggatgaagtttgaagttagacccatctgggcagtatttatcttaaagtgagaattgtgaacttgtaatcagactcacctggaagatttatcaaaaacgtaaattccttaaccacttctttggtaccccacattataatctcttaggggtaggacttagaaaacatttttgcaagtgatgttatttagatagtggattctttttcattctgaagtttgagaatcagtgaatagagggaatgggaaatgtcaactccttgatgatccagactgccctacaggaagccagtggaaagatgaaagtgaaccctggtatgcctggctagtaagtttaaaaacaagtaatgtggaaataaaatcaacagtcggtgaatttgtctccctgttgttttactttttatattatttgtgtttgggaggaatttgatttgtattttatgatcatttttccctagtgggtagtggggtagcacgagaaatgagtgggtctagactatgatagagttggtgcaatgcagcaggccaatcggaagaaaaaaatttaagcatattttgtggattagcatgtcagttgcaaaaataggagtatatctaaagctgatttcagatagtctctttttagcgaaactatgtcagactgtgcccggacttttgctttggaaaatatggtaatttcaggtttgtggctaatttgaaaattagtaatcaatactaagggttttaaatatgtagcatttatgtgtttattatgtatttctatattcataaacattgaggattcttttattgtctcatgtaacaagaagacaagcagctcagggatggcggctcccgtgtgcttctccatgatctctcagcttcctttgtgtggatggccacagcatggctgcgtgcctaaagcacgcggagagggcagcattcttgtctcaggctccccacccaccattcttaagcagctttgttgaggtataattggcatactaagttgtgcattgtcttgtacattttgcaagtgtgcatctgtatacaccgcacaaccattaccatactatgataatgagcatgttatcactctccaaagtttcctggtgccttttgcgattccttctgcccacccttctcctccttttgtgaaagctttgatgtttttagggaaaaaaaaagttacattattgaggataaaatactaggtagaaagatatttaacttgtagttttcgctttttttttctttttgaggagtattgtggaaataatatgattgtaggtataggttgctgtaatatttatagaaagttttgagaaacagattctctgaacagaccatcttggaagagtttgacaggaaatatattttcggaaaggctggaatagaggtggagatggtgcctgctggcaggagagggagagaaagggaggacagcacctgccggccacttgcgggtgagctacagacatgaaagccaaaggctgcgcttttctttggtttttcaatagatggcatttttatcatgctagaaagactaacatgaattctaacatgaaatggtaataaaaatgtaatccccactaactgtagtgtatacatagctcaagtgcatttttttgttgttgaatggcatgctggtgattgatttatttatatttatagattaaaaataataaactttgctctcattgtaatcacctctttttttttcttttttttccctcccccagagactgggtcttgctctgtcacccaggctggaatgcagcgagtggcacagtctcagctcactgctgcctccacctcctgggcttgtgttccttctgcctcagcctcctaagtagctgggactgcaggcatgtaccaccacacccagctaatgttaattttttgtggagatgggatctccctatattgcccggctagtctcaaacttctgggctcaagtgatcctcctgcctttgctttccaaagtggtgggattataggcgtgagccacagaagcgtgcctggcctgggtagttctttttaattgttgaatatacttgctgaggttagtttctgctgcagaaagcattatataatgttgagttaacagcgatcttgtaaagagttagtagaatgtgtaaagttttacctgggaggcggaggcagcagtgagccaagatcttgctactgcactctagcctgggtgacagagcgagactcttttttttttttttttaaaaacaaaacaaaacaaaacaaaacaaaacaaaaaacgactgtatagggttaaaaaacgactgtatagggttttattttaatgggtttcttcagctgtctccttttagcttctatgactctgcattttcttggctctttgtttttcatttctttacagttcttccatgtattttgttttgaaagtaatatgcctgaggtgaaaatggcggcatttctgtcatgatttaaccttactagaaatgacattctttgttctttgtctgtttagttgagaagtgaaccaattccctgtgcttaaagtactactccttggtgtggggcagggagggaggggggaagatttttaacatagaatacaaattgagtttgttggaaaaggtatccctataaaatgttgtccaggtagttagagcttaatatgggtgataatttccctagaagaatattctttgctgtaacactgatgacttgatggacttgtgaaagtgaaacttggtgtgtttcttctttcagcctccatgtaactcacagatagggcagtgtagagtagatttccagttttagattaaggatagcttgtatcctatgcaaggttttgggggttggttagggtctttgagtatttcctgtctaattcacttactagttacaaagagacaagctgtaatgtaaaaagtcttccttgagctagactagctttctgtactctttgatttaaaaatacctggtagttctgccagttggggatttgtttggggtgaatgaaaacccctcaggctcagtctgttcatgcactggtgtgtattaattcagtccattcatagtcatgagctgactgtgccttattgaagaaagggaggcttctggaagagagaggaagatggataatcttggatcctgaagcactgctgctggcgcctgggagtggggcaggaagacaggaggttctgaagagagggctttgtatccaaagttaagacttaggccagcccttgatggggagagaagctactcaggcccaataacctcaaatagttcaggttaaatcgacagttgtcaagtctaattcctctttacagcattatttctgtgggaaaatgtgtgtggcttatatacttgcctcagcaaacagaccggactcagaatcagctctttgttgtcataatttaagtggaattagttactccctagggttgcattgccccttggatggcttctagccttctttttacttattaaattatattccaggttccttgactgtgagggacatagtaaactcctagtagcctttaccttcccctccctaaatagcaaactcatgtagaaaacattagctaaaatcctttgcagatttttttgaaatcacctaaaatgttgttattggcaccatttcatttggagccattttgtcagaaccactaagtatttaggtgaggcgattgatttcattcccacgtgggaatttggttggttgtaatattcaggcactcagagcaattcctgcctggacgtcacgttcaggtagtctggtgtctgaaacttttggcagagattaagctgatagaagatttgggctaacattttttagtgtgtgagttggtgaattttcaagatgatttagaagactttaaaaaagcatctgtgaatactgcatcatcttgatgtcaagaagagattgttatttaatacatacatgttttagtaatgaaggaggtacatagagataattgatttgaaccggtttactttttcccctttttaatgcaaaatatttttgggaaacagaacttgactcgtgttacactactcgcttcttgttttttgttacaaacatgctgaaatggtctaaataatgatgctactaaaacaacgtatgcattgttttcatggggtgttgattccttctgcagtgttcaaaattacttgcatgcctccgagcaacaaacacatatgtgacagactttatgtgagatgagcattccagagaaatgaaatgcaagtttacttttcagtagctatgcaacttaaaaaaaaaacattgtgttttttgaaacatggctttagggcactaacactcggaccgagtgcatgagctctgcaagttattttaacaaaacctaatcacaggaacaaacatctggcatttatagagtttgtttatttattgattgccgtaagcctctagaaagaatattctgtttcttttaataaaatccttttggaagttgtctatattttaatatctaagtgtttttggaatttagttttaacaaggttaactcaaatgttaaatttattgtgggctacagctgaagtaggagaatgtaagaagaaatggcaagtgggaactcttgtaaaaagaatggtaactaagttctttttcctggttatgctcctgccatttactcttctgtatggcaggccatcatttacactgctttgtagaatctgctgtctagtaagcactaaggaatttggatccctaaaccagggagcatatagcctgctaaagcttaatttttagacaggagacactaaagatgattgtgttatgatactgttcattttatatactagtgaaatgaatactgaaattatttagtataaccattaattatagtgcttaccattactgcaaagtttgtcatgatttgggtggtagcttcatgtttcaaaacaaaaccataggtctatccttttaaaaaacataaactgctttagtttgttaatgggaaaagtgagtaaataataacacttattgatgaaatgaagcctgtcagatacaggaaaaacaaaacaaaaaacccttgtagatattcctcgtgtcaagcccctattaattctgtgtaattccagtagaactagcaagttattttgcttaaaatgtcttttttttcccctgtgcagtgaaagttgaatgtgagaccacatcttaatagatatagttacacggtttattttatcatgtatcactttattgctgtcttctagaacattgttatactaaatgttccaataatggaaattttatgcagctacttcaaatgaaacaaatttgcaaaaactcaattttggaactcattccttgaggagaggaaaaactcaccatgctgtgaccacattagatttctgatatgttggcaacttatcaaacactgtcatttccagaaaacaggttatggggtcaaattgaaatatcagcacttttggtcactttcagttgaagatattttaggttttaatgattgaatggttaaattaaaaaaaaattgttggtaacaggtaatgaaagtgtggttttgtatgtaaataaaaatggctctacacgacatcaggaatgatggggttcagttacagtggaatcttttcaagagcttgattttaaattctcagagatactagttttacttactggagctcctttgttttgcagagatcatgatgcagccgtccttttggatttctttttaataatgtgtgacccttcacctttgatcccctgacctgcattaccttggtaaccatttcattttttaatttaatttcattttttaattttggtgtacaagctgtaacatttcatctttcaaagtgtaacacgctgatttcctcaaatagagatacccctttgagtgataaatttgcaaaatgctgtcttcattttctgtattaaaattcatttcagttttaaaataaagtgtaatctgtgttttcatccttttaaaatttaagtttaatgagtgcatttccccatacagtatatttccttttttattcatgttttgcagaagctgaattaacttgatatttacgtataacttacacacacccaggacacccatacctcttctctactcccaaaccacccaaaccattgcccctcaccttatcacacatacaccctcaccatcaccaccaccaccaccaccaccaccaccacataccctttcctctgcagagtaacttatctttctttcagaaatagtagcaacttgaatttattagtcttagctgccacattatacatcttcagattatattttgtattctgaagtattttggggagaaaaagcttagacttttaattttaatttcatttaaggactagaaaaatacaaagttgcctcattacccaaattcacctttccccactcttttaatattttatttctttaattttaggcataagttaagaacaagcaatttaacatgaccaaaaaatgtacttttgtctctgccaaaacctggtcagccagccctggtagtctcaataccagattgatttctgccatatgcaatttcatgactgtttttcaaacaatgcatttttattgtatttctcttttcagaaaattcttaatctaaagcaaaacaaaccaaaaccgaaagacagaaaccaaacttgagtcagttctttgaactggcaagatactccttagaaatcatgtccttaaaaaaaacatgtgaattctctcagcatggcccactgaagcacagattactttttaagtgtctcattattttattctctaacatttaatgctgatgttttaattgcacacagctgaagctgctaaatgagtactgaaatggatttaagtcctctttgagctttgttgatacctataaaagtttatgtcattcattagaaccacaaattaaaattagtcgtggttagctgttcactggcgattggaactctcacgaacagttttgttcaggctcacgagcttgttcttgcctagtatacttggatgcctgaaaagctgcctttggcctgttgggtatgttttcttttcacagaattgcaaaatatcagagctgagaaatacaaataggtaaaccatcctatgattataaagcccctgtgatttataatgtcccagtagtcaggagcaacttttttgctaaacctggaattttaaggtgattttttttttttttaaataatgcttttcacagttgtgctggcatgtttaccagatccccaaagacttttttgccttaagtatgtcctttatttgttcctttgatgccatgtccttctagcactaaaggaatggcatctggctcagtggatggtacatggaagccatgtggggggccatgactgcttgttgcctccattcctcttgctcaagcagccccaaaccggctgacccctgagggatgagctggttgatggtccccaggagagtcacagctccctgctgttggaatcggctcccctggggctcccatctgcctttgaggtagacagtactttatttgtaagtccagtagcagctgaagagaaattaataggttaagacgagaaaagtttttaattctcttattttacgattagatcagttagattttctttaaagttttctgcttaatacattttaagataacctcatttttctaagagagctagtacatggacacatttatggcttatttccaatgagccttgtttatttggttagcatttaggacatttagtagactgtaagccaatggatgtttttgtaaatgtgattcattgagaaaaaccttcatttgagagtcaggtaacctgctttggactagcaaagtctctggatatgttactggtatctgttgaggtagtcacacaaaactgaaatactccaacagaaagacttcagaagactttcattttggtgtaaaaacagtgaaattagctgtttgacttaaaatataggagttgtaagacatttcatcgatgctacttctgttttatcctctgtgaaatgtagatactgtgtgtctcccacttgctttttagggttgttgggaggataaatgaaactgtatgacagacacactgggaactcagaagaaaggtgctgttgaaactgaacctcatcctatggctgtgccgttggcaggcataaccggtgtgctgagaggcagtggtagtgaaccccgtggtgaaaggccaggaccatgggctctggagccaggctgccttggttcgaatcccacctcgacctcttgcaagtggtctgaccacagcaaatcacccaacctctctgtgcctgagtttccccctctttaaattggggatgataatagtacccactaaaggatcctggtgagttttagctgagcacatgtccacaaagtccttagagcagtgcctgccatgtagtgtggctgatcctcacacccagaaaaccccagcagggggactcacaccttacagaaaatcaggttcgaaaccattccccagtagtcttctaacactgacttagagacccttatatgtttagagagaggaaccgaatagtttatggtaattaagctcctctaaaacagatgcaagttcaggtgcataaagttaaatctgggtttttaatctcttaggaagaaaagtttagatcacaaagagctccataaccctttgttgataggttcttttaactgtttttggctatggagggacaaggaaggaaacctgagggacagacccaccttttacctgcttagcctttctcgttcccttttacgcttggtaaggtgtctagggagctttgaaggagtcagaagtgttgaactgtttcaaggttttcacccagctgcgggaggcttcgttgtcctcttgagtgaggtggaagggacatcactgcctttcctgagtgtgtaagaatgcctgttacatattcatcccagggctttccatacattttaatcatccacatttacctacaaggtgggtggtatgttcaccccattttgcacatgagaatgctgatgcccagataggttaaataaattcacccaggctcacaccctcagtaaactgccagacaggcacttaaatccaagtgccattcatatcacagcactgctgccttgcattgagctgcaaacctggctgagccactcctaggaaacggttttgcccttttagttgtagggacctcagctgtacgcattatcatccttcagccatcagacctttttttgtttttgttttttgagatggagtctcgcactgtcacccaggctgagtgcagtggcgcgatctcagctcactgcaacctctgcctcctgggttcaagcgattctcctgcctgagtagctgggattacaggcgcccgcgaccacacctagctaatttttttgtatttttagtagaaacgaggtttcaccatgttggccaggctggtctcgaactttcctgacctcgtgatttgtccactttggcctcccgatgtgctgggattattggtgtgagccactgtgcctggcccagaccttttaatgcaacagcgcccctaacttctgaaggcccctagctggcttcaacaaccgcccctcttcctgccccccatggagggctctgtcatacatgtgtcacttttagggactcttattaccaatggcttccttaatcctggctgcacatccagattcctctgtacagcttttaaaataattcactttttaagaaacacttgccccatcccaagactcttgttctagagagatggataggttcagaaatacaggaagtttattttgtaaacaagaaaacaaataggtccttacattgtgcacatatggatctgtgcttctggagtgtgggccaatgctgttaattctgtagttgactccattgtaaggtaaaatgagttttatgggccagtttagttgttcagccaacaattgttagtactgtttctgtaggaaaagttcctggcatccaccctgtagaataccatcttccatgagtgagcacttgatcaccacagaagccaggtttgaatttagttagagtgaaatgaagtagagggccctgcttgcttgcttgttctttcatttttttttctcttcctctcttttatgggtttatcgttcccttcttttcttctccttcgtagttccctctttccttgttttctctttcttccaccatctggcgtatgtttacaatgtatctgtcatcagactgtgaggtccctgaaatccttcaggtgcctaccacagagttgacgtgcaaatgaatgtttctttattttttaattaattaatttttttttttttgagacggagttttgctcttgtcgcccaggctggagtgcaatggtgtgatcttaactcactgcaaacctccgccttctgggttctaccgattctcctgcctcagcctccaaagtagctgggattacaggcgtgtgccaccgtgcccaactaatttttgtatttttagtacagacaggatttcactatgttggctaggctggtctcgaactcctgacctcaggtgatccacccgcctcggcctcctagagtgctgggattaccgtggtgagctgctgcgcctggccaaatgaacatttcttaatttgtcttagtatctgtctttcaaagaagtaggtactgcccgtcattagcttgaaaattgtcagattttgtttgtgattgtctgtcctaacttaggtggtttatcttgaagatcttaggtaatttagcctcatagatttagatagatcgagaaatggcaggcttcaatcactgaatagtacagaatgttgggcaataagatggatttggaccattcaagggagcacttatgtcaggcttttagcatatctgctgcatagtttttagagctggaaggtctgagatcatctgggttggacccttcatttttggtggtgaggaacccactcctgagagagaaaggtgcttcttcggtgcccgcctccaggccaggacttgcctcctcctcctctgtgtccttagctgagtgagagttgggatggcggagagcagaggcaatgtgaccgcatagctgctgcgattaactgcctgcctctagacatgttggagaaacagtcaaagtaatcatccttctgcgctccccctcccatggaaacaaatgatagaaggttagggcagttttgagggcaagcggcagacttcctcactgtgaaagtcgggaagctttggttgtgccctagaccctgtccttttggccttggcaccaccaagtgggctgctttaggtgtccatcctgatggtgtttaaccctgcttgaggcttttgaggacactaagaaacacatggtgaaggtgtggaaggattttttgtcattcctcaatgaagatctgccctaggtagaaagggagttaatgaaggaaaagtcggcaacgctattgctgcacgatcaggaaataacagaaaacgtctcccatttgttctcatttgtggtgattgtttccctgggaaactggccgtggttaccatcacgctgtgtgatgctcctcagaatcctagaattagacgagattttccactttccgcacacatcttcaggtggggtcgcaaatactccatatgacagactgtcacatacgctggccacagaacttcaattattcaggtttggatatccagccccttttctctcttctgtgtggatccttttgagtactttatacctctaagcctttcgtatttccaaaggagaaaccagaatgacttttgtcactcttttgtaatggtgggaaaaggactggtaggggaaactaccaaggtttgacctgggatctactttacctgctctagttcaccttggagcatctgaccatacataggtccttgcacatagtagatactcagcaaacattaactgtcttttcatttctcattagcacaggtaattaggaacaggagctgatagactgcacgtatctgtgcagagatatatctgtaattaaagttttaattaaagaaacaccagaccaggcagatggttcttatccctgcatcctgtaaaccaaacagccgtggcttttcgatcttgcaaacatgcaaagctgagagtagcaacattcatggtggtacaccaaagggaataggttgtcttataaactaaccataatctaattttggtagcactctatgtgatgccagattcaaggataatcattgcagtttgaaatgaaagacaatacatcaaagttatgtcccaaccaaagcttttaagcctcaagtcaagggcattaccacagcccagctcgtagatcacaagacgtgtggttttgtgctagatcacaaaagctgacaaggtgttatttaggattatcagctaaatacagtattaaattagagggctatcattctgatttttcaggcattgccacggtatagcagtacagaattgagaagtgacttgtacctgcctgcctcatgcagatcctctcagccatgtcacagtgaccttaatggtcaattgagtgcagaatttgaaaacaaaaaacaaaaacacccacaaagagtgacagaagacgacttctctcatatcttagcacttttccaggaaccgctcccccaaggatccccagcgatttgttctagttccgttgccatcagcaggaagctggatcagtaagggacgtgggcagatggtaaagtccatggcagttcaccatgaccgcttgggcttcacccattccataacccccagtttcttacccctcctcaaaacccttcactttgtcacacatgtcattttcaggcattcagtgcagataggcagctgtgcaacgggattacatactagttgatacaagtatgtttttaccacctacatctcactaattcattttctacttggtagaaccagtactgaagatgttcatttcttttatcacagcgaagagttttagtttagaggctaggagagtaatttctactttgctgaacagtgaattaccttaccatccctgcacttcttttaaaggaagtagagtttccgcttgaaaaagagtccatgttataccgggataaatataaggatcttcacattaaagaatatgtcatcaaatgtagagcctggaagtattttatcttaataccatctataaaactcagtcatcctaggagaaatgtgtgtgtgtaagtgtaaggagacataccaaacccacaagaccctgtgatgtgctgtgagcgaagcctgtgtcttggctggtagacagaaatgtgtccattactttctggcttggggaagacttcaggtatttgatgatatgtcctttggtttcagaagtcaattaaatcttagctgctctgagtaaacagccatttgtggttgtgtttagaaaatacagtaagatcagatttgtgctgctaggtattaggttggcattttacatgtggaatttgaaccggactatgaaatctatttcttctctaatttggttcaagacctgaacatgtaacctttgagtatacaacacaggtttagattataaaggcttcttttccttttttctttttttttttttttttgagacaaggttcttgctctgtcacccagatgaagaacccgcccactggagtgcagtggcataatcatggcttgctgcaaccttgaactcctaggcccaagcaggcctcctgcctcaacctcccgagtagctgggactacctttgctgctgcgcctaattttttttttttttttttggctttgtagagacggagtctctgttgcccaggctgatctcgaactcctgggctcaagtgttcctcctgccttggcctcccaaagtgatgggattacaggtataagccaccatgcctggccctgtgggaggtttcttataaagtgaaaccacttgttactcagaacggcattatgcctcgcttcagggtaggaaatagagaagcatcagcaaacccacctggaatggtaggctttttatttctctttctctagtagggtttttttttaaattttatttattttttatatttatctttaatttaatagagacagggttttattctgttgtccagcctggagttcagtggcacgatgatcatcactgtgacctcaaatgcctaggcttgcctctggagtagctgggaccagaggtgcataccaccacgcccagctaacttttttgtttttcttgtatagacagggtttcactatgtgtccaggttggtctcgagctgttggcctcaaatgatcctcctgtctcaacctcccaacgtgtggggttacaggcatgagccaccaggcccagcctctaaaagtgttttttttttttttttttttttttgagacagggtttcactctgttgcctaggctggagtgcaataacatggtcttagctcatggcaacctccacctccagggctcaagcagtcctcccacctcagcctcctgagtaactgggaccacaggggcatgccaccatgcccagctaactttttgtgtttttgtagagacagggtttcactgtattgtccaggctggtctcaaactctggagctcaagtgatccgcccgccttggcctcccagagtgctgggattacaggcctgagccattatgtccggcctctaacagattttaaggaagcttttgttctgtctgatatctgtatgatcatgggaggggagtggagtgttctgcccaccccagagtgacttaaattcaaatatttgtttgttcaataaatacttattgaataccgagtactaggcactgtcctaggtgtatctagaatgaagcaataaacaaaaccatgttattcccctcgaagagcttattttctggttgggggagaggaataataataaacaataaacaaaaacaaaaataaataacagtaattgcgtgcttatatatgccaattacatttattaactcactcttcagaatactgaggaagtagctgctgtcattatccccatttcatagacaaggaaaccgagatacagagaagttgaattaacttgctcagtgtcacatagctagtaagtggtgctgttgcattcctgtccaggtcattggactccagatttcatgcccttaatcactgtggtattttgtttctcttttaaaaaactgcccaatctgtttatttctaaagaaggaaagaaatgtcagtgatagtgtggtgaacagtgcagcaaggtacacagtgagagggttcttgcatgtctgtttgtgcatgctattctagtgtgactgagcgggtatctctcatgaggtgaattgaaggaagcaacactgtgaccacttgaaggaagcaacaccgtgaccacgtaggtgtctagagtgagtattccaagcagagggaactgcaaaagcaaaggcgctgagatagacagagatagatttggcaatggcgagagagaagccaggagaatgacaaggaggcctgtgttgctgtgcagagcgtgggaaggggcacgggaggggaggagccaggaagtagtgtcctgtgcagccccgcagggcttggcacggtcttttggttttgccgaaagagaaggaaagccacctgaggatttttgagcaggaaaaagacatgacagaaaggatcattctgggctgggcatgatggctcacgtctgtaaccccagcacttcgggaggccagtgtgggcggatcttgaggtcaggagttcaagaccagcctggccaacataatgaaaccctgtcactactaaaaatacgaaaaattaactgggcatggtggcggttgcctgtaatctcagctatacgggaggctgaggcaggagaattgcttgaatctgggaggcagaggttgcagtgagtggagatcgcaccactgcactccagcctgggagacagtgtgagactctgtctcaaaaaaataaaagtaaaataaaataaaataatcactctgaatgtagtgcagagaatcttccagggcagggccagcagaccacagcccatggcaggttctggcccactgcctgtttctatatagctagcaagctaagaatgctttgtatgtttttaagtggttgaaaaaaaatcagtattttatttcacatgaaaattatatgaaattcaaatttcagtgtccagttccagttctattgaaacagagccacactcttgtgtgtattatctgaggccgcttttgagctgcaacagccaagctaagtagttgtaacagggagcatatggcctgtagaggctgaaagatctatactgtttggccctttacagaaaagagttgttgatccctggtttgggatagaagtagggagaccagtgaggagactgttgcaagaactgatggtgccttggacagagcaggaagaaatggtcatatatgggttatgtttgaaaggaagagctggtagactgtattaatataggaagagtcagggatgatgactgtgtttttgcactgagtaactggaagaatgctattcttctttactgagatcaggaagactgagaacagcaggttggggaggaggggtgaagagaatgtaggttgtgttttgcacctgttgactgtaagatcaggtggagatgttcaataggcagtcgtatgtttgagtttgtaacttcaaggagaggctgaggctggagctagattttgagtgttttcagcatatagggggttctaaaagccgtaggactggatgaaattttttagggagtgtatacaatagagaagtccagacatggagccctgggacacccaatgttaaggggaagcgggtagaagggaggcaaaggagaatgagaagcaatcagagaaggaagacaggagatgggggtgtcctggaagtgcatgtttctctttgctttgctttgcttttttgagacagaatgtccctctggtctcagctcactgccatttccacttcccgggttcaagtgattctcttgcctcagcctcccaagctgggattacaggtgtgtgccaccatgcctggccaatttttttatttttagtagagatggggttttgctgggttggccaggctggtctcgatcccctgacttcaagtgatccacatgccttggcctcccaaaatgctgggattacaggtgtgagccaccgcgcccggacaaggaagctcatgtttcaaagcagagtgatatctatgtcagatgctgctaaagctggagcaagaaacagacgggtttcactgtgggcttggtagcggggcgatcgttggtgactttgataagagctgtatgagtgaaatggtgagaataaaagcccagttccaggtggttcaagcaaaaacgactggatagggagctgagctggtgctctgaaggaattctgctttcggcagcctaagtgtagggcaggagagggcaggagagggcagggagttggatttaacctgggattaggattttgccaggtgagtacagtggagggaggaggcataagggagttgagcattgcgcagaagaatcgatgtgaggattgaggatagaccatgtggtctaagccaggcaaggagccaggaggcatgaaggagctgagggtcagtaagaggtcatggggtcagtggattcaaggaataggatcgaggagttgttggagttgggatagtcgaagagtagatagagggcttgaaatcggtatcatggaggggtcagttttggttacatcaaggtcaggggctctgctgtacagtagcagtgtcagtgagtcacgtgtaatttttaatgttctagtaaccatatttttaataggtaaaaataaaggaaactaattttaataatatattgtaatatattttattttacccagtaagtctacattacatgaccatgtagtaagtataaaaattgagaagttacttattttggtatgaagtctttgaaattggtatatatcttatatttccattaccttctaatttgaagtagacacatttcaggtgctcagtggctgccttactggacagctcatgggatggtcatggagtgtagtccaggattatcacaggggaagtgtttaaaggaacaaggaggtcgtggttcatgaaggattggccgtgtagatctaaaaccatttctcactccttctgaggggagcaaggctgaagaggaaggaggggacaccatggcagttggtagaggtcatgtgcttcgatggctgaacctagcagccttttaccatgcagagaatttagcttattctctagagacacacacacacacacacacacacacacacacacacacacacacaattttgtttggctttgatccacacaatgtgtttttaaagatgaataaaaattgataatatcaggtattttttagcctcgtaggccaggaaaaagtaaaatattttgaaagagtaaacaggagcgtctcagcagcatacatgttacttttcatcttaatcatgtgagcctctcatgaaagcctccaaggaggaggttaatggatgccccaattctgtacctttatcaggtttaagcttacttcagtttccctttagtttgttgcctgcagtatcataattaaccaaagaattcttctcaaaaattaccctcaaaaatcctacaaaccccactgttaggaagcgagcccattttgaggaagtatttgtgaaccctgtgttcttggatgccttatgtgttgaaggaataattacttgttcattttgtagtgctaaaatcctgggaatgcgcagtctaagcagtctagagcatgtcagtatcccacctttggaaatctcctaggagcatgtagagactctggtttatcattaactgtgttgctttcctatcttttacacaaagtattctccttcccgcaccattgtattcacatgacagaaagctcagttaatgccttttagtaataatgaaagcttactcattacatacattttcttaaactctctttattctaattaaaatgtttccatctgatgaggaagtgtatggataccaagaagtggaaattaagcaagaaattaaaagaacattaatggctttcttgtaatttgttttgaggtttttcttcctgctaaatggtgttttgcttacagagtcacccctcacacagaaatctttatgatgaatggactggaataaatcccagcaaaagaagagctattttatgatacctcttgtaaattacaacacatgttatggaagtatttgcttttttaaaaatattagctttttaaaggcattgttagtataattaatttggcacacacacaattctagtttctttgaaagtgaaggtcagtgtgtgtgtgtaggggattaagaaaatgagagttctgacatttaaaaaattattttctatttatacctgagtcattagaatgctcaaaccatccaaagtataacatttaaacttgcagttcattcattccttcagaaatttgctgctgaaacttaaactttaaccagcatagccagcgtagccttaaccagggcaggtatttggtctgcagtaggcaagcctttgcccccatccctcgtcttcaggctgcagagtccacatgcatgccattgctctggtgggttctttttctggtcatttggacttgtctctactaataaagtattcattaacttgaaactcctacctctgaatgtagatgcaggtgaaagcagagaaataccaaacccaccccttcctgatgaagtgcaacatgccccacccagctgcatctcacctgctgcctcccctcctcctcccctgatgtgtggacactctttctgtccgttcctacttgctgttcccttctctgcacgagtccttcccctggagggcagcccgcatgccactcctcccatgcaccttttcttgggaactgtgttcagtacagcctgtcctttggttcactcttaccctgggcactgcttcccatgtcctgtgcgggcccttgccatagcatattgtgatttatctctgttggtgtctttactccactcaagtgggagctccttgggcaagggtgctggtcctcccttatttttgttttccttgagcccaccatctgcacgtggttatgggtggatggatgggggaagtgacagtggggtaacataccttcaagcccaaaatgtaaacttaataagtgttttggaggaagagaagaataaatactgtttttgtttatacaggtcttaaaattttggtagcagaaagcaaatgtgcaaagagcaatggaaaacaagtcagaagctgctgtctgattccagaggaactcgtattttatgttaaaaaaaatgtaattgacatttgattgccttgaaatcttcaatttgttgtgctgatatcttaagtaactaattatttagttgaataactactagggaaataggccataaatgtcactcgtgctttccttgtaagaagcccacagctcttctcgcagcatgctcttttcagtacctgttctaggtacttgtgacttgtgaaagtcactggcctctgcgcattgggcacaggcctgaaggcgatgttttactcacattttgtccactggaattaaacagctgtgctgatattcagttgatttgaggtttgtttggaaatcagtcccaaatttgggaagcaaatgagacagaaccctccacaccctaccacatgcttccagctcatcccatgaaaactcatgagcacagtgtggagtgttttatctacagccactccctttttgacccttcccccaaaatagtgagggagagaaatgaaagaacagatctggggcttgccttcagcttcactgtgcatttttggtcattttggtcattttagaagtcatctttcacttgttaggatgttacattaattgggagatgctagtcgttttgttcatggaaaccagagtatccctttgaagtattatattcttctaatctatgaaactggcccaggaagtaacaatgggaagtgctggaaatggaatttaagaagtccaccttcttagtcctgtgcttaagcagagagtctctagcagggagcctctgcaagcattgtgttctgttgtatcaatatgtacttagatatgttaatctgaattagggagttgattgtacataatgactcccctgggttgctatgttagaagaaaacccaaaacttaagtagtttgctgaatatgcatagtaagtaaaaaaattcttccaaaattagtgttaattgaatctgagccttgatcttctttgaacctttaattttttatttgatcttttaaaaaagttttgtggcctcttaaagataaaacctacaacccaataaaagtcatgctgtaacgattgcaaaaagaccattgtatgagacccagttttggattatcataggcgaagaagtcagacatatatggttgtatgtacatgtgtatagtatgtgggtgggggtagatacatacctgttcatctgtatacgtatgtgtgtgtttaatatatactttagtttgcctttacccagatgtctcctcctctctctgcctctggaaatggggcaaatttttcttcagttaaaaacagaaatagaagcgacggttttgacccattttacacctatttatttcaggctctcaccacacacttgttcatgggcgcagcaaagaagagggatccacagagctggagccatgagggctgacacattggaatgaaagctggcagaattcgtagggagagctttcccatcctgccagccccatgtctggctttaagacagttctattagtgaattaactgttctcaaaaccccaaattaatttgaaccgaatgttactaaaaatgaaatagaataaagtgacctactcttgcctcatccggagttattacgaaggagctccgcagcctgactgagctctggagagcagggctctgtgcacacgcctcctggtccagaggcctccgtgaccatccatgatgccactctgtcccctcagcaagctgcctttttcttcctagcacctgccccagcggtggtatgttttccagtcagttaccacctgtctcatcagaatggaagctccatgagagcagggcctttgtcttgtccccttgtatcttcagtgcataggacagtgctgacacagtgcagagtctaaataaacgctgttgaacgaatgtgtgggtcacttgcgtcgcatcctttctgaatgtttttcctttaacttgccatttataaataccttttccaatgataaagcagtgaaagtttggaaagaagcataaagcttttgttgtgattgaagtaactggaagcctagttcagggtgctgtgagaagctggagcatatcaggactttggaattatgaattacagacttactatatgtgatggtatcggtgcctcctgaagaagtagaagacagagatgcatagaaacatgagtcatgtctctggaatactgtaatatcgacatctagtgagagtctagaaagaaacatggagaaataaaagggaggcaggaaacaggcaaatacttagtggttctcagttatttaaggtaaattttggcatcgagtaaacaagataaatcaaaatattttctagatcaagtaggcattaacaaagatatagaggaaacttggaggcgattacttagataatactaacagaagtacttttgttccagatacctccacagatgccatggttaccccgtctttattcgttgtgtgttggcataggccagaataccaatattgttcttaaaaacctttgaggaagtttttctttttttctttcttttttttttttaagcaaagaacagaaacaaaaccaaggagacagtatcctgtgatgtaggctgttacctcaaggtgagtttatttgtagcactaacttgtaacgaattgtttaaagaactgaaacttctttttaggtatagcttatttgtcagattttgttcatttcagtgtaaacttcagttatttattacacactgagggaaatcaactaaaatcaggaaaaccaatgtccaattgaacttgagttttattttgcatagagaagtaaccaatatttctgatcaaaccattaaagctgtttcagttccttttaaataaaagcaaaggctaaattttttacataccacaaagcaaaataaaacgaaaaaacctttggtcatgatgcattttttattcaactgattgctgaattattttgattatataatcttacactcttatgaaagtataacaagtatgaattttctgaggtgaagaaataaatgtagaaagcagttaatgaggcagaactcacaaatctgtatttatagtttcatggcaaataaatcataagcagaggatacagatgtaaagaaaaattcttgattgcattcaagaaatgcaaggtcgaactaactttttactgaaatggaattgtatcgctgctcagagggatgtggggagtaaagtaagtgggatgtgcttagaacagcaagctaggccgcagtgcgcactcgtcagtgtctgctgcttgtcttacgaggattctagcacagaagattaaatcatgttttaatcatgcttaataaatggtactgtagttttattatggttaatgtccacttgtaattcaatgaagagtggctttttaaagcaaaggagaaatcagcatgtttttcttggcgctcttatattgtgtgtgtgtagaagatgctgggatgggttatccatacgacaacccctgtgaccagagatgcaggagcacatgcatcactcttagttttattttatttgttttatatgttattttcataaatctgaaggtttgatcagcttactgtttttagtattttctgctgctgcatgtgtgtacctttaagttttgtagaattaaattgaaaattttgaccagcaaatgcttaaagccactgtcaaaattacatagttagcacttcattgatttgaaggctagttttcattcaacattcctgcagtttgtgtgtgacctgattttaaagagcagttccatgagttagtgccctctggtggcacacagaggacgtcaggcagagagggactctgacccaggagccttccggaggctctgctgaagagaagccagtttatgactggccctgtaatttcatattttttcatgtgttcagtgctcgtcagtttcctactccattaagccatggccctggcattgactcagtaccagctttatagcaagtcttcagcagcttaggttgtgagggaatttccaggtggacttgatataagaagggattaccaatgttgagatttcccatgaggaaccaggacatccatttttggatgcatctcttagctccttttgaagagcagaccatgtcacttcctgggttaaggaaggaaggctccctgatggcctttgagtgactgactggcacagcttggggtgggccttcagtgggttagtctttgataggcctttgtttcccattttggtcttccctggagggcagcccaccttgcccacttaggctcttggacagttttctttttttttttttgttgaggtgaagtctcactctattgcccaggctggagggagtgcagtggtatgatcacagcttattgcagccttgacctcctgagctcaagtgatcctcctgccttagcttcctgagtagctaggaccacaggtgggggccaccatgcccagctgatttcttaatttttctgtggagtcgaggtcttgctattttgcccaggctggtcttggaactcttggcctcaagcagttttcctgctttcctccccaaatgctaggattataggtgatgagccaccctgcccagcctgcttggccagattctgtactctttaggcagaccaaaaactgaatcctgtcatcactctgaaaagttgtgggacctcaagaaagtcactctttcatgagtttctttagctgtgaaatagtcacagattctaagctgtcttttgaacctgtgtcaagagagagttgtgaggatgatgtgagatgatgtgtctgagagtcctgacacattgacctatgcagactgctgctaaagacatttctctttccttcctcaaaggcaagcctccccaccttgattagaaggtcattaaaaaggaacttcatttgacaataatcccatatttataatgaagttgctaagatagtttggagtgcccatagatcccttacctggtttcttgtgcaatccccacttttatactgttgagtttccctgatgagttttcatatatataatctctgtgaacttggatcaaatttggcttaaatgcctatttaccactttgctaagacagaaatgtttgcgctcagtccctgaattccattgtagatgtgttggcatttgcttccaaaccatccttctggttttagcttgccctgtgtctgtggtcatttgacattagaatagccttctgtgatcttccgggatcttaacacctaaatattttccctgcttgtacagctaatgagttgtgcagcctaaggaaacatggggtagtcagttttcatcagtatttcaactaggcgtttttgccatctcatagctacttctcaagcaattacaatttaagtcaaggtagtagcacctgcatcttcaaaaaacaaaacaaaaagttttttatcttcagaaataaggaaagaagcttattggacttcccaatagaaagtccaccagccaattttaatacataaataatctatgattagcattagtatatgaaaaaaatagtagcagctcagattttatgtacttctgcagtttaagaaagtgatgccacagacaacatctcatttggtttcttagcaaccctgaaagaccagcaaggagagcttcgtccctcccttttcatgaacctgaatgttgtaagggaggccaaggagtggcctggtgagactgcacagccagagttagagcccaggtccacgtgagtcattgtacagacacatcctgagcaccagcccacccacttctgccatcaggaggctttgaaactgctgtggttcccctcttaaaatggctaacctctacttcagcaaccttatttatgcattcatatacataatcattctttaaagtctagtagacaattttcacattttgtttcagcccagatctttactaaattttgtgagatcagcattgttgggcttgaattaaccaaacttcgccatactgtgccttcagaaatcccagattgggcgggttgtgagttcatctcatcctcttcctgacattgacactaccagcaccatcagcaggctctgggataactgcggccccctctgagaggctacatcttgtttgcgatctgtgggttacatattgtgctagagataaaccttgacagtagagacgtgtgacatattttttacaagagtcactgagatacttgaatgagaagatgatgtagtttgaaaaagtgataaatgggccaggttcttgagaaactagcagaatgtcttattgaaaccttgggatccaatctgaaaacagaaatgagtcttccaagcaaatttttttcttttctttttttttttttttttgcaaatgtggtgggggtagatgcttttatataaattctatacctgtttctgtggtataaaaatcaaattttgtcctcttttgcctcggttggttggtttcattttcaactaggtctccgtttctaacagcatctcaggtaacttttctgaaaaatgtgggttcagaggagctcatgtgctggtggctgtagtggcagctagttctagactatgagatctcagtgaccactttggtgggtgttttgttttaaatcaacaatagaggtgaatctgtactacaaagtaaaatgtatgagtagataggttttcatgttttgaagttttttatcttcagaaataaagaaacagcctcattaaagaactgttaaaaaaaaaaagagctgtggccgggcgcggtggctcacgcctgtaatcccagcacttttgggaggccgaggcgggcggatcacgaggtcaggagttcgagaccagcctggccaacatggtgaagccctcatctctactaaaaatgcaaaaaattagccgggcatggtggcgtgcctgtaatcccagctactcaggaggctgaggcaggaggtggaggttgcagtcagccgagatcgcgtcattgcactccagcctgggcgacagagcaagactccatctcgaggaaaaaaagaaaagaagaaaaaaaaagctgtttgtctgttctagcctggcacctatgagttctggagcagcacccaaagccagttcctgctggctttcctaggagcctctttggcgtgggtgggcgagctgctcccttgcagcagtttcagatgtcacttgagaaaaatatttgttgttgtttggttgccctcttcagttgtgatgcttttaggaagttaggaaacagatgagacagtctggctggaataagagggtgggtaaccactgatctgagatcatccctgttgattaggtttgcagaattctaaatggagattgtagcttcacatgcgcactgagggggttgtgcgttttcataggcttatgttccatcgggcttctgcatgatcttggaagagagagactaggtgtggttcttggctctgttggctggtgggtttagctgtggatcacttaagagacccataatccttgcttttgtaccgttctgtattccgtttgtcaggctgcgagggaagggggtttgtgctaatttgtatcttactgaccctgactggaaaagagattaagattttggttgtataattaacataaatgaccaaaaatatcaagcccactcctcacacaggtgacccaggcatccaaatatttactccaatgattagtgtctttcagctgtagatgggcacttctttcctttcctttctcctctctcttttctttacccaccagatagattcacactgaaagattaaaacaggctgtgggatttaaatgctgaaaatgaagattgatgctttcaggtgccttgtggcaagcacaattaagtgaacggagaactggggcaattgtttatttgaaggttggtgtgacatatgaatgaacttattttttcagtacccacccatctacccggaactgaaataggcatttggagtaggttttgcattttaggttcaattttaagaaccagccattcactgtgaaagcgaagttgctgggaagtttgttttaaggatgatgccaccctctatttctgtgaacccagtaaaaatagcatggaataaaatttaattatgctatactgaatatttcatgtggaattaaggggcaaaagctgcctttaaaaagcattaggtttggaaagaataaaggctttgtaggttctttggaagatactataattaaaagatttgctcaaatgtatttttccctttttgaagaatttaaagaaatccatccctcccttcctaaattgattacctctcaagcgtcagcccttcttggcagtaaatacggtgaagctgccgctgtgctgatttgacggcttctttctgttaaatgtaaaatagttttttaatcttctgatttagatgtttaatagaaagtaaacgtttgacttgctttggtttctgctgaacctgtatttaaatccacacaaacagtttgaataaagtgaaaacatcactggactagctattttaaacatttcaggatataagaatgctaaatgggggttccttttaaaaatagaaatggcggcttgcatttacataattactgctaactagcacaacattttaaatggtgacaaactcagggtagaaaaagtatctgttttaaaagcctggtaaaaggaagcagaaaatgctctgtgagcagctgcttcagatggagggtctttgcaaagccgggagaccaagacttttcagtagggagggcgaggtcaagggaggaggcaagaggtagctcaggcaaactacttacaggccctgagcctgtgtgtgggcctgaactcacccacctttcattttggagcatgattgtctaagtattaacacttaaatctgccttggtgtctgtccggacagggtgcagtgttctctgtccgctgttaaaaggtgtcaggtgagggttgaagttcaaagttggtgaaagagcatggaagaatatttatgaacatgaaggctgagattcacttaacacaaactcatcagtagttcaagccagaatctcaggcctgtccttgattctgcccttttttccccatcccagacacccatctttctccttccaaaatacatccatctttgcacatctctgctagtaccaccctagtccaagccaccttcttttctttgcctggagatctgtcacattttcctgtgtggacttcatgtctccagtttgctccccttggaatagattccccatgcactagccagggcaatctatgaagaatgtaaataggattcgttcactagcttaaaccctacagtgactttctatccatttggagtccggtcagcatgaataatctggcctctgcctctccatttcctaccaggtgcctcttccctctaagcacccttcccatacggggaatccatcaaacatgattcttttttgcattcgctgttttctctacctaaaattatttcctctcctccccatctttgtttgctggctcctttgtgtcattcagggctcacctcaaatgttatatcctcagagagaccctcccccgatagcctgatgacaggtgatagtcccctgtcactctgtcatgtggcagtgtggtttttttcgtagcatttattactgtctgaaattgtctcttctttttctttttgtcctcagctcttccccatcctattagctcttttagggcagggggccctgtctatctccttttcagctatgttctgagtagttagatgtacctgcaagtgcctaggtatccattgattaaatcagtgcaggagcggaaccctgcagatcactaatgcccaagaagagctcccacttggtggaactagctgcctagaagctgctcctcaaattcttgcccacattttttttgaaccgtttgggaaaaaaactgctctaaactttgccttttagggttgaaaattgaaatttggggattcacagaatgcttgtacttaaacagaatcagcctgtgtccctagaaggacatgaaattcccctagttcaccccaaatgagatgaaaatataatttcctagcattcttggtccatagtaggagttcaccagtggcgatctgcctctgtgtccttcctggggcagtgggatggcactgcttgcctttgctgaagactgaatttgaattccctcagatccagccttcggagccagatagcattttctgtgatttctcctgtggcgtgtctggccgggatgctttctgtgttgaatgttcattttggggttaggtagcaaatctgttaagatagagatatttgcggaaatctaaactttggtcagccacttttcgtttcattagttttccacctggcaacatccaagcgttcaggaggaaaacatggtaatggctactgatacctaggcagttgtgattccttccctaaagaagctgatgcagagggttcaattaactacttctgaggaaccctttgcatcagcttccttagggaagaaaagaatcacgtttccaactcactgagtctcaaatgtattatgccactccaagctgtttgttgaagtatttactttggtcttgaatatactcgttggggactggattgtagaactcaggagacccatctgcttggcagaagctcccctgtgcaacttttcattcttgttgctgtctttatcagggcattattacagtgattgggttgtgcaaggagaaacagtaacttcccagttaatttatagtgaaatggacctttttagaactgagacctagagataaagccatggagctggaggatttcagttgcttttgagtgagcatcaattcattagactagttttaagagaacctctcccttctcatgtttgaccagagctgaagatgcctcgactctgcctggttccccacttgcctgagtagagaacaggttcaggtaggagggaacaaacaggttgagcacaggcagagtcaggaaagggcctggcctgttcaggatcaagatgtgtgaaatgaaggtgggaagatgggggtggaaaatgggttttgaccaacatatggatggtcttgtgtgcaagaagcatgtaagcacagcagattgtgttcccatggtgacaagctgctgagccactgtgtgtttagggtcagtgtggggcggggagtagtgttggaagtccatgtcagtcattggtttcctagttagtgcaaactcaataagcctgtatttactggaagccatttttctcatatatacacccccagattgtatatcgcttttctgatttgactttttggctgattgcttttgaagttaatgtggtttagtcaactgaatgttctaaacatctccctttacctacctggtcggtactcctggtgagtttttgaaaggcagtgtctttcccacagagattaattagaagttagtgtgtgcagtacacttgaccctatgtttgacacacattcagtatatggtggtgattatttgtttgaaaatgaaacagagctctctgatggaacctgaagaagtgggattggcacttctagatggatatatgggttgtgtttaactgctttgaatgttagtaagggaaaagtatccacttactattgttcatttcttttttcccagccttaagagccaaaatgattttctgcccacaaacgtcttggttttctttttctagcctgtcttttcatggctaagatatttgcagaaatttctggctagccaccagtccataactttttctcttctttgcagacactgtgtttagtggtatctgaaaaaccctacgaatccaaagttgtttaccctacgaaagttgagattccagttcatttgctaacctgcagtttcttatttcttgtcttggtacttcagttggctcattaaatatttcttaaaattggttgaggagcttaaatatttgttaaaattgtaatgtgtcctgatttagaggaaactaattattatgtacatcttactagatccatctgttgcccattcctcagatacagtgatagaaggagagagaaattctgggccgggcacggtggctcaaacctgtaatctcagcactctgggaggccgaggcaggcagatcacgaggtcaggagatcgagaccatcctggctaacacggtgaaaccccgtctctactaaaaatagaaaaaattagctgggcatggtggcgggtgcctgtagtcccagctactcgggaggctgaggcaggagaatggtgtgaacccaggaggcggagcttgcagtgagctgagatcgcaccactatactccagcctgggtgacagagcaagagcccatctccaaaaataaacaaacaaacaaaaggagatagaaattctgtctccaggcagataagttatagttcatagagtgtgagagaatgggctcataatggaacagttatcctgggtggagttggtgcttcgtgatggtacagatgctttccagggatatgctcaggaaagatactggaaagagattttcctaagtctcatctcaaatgagctttgctttgcttcaactggcctaactcagcaggcccagctagcctgataccaagaaggacctccagcctcttgttgcctagccgacctccaaacaggtagctggccaacatggggccccctggtttgttttattttgtttgattttttttttctttaaatggaatagatgatctagacgtagcaccaaggtgcccctgtcttccatcaccttcatgtacctgagtacccacaagctcgcctgtggatctgtaggaaaaccaggtaagtctctaggatctgtgaggtcatcggtaccgtggatgcttcttcagggtggggagggtttgctgccattgatagccctgcaccatcatggaagcgtgcccagtctgtttccccatctttgatgcactgtggatgataaataatcatcactgctgtgtgatggctgagagggattccagccagtgtgtgctaggttatagtgttttcctgatggatggagcctattctgggaagcagcttattgtctcacgtgaacaggctttctaaaataaatgactgctttcttaatattttgaatccttttcttcagcacatgttttgttgccgtggtttgaaagcttgccaaatatatgcctttgcacaactccctgtagggctgggtatacaatcagaccaaacagtgtgatttaagtttgagcataattgggaattcagcaatcacttgccttgcatttgatggaatggcagtggagtgcttgagagttacttcgctgttaaaaaattatatgtgtataacgcgcacgcgcgcgcgcacacacacacacacacacacacacacacacacacacacagagtttcactatctcataataaagttgtacctgaaaccactgggcaaaaataacactagcatgataaataattgcttgatttttgtgatggaggcaggaattaacttcaacaaatcatagcagttgatactgtagatatgactgaggacttaagttatataaggttgtggaatggaagaaaatcacgtggtggcagcaatacattttaaacacaagcccttgtcaagtccttcatcggttgatctgtttccttgtttctgtgtactttagtaattgagccataaacttggtgaacttggtgttgcctctgtgttatacaagcatctttggattttacattgccaacactgtgcgtgtttgttgctgttggattgtcagttacctataattgagaccttttcgtgtgtctctttgctggtgggaaaaatgctgtcaacagccccactccctgcagctctttgaaaagtcacatgtgaaatccagagtttgtttaccaggctgaaagagatcactttaccagaagcttacagtaaatatccaggtgatagagcctggagatactaaacatatgctgcttcattgcttggtacattggtagtcatcaggcctgccaccagcactgcagactgcacaggacacagaggtggtgtgtggaagggataactttgaaactgtgtgtaagttatcatagccaccagagtttcttgatggtggcctcccgttcccgtgcaatgagacagcctcctgtcatcccttgtaagatggtgttaatctgacaagaaagggaagtaaaaactctgaggtcagaattcttaagtttttttttctggaattttggacactttctaataattgaaaagcacctgtcttttggagttttagacagtcaaattaatctaactccagaatttagcctttatttgcaaacaacatgattatgaaaaacccatggaatctatataaaaaaaaacccaagcacctatgagaataaatgaattcagcaagacaacaagatacaagatcaattgtatttctatatattagcaacaaacaattggaagaggaaacttaaatatcagtaccatttacagtagcttcaaaaacttcagataccttagaataaaactaagaatatgtgtaagacctctatgctgaaaaccacaaaatatctgtgagagaaattaagagaagatctatataaatggagggctataccatgtattgaaagactaaatagtaagatgtctgttttccctaaattgatttatgaattccgtgccatcctactcaaaatctagataaactaattgcaaggtttttatggaaatgcaaaagatctagaaagaccaaagcagctttgaaaaagagcaaagctaggagatagcctgatttcaagacttcctgtaatgctacagtaatcaagacagtgtggtattgcaaaaagatggacatataaatcaatggaaccaaatagggaatccagaaacagatccacacatagatgctcaattggtttttgacagaggtgcaaagggaattcaatggagaaaggatagtcttttcaacagattgtaatggaacaactggacattcatgtgcaaataaaatgaacctcaacccataccccatactgtatataaaaattaactcaaagtggatcatagacctaagtttaaatctataagccttctggaagaaaacatgggagaaagttttcatgaccttgggttagcagtgatttattagatatggcaccaattgtgcaatccataagagacaaaacatcagacttcctagaaattaaaaaatcctgttcttcaaaaggtactgtttagataatgaaaaaacaagccacagactgggaggaacctttgtaaaacatacgtctaataagggatccataatgtatgaagaactttaaaacctttaaaaactttaaaacaacccaatttaaaaatgggcaagagagttctctagacatcttaggatacacagatggcaactaagcacatgaagaatgttcaacagcgttattcatcattgaaatgaaactaaaaaccacaatgagatgctggtacacagttactagggtatcttcccaaaataaaaccaaaaagaccctggtaataccaagtgctggtgaacatgtagggaaactgaaactcttgcctggtgcggtggctcacacctgtaatttacccagcactttgggaggccaaggcaggtggatcacttgaagtcaggagttcaagaccagcctggccaacatggtgaaaccccgtctctactaaaagtacaaaaattagccgggcatggtggtgggccccggtattccagctacttgggaggctgaggcaggagaatagtttgaacccaggagttggaggttgcagtgagcagagatcacgccactgcacttcagcccgaatgacaaggtgagactgtcacacacacacacacacacacacacacacacacaaaaaaaaaaataaaaataaaaactcgtactggcttttaggaatgcagaatgctacagccactttggaaacaacattgacattttcttataagtctacacttaagaatcttacaaatctgcatttacagcaagacccagcaatcccacttctaggtatttacctaagagaatataaagttatgcacctacagaaatttgtatgggaacatttacagcagcattactcatgatgttcaaaagctgaaacaacccaaatgtcattcaactggccaatgaataagcaacttcattggagtactactcacagtgaaaaggaacaaagtgacacaacatggacgagtctcgaatgcattatgattagtgagaagaagccagactcaaaaggcctgattctgtttatgtgaccttctggaaaagccaaaattgtatgggaagaaaacatcagtggttgctgtggactgggttgctgtgggtgggtcggttacagaagagcacaagggaactttttgaggtgatggaaattttctgtatggtgtttgtgattgtggttatgcagctctgtttgtttgtcagaatgtatggacctgtgcactttgaacaggtagttcacaaaagaagttatacacatggccaataagcatgtagaaaggtgttcaacgtcagggaaatacaagttaaaaccacagtgagatgccatctattattagagtggctaaaataaaaaagactatcaacatgaaatgttggtgagattgtggaacaactgcaactctcaaacattgctggttggtgtatgaagtagtccaaccccttgggagacttgattggcaggttttctttcctgaaattaaacatacatgtacaccatgatccaacagttccactcttaagtatttactttaggaaaatgaaaatatatgttcccaaaagaacttatataagaatgttcatataaagccaaaaatagaaacagcccaaatatccatcaactgaagaatgaataaattattacagtggaatactgctgagtaataaaaaagaatgaactactgttaacaaccatatggatggagctgaagaacagaaggacataccctatgaatgcatttagataaaatccaagaacggatgagaccactctatggtgatcaaaagtgttttcttaagagtagggaggggaattaaccggaaagaggcaaggaaggttttgggtggtggaagtgtaggctcactcccattttgggtagtgattacgtgtttatacacttcttaaaactcatccagcagatgaagatctatacattttattgtatgttaattataccttaattaaaaatatatttaaaacccacttttacagctgttttattgaatcctaagtttatttagaaccatttattctgttgggtcatcattatgtgcattttgcataacccaagtttctatgtggtgcatcttgttggcattatccagtattttactgaagcacgaggaaagactcagcttgtgattgtgctcttggacatggctcagagcttcagaatatccaaggaacaggtgagtaacccatgtttctgaccctgggtcctataggacctgtctttatttaccagttcaccatctgtagaacctcagtgttacgaagaagttgaagactttccatatgcctaatcttaaggggcaactccttccagaaactaatgtagctggaattcatcattatggattgagctggatgggtgggaaggaaggaacggtgtggacaaaggattggaagagaggcccttgctccagtttcctgtggacatcgcagaccttctttttatctgtactctccatgggcagtgtcatcgttgggcaagacttctatcattaccactctgttgacgattcccaaattatctacagtttattcctctctcttgagttcaaacgacatatccagatatttattctaccttgctcactctactcagcaatgtgctgccattctcattttgtgtaagtttctcctggcccttccctggtactattttctctctccatttcccttcccattctttccttcaccacagaaatcgtgcatctgcctcctcattccattcaataggcacttctcatgttagaattcactgaacacgcttagttattaaatcccatggcctcttttcagccctcatccttcctggcttctctgtagcatttgttgatgttagctgtccttttcttgaaaggagacctgtctctccctcagccctgggacaccgtcttcctgcctcaccatctggtccctgcccctttcaagggcaccctctgagatggctctcctgagctttatattcttggctctcttttcttttactaagagctctctggactgttttctgatttaaatttctgtttatctgccaatgacacccacatctatatctttaggctctcctcccctgaactttaagcctttttttttctttctttctttttttttttttaatttttgagacagagtcttcctctatcgccccaggctggaatgcagtagcatgaacaacatagctcacagcagccgcagcagcctcaaacttccaggctcaagcagtcctcccacctcagccactcgatatctggaactacaggcatgcgccaccatgcccagctaattttttttttttttttttttttttttttttttaatttttggcagagacgaggtcttgctgtgttgcctagactgatctcgaactcctgagctcaagtgatcctcccgcctcagccttccaaactgctgggattacaggcgtgagccgccacacctggcctaagcctttgtttcgtattgcacgctgaacactccgactcgctgtgtgtccaaagccaaacattctttctccaacaggttattcgtgtggtttgctgtgtgtcctgaggccagtggcccacgcttgccactctggggtccgctctgttgctgtgtggcactccctggagtcatgaatgaagatccataaattctgcctgtgaacttcatgttttctcccatcttctccatctccactgccccagcttgggccctcgtgagtccctgaactattcctgggtctccttgccttgttccttttttttttttttttttttttgagacggtgttttgttcctgttgcccaggctagagtgcagtggtgcaatcttggctcactgcaacctccacctcccgggttcgagcaattctcctgcctcagcctcctgagtaggtaggattataggtgtgcgcaaccacacctggctaatttttgtgtttttagtagagacagggtttcaccatgttggccagggctggtgttgaactcctgacctcaggtgatccacctgcttcggcctcccaaaatattgggattacaggcgcgagccactatgcccggcctgctcctcctttctttaccatccacctctgtcttgccccacccctgccaccagccccgcttccctctcataataaagcttcagctcctagtggaaccctttgtccatgcagtcccttggcccttctgcacttgggtaaaggcttcacattcaagtttcagttaaactctccctcttctctgtattgtccgtgcccctgccccctgctttgcgtttgcattgtgctttgtctcttattaatagttcatgcaagtatctgtcctcatacttagagctctttgggttagtgcctgcatctcttattgcgtgttctggggccagatacagggcctcatatacagagtgtgctcggtgcagggttgccagagtgcagagttgctgcctgtggaccctatgggaagtgctgcttcatcctccctggagtggctcctgctgctggttctgtgcctgcagctcccacacacgcctctgctccttcagatagatgtcctgaagggatgtggagctggtgttgcctgtgggaactctgaggctctggccacaggagcccagcacctgcttaggatcgtgagccctccaagtcacccacggtcttttctgacaagccaggagcgactgctgttttatctggaagctttccagtgggtgatgctaagaagagggattccctctttcgtgtcatgtcaaatggtactcccaggtcctcctcctcctggcaagatgagggaggagggagaagaatggggagaaaccccctgccaaggggtctttctggatatagaggtgccaaatttgtataaaggactgtcttcccaatactgagcccagtgcatttgttgtgactaggctactgatgctagctacttagagatggcagaaaaggctctgcttttccttcctcactgtggcagggccatgggtagtggcccttctcccagccttaaatcaaccaaagaagaggctctatcctagactggctctaccccactgacacagaaaatcagggtggtggcaggtgctgcaggcaatggcgggagatgtgccagggactttggccatgggagcaatggagttgggcacttttaattgatacctttaataattattgttcaagcaacagaaggcaaagtggaattgtttcaaaggcaaattggagcaacaggagcttggaacttggctcagaaatgtgtgcctaccttccccactctggctgttgttcgaatatatttttcctttaagtttccctccccctcattttcgagtgcagcagtcttttccctaaagggagtgaaagaggaaggtgctaaatgaaatattctcatgtagttattatttgcctggggccagttcaagtttctaaagtaaatcaaaatatgtattttagctaagtttaaaacctttctgccttagccatgtgggcaactaaggagaagcagttgtgacccgctgtagaggtgggagctgttgtctctcccatcccccgcgtcccagccctgtgacatggcctttgttctctcgcaggaagtctcgggtctgaagaggaaattgagatccatcttcgggataggcaggcatcatttaagatctcagtatttaaatatatgtgatttgtctgttctaattgcttttcagttttgtttgctttctaaaaatccggtgtgtggtttctgctgtgtccttgagttggtaaaacagtaagagttataggatgttctggaggccgagcagcatcatcaacattcagtgtttgctgagtcgccagacatctgggctctgggatggatggagggacatagtccctgacctctaggaactttgttgtaaggagacatggcaaacgaacttgcagtctcagcagcagctctcccggcgccccctcctgccctccccccgctgtcccgtgtttctacgcagggtgcatgcagaggttttcaagtgtgagtgggttgctgcagcttgactcaagaacacttccccagcagggcatgctcctgggggagtttcacatgaaggcaactgaagaattctggcttgtccagaccgccgctctatgaccttcagtgagccaggcaccgttcggggcttcatgggactcctgctgaatggtgagccggtggtcccctgggtccatagtctcttcccagtaagactgaaggttctgagtcgagcagcaggtacggggccagcctgcccagggcgtaaggacgaccacccctggcctgggaggagtgccctcagccactccagaagtagcgtgggcatgtgccccgtgactggcagaccagtcagccctcggtggggcccttcctgtccagcccttctgctcctgccccacctgggagccactgtggtcctcagacctggcgcagttccagcctctcccgccccactgtcattcctgcctgcccatcacagtgcccacaaaacccagaggcctcccagccctattgccgtggtggtctgccttccggctccctcgccagcctcgtggcctcatgtcttgtcactttttccttgcctactggagccaggctggccattttttctccctcagacgtgccaagtaagttgctgtcccttctgcctggacccccagacagtgcccaccctgtgacttgagaaccccttctttgctcgtcaccctttatgaagaagacatcccatccccttctgcctgcatcattttcttccaggcacttaatgctatccgtcatcatcccacgtcctgtcccctccagggtgccaaggcacacgcagaggggccgttactccccctcactcccttcacgcctcttgtgtccagcagtgcccacggcaagcaggctgacaggccagggttcttgccttgtttctccaccatgccctctgctctcaagtttatctcctggctctggaaatgctgcccgctgctcgctgcaagtgtgaagccagaatattcaagaagtatatttaaagtaaaagttgagcatgctttccccaagaaaaggttttcatgtcagtgaactggcaacgcgatcacctcctgatggtctactgtcaactggaggctcttaggaaagtggctctgtcatcttctccagggtttggtgcagcccaggttcatagttgtggattatagtcctcgttccttttcttggggtagagagttagggaaatggacatgaaaatttttaaaaatatgcttggttcaactttgataacatacccttcatgagactctggggttatggcattgtgagctcaaccccagagctaggtaggagtcttcgtggaagtgctcctggcttcgcctcccctgcagctgctcagtgggacagcctgtgccagggcccctgaatgtgcagttctccaccaggagttgttattgacaagtaagtgtgcaatattaatttagccagatgctggcatcttcagaatcacacatgagtattgagaagtcatggctgaaactgctcgatcaatttaaatttaattaaaaagcatcgaatcaaagaataacatggcgaagtacaataataaccacaagcatctgcatcattttatatcataatccttttaaaaatttttttccaatggtgacaggtaggattaagcaggctgacttgctacgttctcttctactcctcaagaaaacaaggatttcctggcctctaaaagaaaactcaatttatttgtctgctttgatcatctgaagtattagatgtggactggagaatccttgggacttttaataatttagatgaaaggacacacaaagtcacctaatactacttaataatacctagtacctaatatttggatacagtatgtctgaattacttccgaatacttgtgaatttctaagcaaaagtatagttatttcattctcaggaactccctaaaaatgacaaagaagtgcttctggcatcacgagggaggttggaagcaggcacaatttggaaattcagagccagaaaaggcccatctccagcagggtaacagttctcaggttggggcggggggcctctaccctgcagtgggctctacagcagacccttgggctggcagacacagcaggcggtagagctgtgcctcacaggggtttggctgtatgggattggcgcagcccatggggcgtggagggctctggtctcctaaggggcctctgcctgcctgtgagtttgcaatgagggactaactggagcaggtggggtgacccacaggaggtggcctgggtacattcagctctgtcctggactgattctgtgaccttgaggatgagccagatacaattaatctgtgtgcacaaaaagacttggggaaaagactcctgagtgaacttcctgggtctcccggttttcaggctcagctctaagcaaggatagtggtgacttttggctttggcccctctggtgttaagctgaagccaaggaagttttcctgcctctgcatgtacttaggctggttgccccaagggtggcccagcctgtatggaactctctggagcagctaacctggtccaggtcaccaatcctgaaaatcagttggcctttctcacaatgtgccattgtggaatttgcagcaatccttgtttgcttttggctttatctatatattgactaggtgtttgggtccaggccaagccacttgctgtcctcttggagttgacatgctaaggcactagtacccgttatagggcccaggtggctgcccagcaatgcaaggggcaccttgtttattgttctcctgctgggtcataattaaggttcactattcagatgattccaaagccttcatgggcttgatctaggtgacctgctggtttgaaaggagaagctgtagtctcaaaacaccagtatggcaactgtttttttcttctttttaccccagttttctttcagcttctgcataggcacagagtcacctgggtggccccaaacttctttttagccaggctggaacgtaactttgcagggttcattccctctactgaaatgtttttgctacattggaggctcagctcattttttgaggggagcagggtggggagggaaatgctggtcttgtttcttgaaaggaaaatgctaatgtaacttgacttgggcctgagctgttggaaagcgggtctctgcataccttgagtccctccaacatgtcactatctgggaaggtcattgtgtccttgcagtccatcttgtgccttttctgtttatagagcgcagcaaacagggtcaggaacccatgctgaatatttaatgaggaaatatttcaaaggcggaggtgtgcttgcctgtcacctactggggctatatgtgggaacccaaggttgctggatccgtggagctttggacccaggccctgggctgctagaaccctgtggctggacttcagcagctcagaaccttctgctgggggtgctttgttcataattgctcaacagtgaggaaatggaagtggcgggcaaggagtggacttgccagggagctgtgtgtccccattgctcgcgtccaggatgtcatcctaaattgcagtacatctgctaatgaggagacaaggtgttaccttccgtttggagcagctgcattaattacatcctctcagacatcccctgtgcctaccactcctggccagcttcctttgttttaagttaatagaccaaattggagggaaagaggggagggtgtccttggagaccaggtgccctctgctccttgaacgtggtgaggacgttagctcaggactgggagctggtggcaaatggcaggctggctctgtgaggtggtccttggagggagttggggcccaggaggccacctgcatgaagaagcccactggagctgagaggacagtacctggtgtcagctccttcgacctccctgtgaccttgtgggggatgaggagaaggggctgagccatcctcctgcctgtgagtaattatcgtcaacacggagagagagatatgagccacaaagccagaaaccagaaaacaaaggccctgtgcagtgtcttcctgtgtttgagccatctctgtaagtgatcttcctgtgtttgagccatctctgtaaatgatcttcatgtttgagccatctctgtaaatgatcttcatgtttgagccatctctgtaaatgatctgtaagacaggtagaccttcatagggctgagaagccccctgtccgaggccagatccacccctccctttaccaagtcccccagaaaccccgctggtaaggtgctggctgagctcctcatctgaaaaatgggaaggccgagaaccacctctctggtctcttgtggaacctaaattaacaacttcgagtgattccctcatgtgtttcctcgcttgctgtctgcgggctctgttccgcgagccctgcatcaagcatattcctggcacacactgagggcacaggagatatttgatgagcagctgaatgtgacagtgatctgcacaatgctagctgctaagatcaactccctttgtcttcctgaatccctgctctctttcccttctttctcttatctttccctccccttccctctcccttcccttcttttcaggctatagctgaagggtgttgtttgtaggatccccggattggtgggtggctctagtgtgacaggcctggagggctgagcagtgtgagcctggcttaaggaacataagacagacttgctttacttttgcagctcaattgcttggctttcaatccctggattagtgggtttcataggagcctccccaggaagtcttgcacaatggagttcattggcttgagtagctgtaaccctgaaggtcaagttctttccaactggctgcttcaggatgcttagcaggccagcggggtaagcagcagtagcatccccctttgtttctgaatgagaaattattcccaagaagtcaccaagtgtgaaaatgtgtgttgtcttgctaatgggacactaatgaaatattaaagtggctttcttcctgtcagtctcctggggaccactctatcctctggattttagtctgtctttacataaagagccccggggaattaacatttcttggtacttttcaaaataaccttggtctttctcatgccatagtaaagaagttcatgtttccgttagataactgtctggcttagggaggggctctgtccctccgcaggggaggaggattttggtcggccctcccagcagcctgtcctccaggcggatgcctgctcccagctccctcatgccccacctctgcctccctctcagcagaagactaccccagttcacaggggaggcgctgtcatactgccccacactgagcttgagctgggagccaggcgtgctgcccgcctccatgcccgtcactgaatcctcccactacccagtcggcagctgggagttgtttctgtttccactgtgtggggagggaagcttgggcaccaggaggttgtgtggccagtcacagaagcaggatttgaacccagcccaggccctgtgaactccagcgcccagcgtggagttattgccttgccagcacctccctgtttttggctacaacttggtctccccaggctgccatcagcatgccgtgaccttgagtgatttacatgatctgtgctcaggttcctccactctaaataaattccctaagtgctttccttcctcttcatgtttgtaaacacttctggggacaaaaggatgtggaggaaggggtcgtattttagaggccagtttctcctttaggtccatgccctgtctttgctctggcggccactgcttggccccaagtccccttggcctggagggtgagttggcctccccaccctccgcttgctctgacccagtgtgtgcagtgccacatggccagactgtttccatcaggacggtcagagctctgctgaggagcctgcagaaacctcccagatctgcctgcttttggggttccctggccctccagccttgttggggtgccctccccagcagagccatcatggtaacgaggcattcttcccctagtggtcagcaccctgcttgaccccctgcgtggggtaccttgcctccctttccccctgcccccagcttcctcctgcatagactcagattgacttcttcccagaagtttcttcctgccctgggtgctgatctcttcttttcctgagtattttcaagtagctttatggatgagcgtttctgtttgattcagcacaaactgtgctgtgccaggccctgtgctcagttccagagatggtgctgaggaaggtcctcaggagggagattgtgggaggagaggactactagatgcatcacaaaagaggcagcgtggatgtgggttcttaaggcagagtaggatgtttgaaaggtagagatgggggccttcctggtggaagggactgcatgagtacaggcgtaggagcaggtaatgatgaatttggaggcaaatgagtagtatttttgtctggagcacaggatttccatcagtgtcctgagaaaggagtaaagaggctacaaggccagcttcttcactcatatcatctcgtactgcttttgggacactgggcacaaacacaccgacctatttctaagatgatccatttgagcatctgcctccctcacattaatgtaggttgcaaaaaggcagggctcatctctttttttttttttttttttgagatagagttttgctctttttgcccaggctggagtgcaacggcgtgatctcggctcactgcaacctctgcctcccgggttcaagtgattctcctgcctcagcctctcgagtagctgggattacagatgcctgacaccaagccctgctaattttgtatttttagtagagatggggtttcaccatgtcggccaggctggtcttgaactcctacctcaggtgatctgctgccttggcctcccagagtgctgggattacaggcgtgaaccaccacacctggccatctctgactttttcactgttctacctctgtgcacttgatatatttaacagatgctatataaggctttcaaataaatgaatatgtactctgagatgaggcggattctctcacaggcacatgcacacacggctatcggctgccctagctagtggccatgcaatggccattttttgtggcctccgactagtggttaggctgtgtggggtgctgtttacccactggtggaacctattcccaggcaggcccctaggaaggggtggcacatgtacatggttgggacagagaccttttccctctttaaggccaggtctggcttgaacgagccaggggcttttagtttagctgggctgaggcgctcatgtggccagggagatgctgggagcctgcagactctgggatgttactctgcgtttttttctcctctccccagaaacacgtttttgtctccatctgaccaactttttaatcttaatttatgagcctgctgtagcaccagtaaagacacactgtactgcctgaaagaatcactgctgaattctaattctgtgcgattcaaaggcatgcctttggccggagctgcttcaagaataagcagagcgggaggctcggccctgctctggctctgtgggcttgtcaggaagctttgccctggctgcctcttacgggcctcaggcttaattaagccttctgatttatttttcaattcattactttttgaaaaaagaaaagccactttaatggaagcttttaaaatccagacactttggattcctctactttgtcaggcaaaagtggattcgtctaagtagtttcattaaaaaagaaaagcatatatttatgaaggtttcagagattagatttttttactcctttcactccaggaacctaaaagccaaacttggaaaataatttttgtggttaggtatgtgcattcactcagccaagaaatctagtaatttcataagtaccctggatttctgcattttataatttccctgtcctgtcttcttggtgacttgggttttaattcttttcctgcccagcttcctgatgtgggggcattggtacaggctgtggtttgagaaatttcacaggaagagaagaagccaggccggaagggttttagtggagccaaggtgttcaagaaggtgggagcagtgcagcctgaagctagagagagtggacaacgtggtctagaaggagaggactgtgggagggagggctgtgcagtggagggctcatcacagggcttgccggagagggaggagaatcacagcagaagcagcagccggcctctggtttccagccctgtcagccatggccactggcgtggtgaggaagatggagtcagtagcattcatggtctctaagcaagcagtgatcctatatgctggcgaagcctgtctctctgactggggcctgcagacaggggtggccctgatgacttctccaagaccgtctatcctacaactgagtctctgaccccaccatcggtcattcttagacttcagcatgggggactgatcccctggggtctgtgcattaggagcccttgaatgtgccctagctgctttctggtgggtccctggcacttggagtgggtggtggagccctgagtctcctgggcatgcctgtgagtgctgttcgcggtctgttcccaggtgcagacatctcagaggcgaccaggctgccagagaaggggacgagaagggagccaggggcatgtgatgtctttgtgttcttcctctttgctttctcctgctatcgggtgggaatcctcaggaccacagagacctccgggtctcaccctgcctgggctggattcagctccaccacctgtcagcgcagagcccagggcgcttcccgggcatcacagagtagaaagctcatccgttttccaagaaaggacactaagacgatggccaaattgagttaggagtgccaggaatccagatccaggagccgccggccgagttcctgtaaggcccgccccacctctgaatgacaactgctttccgagtttctgcagggaaaccaggctgctctcccccagcatttacggcagcttgacttacaggccctcatgtttgctgcacactccaaatcaattctctctccttctttaaacttttatcactttgctgtatgaataaggccactgattttctaggttccatgtgcttttatatcaggatttttctttcttctctcctactttctccacaagcttgttctgaacacctgctctgtgtgagacccatggtgggctccctaggcatccagagatgaactggttgtggtcctgggcctccaggagttggcactctagggagggatggggaagtagcctcacagtagatacgttttctgctttgttcacccattgagcagatagatacgtcatggacacttattccgtgcagatgtcatagcaggtgctgagctgtacaggtgatgaacaagaccaatgtggacctgagcttgccgtgagcttccactgtagggaggcggaggcctgttgaggtacatgaggggacaattacaggccattctggagctcatagaaaagcccacgtagtctgtgtggggtgggtcagggaagacttctctgagcaagtggtgtctaagctgagacatgaaggatgagtgagagttagccaggtgaagggggccagggagagaaagattgttccaggcagagggagttgccctataaagagatggcatccagggagagagtggcatgttcatgacagtggaggaagccagagggtttgcagtgtggggaatgagcctgttcatgacactggaggaagccagagggtttgcagtgtggggaatgagggtgtggctggtgcaggatgagggtggagttgtgtgcaggtgggcgggatgcagggcctggtaagccgtggtggtttaaatgaagtgccgtggagggcctaggagagagccagctgatgagatatctgacttggagaagcccagggtggcaagattggatgcgaggaaactgttaagagaccaagaacttgcaattattaacctaggtgacagttggcccagagtgtggcaatggagctggagagaagtgacagattcaagagattggtaagaaaaggaatctgtaggacttggccatcgatcagacattgagggtggggggaagggaggcgttaaggacagccctgaggtctctgttttggcacccactgccatgacccaggaggagcagaggagagttcagttggaggccgccctgagacagccaggtgcggctttgcagtaggatttatgggcttgaaattcagagccaaggatagcccaggaaatacagatttgggagtagagaggaagacccacaggagagggcagagtggggtgggggagggggccccgagaaagacgcagcaaggaggggaagggcagaagcaaaacccatcgggggcggggggggacatctacatgccatctttggtgctgtgaacaagggacagtatttcagcaggtggaggccatgggtcacagcgaagacgttccaggtagctggaccaacatgaccaaggtggagaggcaagaggtgtccatgctgtctgggacctaggctgggtggggctgggttaggcctcacatctagaaggccccaaatgcccaagttcttgggccttgcttgcttgtctctaactttccttctgtggctcctaatggtgaaggcctcccatgctcctgtttgggaagaattatgcaattattcctaaatggagtgcatgtcagcagccctggcactgaaaagggaagacatattggaggaggagaaacctttcacccagccctaaaccagctgcttctggagagtactgaagaagaataatatttttttaatctaaaagaactttacatttatgcttgactgaagcacaggccacatttgtcctgggagccaatgagcagacagagtttgggtaatctatgcaaaggcccctcagctgccctgcatccatcatcccaagtgacagaatttacatcattaatcattggcagtaatagaaaagtcattggaatagaatgttgtcacagataaatgtctcccaattgcatataaatgtctcggctttactgtactatttgtgcttgagaaatactgtggcttcaaaacggtatttatctggcattgggaaaccatcaacgccagcctgccttgccgacagcacctcccgaggaactcagaacttcccccgtgggcctcaggcccaggatcgctgcacatctctgcccatgacaggagttgggcagagggaggggaggctgggctccttgggacttcctggtggatgacgcctggggagttagaaaacactcaagttcagtcatgcccaccgcgttcccccagcctgtcaccctgtggctggagggtggcttgctgccacttgatgcagagaagaaaggagggtctgaatcgggcccagcagaactagccgctctcatggcctcaaattcaagggtgtggccgctccaaaggcaccacaggccacagagaaaggagaggcgaccctgcaagctagaagccaaagagctgaacattggaaggcctccttaccatttttgaaatgaagcccacagtggttttgggctggcgtctttctgttttgtgacctgaaaacactctgtttttggaaagtgcagatctgctgacacctttttccggaggtttgtgtgtttctctccgtggtgagccgccctgcctctgacagggccagatgctggcaggaggagggacgtggcttagggagcaaggcattttttgctcaggtttgaaggaattctttttgtttgatccttcacctctctatcccctcaggggtcctgcagccctgctgggcctggctggaggagtgggccccagaggcaaggcaggcaagtcaggggttctgaggcaggaggatgctgcctctggtggatgggcatgtggggctgtgttaagggtgtgcgacagccatgaccagtgagctgctggaagctggagctaggtgtctgagctgacaagccagggcaagtttttgtagagtatattttaagaggtagatctcctctttctacagggaatttcagaaatgtccacttctcagatgtggaagtgatctgagaccagctagctgggtgttcccaaaccttgatgatgaagaccagtcaaatttcagaacgctggtgggtgtattagtctgttttcacactgctgataaagacataccgaagactgggcaatttatgaaagaaagaggtttaattggactcacagttctacgtgaatgaggaggcctcacaatcatggcggaaggcaaggaggagcaagtcaccttatgcggatggcagcaggcaaagagcttgtgcagggaaactcccccttataatactgtcggatctcaggagacttattcgctattacgagaacagcatgggaaagacccacccccctaattcagtcatctcccactgggtcccccccataacacgtgggaattatgggagctacaagatgagatttgggtggggacacagagctaaaccatatcattcctcccctggtccctcccaaatctcatatctttacatttcaaaatcaatcatgccatcccaacagccccccaagtctcagctcatttcagcattaacccaaaagtccaagtccagagtctcatctgagacaaggcaagtctcttctggctatgagcctgtaaaatcaaaagcaagttagttacttcctagatgcttcgggggtacatgtattgggtaaacacagctcttccaaatgggtgaaattggccaaagcaaaggggttacagggcccatgcaagtctgaaatccagcagggcagtcaaattttaaagttccaaaatgatctcctttgactgcatgtcttgtgtctgggtcacgatggtgcaagaggtgggttcccatggtcttgggcagctccgcccctttggctttgtagggtacagcctccctccttgctactttcacaggctgttgttgagtgtctgtggcttttccaggtgcactgtgcaaactgtcagtggatctgccattctggggtgtggaggatggtgaccctcttctcacagctctactaggcagtgccccagtagggactctgtgtggggctctaatctcacatttcccttccacactgccctagcagaggttctctgtgagggtcccacccctgcagcaaactttttcctgggcatccaggcatttccatacatcttctgaaatctaggcagaggttcccatacctcaattcttgacttctctgcacctgcaggctctagagtgtgtgaaagctgccaaggcttagggcttccaccctctgaagcaacagcctgagctataccttggtcccttttagtcatggctggagcaactgggacatagggcaccaagtccctgggctgcacactgcacgggaaccctgggcccagcccacgaaaccattttttccttttaggcctctgggcctgtgatggaagaggctagcatgaagacctctgacaagccctagagacattttccccattgtcttggggactaacattcggctcctcgttatttatgcaaatttctgcagcaggcttgaatttctcctcagaaaatgggattttcttttcaattgcattgcaaattttccaaacttttatgctgtttcccttttgaaactgaatgcctttagcagcacccaagtcacatcttgaatgttttactgcttagaaatttcttctgccagataacctaaatcatctttctcaagcttgaagttccacagatctctagggcaggggcaaaatgccacctttttgctaaatgtggcaagatgccactctttgctaaaacttaacaagagtcacctttattccaattcccaacaagtttctcatctccatctgagaccacctcaacctggaccttattgttcatatcattaagcattttttgtcaaagccattcagcaagtctctaggaagttccaaacttttgcacgttttcctgtcttcttctgagccctccaaactgttccagcctctgcctgttacccagttccaaagtcacttccacatttttgggtatcttttcagcaatgccctactctactggtaccaatttactgtattagtctgttttcacactgctgataaaagacatacccaagactgggcaatttacgaaagaaagaggtttaattggactcacagttccatgtggctggggaggcctcacaatcatggtggaaggcaaggaggagcaagtcacatcttacatggatggtggcaggcaaagagagcttgtgcagggaaactcccccttataatcccgtcagatcccctgagacttattcgctattataagaacagcatgagaaagacccgtcccgctaattcagtcttctcccactgggtccctcccacaacacatgggaattatgggagctacaagatgagatttgggtggggacacagagccaaaccatatcagtggggctgacccaggatggccaacttctgatttgaccaaatgaggccattaaaagccagttgtcagctactgtatcatcatttcataaaatgaaataaaggaaagaatattttgacaccaacaatataagaaggccatcatttcaagatacaaaatatttcttcagttgattataattggttttatgaaggatttgctccactatacctgtttttttaactccccctttttccttatttctcttttttttgccaaaaactcacacaattctgttctgggtccccaggcctctagtttcagatgagcaaaagcaggtgcagagggaagggacctggccagggtccacagctagtgagatttgtgtattgtttcagttatttctggcttcataacaaatctctcctgactcagcagtgtgaaacaacagtcatttattattatcacctctcttggttctggggctggcccaagcagcttcacttggggtctcagtgctgttgcagtcagatagtggctgggctgtcatcttaaaggcttctctgagtgggtctgggaagatgcaagcatttggggacagagcagccagggctcctctggcatccctttctccatgtggttttcagcatgacggctgcaggacagccacatttctcccctggggcctcaaatgcatgtcctgagaaaagccggtggatgctgtgttgcctttcatgaactggccttgaaagtcacacggcatccctcctgccgagttctattagttacaagtgagccattaaggccagcctgtattcagtgggaggagaattggcctccacttcttggtgggaggagtgccagaggatttgcagacatgttttaaaaccacagtgtggatccaataggctaagtccaaagcgccctagggagggccaggttttaatttggagcgctgggatcttggaacacacccccttccgttaagtgttccaggaatgagtctgctggaggatcactccggtgacggtggcaagctctgcttcctggtccctgcttgcacttgtatgaagtgataaatttcacgaataaggtagattccatcaaataagtatcaattaagctgttttatgatctagttgagatgatgaattaaagtcgatttagataaatgatcagtaaaagaacagagacttcaggaagacagcataaactctctgaattgcaggcactcactcttcatcagaaagcagcctcccacacttgtgcacttgttgagcgcttgctgtgtgcatagatagcactggctggtgctgtccgaccagtgatggctgcagtggtatgtggaagcgagaggggtcccagtttgcactcctgagtatctgtgatccaattcgggtcatccctgtgccatctgttaggatctgagtgtgggaagggggagcactgatctcttttcaatccccattcctgggtgtgggctacctgctttcagtttcagggaacagagatgccctcaaggttcctgtttagaggggtttattgtaagagttctctgaaagatgaggaagagaactagaccatcccaaagccacgaggcccagcccctggctcagtgccggcagccctccttgttgcttccagggaggcctggcttattcaaggtccacaggtgtgaaatggagggtggcggggctgggggcttctggtatgcaggaagagggcagccacactggtggtttcctgtggcggtgagctgggggtgttggggtcagcctgggaagcggggagtccatgtgagtgaccaatgtcctagatcctctccttctttcatggatagtaagcacctgtcctatgtcaggcacgcctctagaaacagggcagtgaacagatagacacctttaccttcccatgagactgccaagaaggtgatgtcctctctctgaatcccctagacctgccaatttggtggataattgttttctatcacagctcttggcaaaaggaaggggaaaaacaattccccaaggtgtagaattcaccagagagaacccccattactcgcccaagaccattaggctggtctgtgacttccaaaatgaaggggctacctggttgtgtccacaagaagaaaatggaggcttacccagagtcagtaagagactgttaggaacgcaggctgagcctggctggccacacggcatgactttgttcatgtcatgaatatttattgaacacctgccacatgccaggcactgttcccgggactgggtgtgaatagtgcacaagagggaagcctccctgctctcttggcgcttaccttctagctggggagactggaaacataaagatggtgcaaaggccgagtggagaaaaaccaaactgccaggaggggctcaggctgggaggggatcaggccagctgggagggggtcaggccagctgggagggggtcaggccagctgggaggggcttgctgagcggaccttgagcagcctcctgcagggtcctggagtcagtggtgcccaccccacccctgagctggggctgagggctccacgactttcatccccttggggtgcagggaggtgaccaggggcggccctccctggcctggcttctccctctttcacccactgagtgtcgactctgcctttctgatctgggtccctgtgaggaggaaatatatatttagactcttctgtactttccgtggtaacagccgctttattcctggtgaagaatgaggaaaatgggtcagctgtatttactaagaagcatgttccagcttcttttccgaggctatttataaactttaaaaaatgcgagctaagtttttgcatcttattggaagccggagtgcctatgaataccctttctattactataccggggaatctagcacttcggaattgaaatgcgttgagtagggcagataggaatcttgcaaatagtgattttgatgaactctggcagcccacatttgcctcttggtctgatttctctgggagttttttcatgtgacattggtgtagctttcttggatatggttgggggggactgtgctgtggctacaaacagctgactggctatgctggcccttcacggccggtgtgctgacaactttatctggccttggagccttgaggaggggctgctgccagtgactgggccctgcttttgaccagccttgcacactgggcagtgggcagggggcccaagggcagaagggcctcctgagcatggggacttggagaagccatttctgaacctgctccatccctgccttgtctctagggggaatggggccatgaggcctctagaagcttcgccttggcccaggcctctttcccacatttcttgatgggccaagagccgccagcagccctcctgtctctcatgcctcccctgcgcgtcatggggttacacgtgtcctcacactgtgcctcgtgcaaaaaaagggtcacttctccctttctctctaagtggcctgacctcgctttcgagggggaaaggcttgggggtcctacattttaggcccactctggtggatttaatcgaatggctcaaattgcctcttgaggtaacctgtgttgaggctgtgctcgatctttccaagtgcctcctctcctgctcccctcggcgccttggagtatggggaggagtgcgtccctgtagcctggaggtagctgagggaggggtctctgccctccagccactccttggtaccctctctggttccttctgcagagaggctggactattgagccccaggagcaactagccccgtggagactttgctggggaatcctggcacccataagtggagccctggtcccactgtttattttcttggcttttcaatacctcttcccaagaggcatctccattctgacagtgtgaggtcactggagcctgcaggccatagggccctaagctgtccgctggctgatccatcaccaggaggcagggtagtagggcaagaggataggcatggggcctcctccccctcccggctccagctgtaaccctgaggacctgacttcctctccttatgcctccatctcctgtgggtatcatgtccataatctaagtcacagccaccactactgccacttactgagcacttaactctgtcccaggcgctgttcctccctgtgtcatctatgaactgattaaatccacagggcaaagagggctgttaggagaatgaaataagttactcaaagccacttgctcaggacagtgcttggtggttgtcactaatgatcactctcatcatgcctatctgccccacgttgggaggggatgggccaagttctccccagagcagaagttcccaaactttcttgcatcttgtactccaagtgcctcagtgacctaccttcctttcctctcctctcctctcctcccctcccctcccctctcctctcctttcctttcctccctccctcccttccttcctttctctttctttctctgtcttccttcctccctccctcctctctcttttcttttctctttctttcttttctctttctttctttctttctttctttctttctttctttctttctttctttctctctctcttttcttccttccttccttccttctttctttctctctctctttctttccttccttccttccttctttctctctctctccttctctctctccctttcctttcctctctctctcattctttctttctcccctcccctcctcttcttctttctttctctttcattcccttccttccctttcatttccttccttccttccctccttctctccttccttccttctctcttttctttctttctttcttttttttttttgaaacaagatctggctctgtcacccaggctggagtgcattggctcgattgcagctcactgcagccttgatctcttgggctcaaatgatcctccgacctcaacctccaaagtagctgggactacatgcacctgccaccatgcccagctaactctttaaaattttgtagagatgaggtcttgctttgttgcccaggctggtctcagactcctgggctcaagcaatcctcctgctttggtctcccaaagtgctaggtctcccaaagtgctagtaatgagccactgcacctggcctcggtgattattttttttttaatttttatttttagagtgcagtggcacaatcataactcactgtagcctcaaactctagggctcaggtgatcctcctgcctcagcctcccgagtagctaggaccacaggcatgcaccaccatgcccagctaatattcattcattcattcatttattttgtagagatgggattttgccatgttgctcaggctgatcttgaactggcctcaagcaatcgaccacgtcagcctcccaacgcgctgagactgcaggtgtgagccactgcacccagccgcctcagtgattttttttcctgatgtccctaggccaaaataaatatctaacagttccgtttattaagtagttagatataaacaccttaataaacatttgtgtcctaacaatagctgtttgaaaatataatgcacataattttaaaaattccattcttaaataaccaaattacgaatgggatatgtgtgcctatcaggcactggacaactgtaaaatcctgggatcagattagacaccagtgccctcatttcctgtttcatattgatttttgtgaggtactcactttttctttcagcagccactgaaaccccagctttaccatggcctgacatcctcagaagacatgcaggacagtctaatggtgaaactgtccactgcctcaagctagtgggaccagtggtgtccggcagatgttaagtattgcttgtttcccacaaaaatgtaaatattcctgcaggtctcctgtgagttagcagaggctcctcaggcagccttggtgcacagtttgggaaccgtgtttctagtgacttgtggccttcccctagctacccaggaaactggccaataggcctgaggctctcagactcctacgtacccatctggcagttgcaggagagacgacaaggatccaggtgtcctgccttcttcctgcctccctcctcccacaatctctcaggacaggaggggccaggctccactctctccgctcccctgcatcctgttctcctcctgcctggggcatcagcctcaggacccagccaccagcgctggaaggggcatcttctttgtggccgagggagaactcggtgatctgaatcctctaggatgtggattcagaaaaccctccctcttaacagagcgctttcaagtctgtggccacgctgctgatgctaacagaaatcagtcttgccgttcagagcagagaattccctttgttgttttggtgcgtacgtgccctctgcctgaagtactgaaatcattgcttcaaagggcagggagctccccaaaccactagacttataagacagggagtctgaagagatcagagagagaatcgggtgttcagtgcctttgtgttcagcaggtgcttacgtcttagggacaggtcgactgtaaactcaggtgtcttaggataggtgcttctgctgttctagctcccacacagcccctcccctttacctttattcccatctgccctccccaccctaactctcccctgggaagatgcctgccgttgcctgttcccagagagccccttacttgcagtttcagagcctgctgcctcactcctcctccctcactgacttctgtcaatttgaagatctcccagctcattctcaccccaggacctttgcacttgccattccccctacctggggttccattatcaggcccgtccttggcttgccccagctcattttccaggtctcactttaaatgttactccttaaacagcccagccaagagcaccctgtctaaggcaggcccccagctcctctgtttgctcctcatggccctttaaatgcaagcttcatcatgcaggcagagaccacgtccatctgcatctaccatgttcactgttgtttacttagcacttagtcctgtgcctggcccatcggaggcaccagcaagcgtgtctgtaggagtggggcttccgcaggacagtgctgctttttattattatttttttaaatagaagggacttaagggccaatgacttttaattctgctgagtaagatgtagaaaaattacagctaccatatatcatcaacatgttgtaaaagttggaaggacatactcttagaataaagaacagttcttttcttttcttctctttttgttttgtttcgtttcgtttcatttcaagacagagtctcgctgtgtcactcaggctggagtgcaatggtgcgatctcggctcactgcaacctccgcctcctgggttcaagtgattctcctgcctcagcttcccaagtagttgggactataggcgcataccaccatgcccagctaatttttttttttttgtttgtttgtttgtttgtttttgagatggagtgttgctgtgtcgcccagctggagtgcagtggcgtgatctcagctcactgctagctccgcctcctgggttcacgccattctcctgcctcaagcctcccgagtagctgggactacaggcgcccgccaccacgcctggctaagtttttgtatttttggtagagacggggtttcaccatgttagccaggatgatcttaatctcctgacctcgtgatccgcccgcctcggcttcccaaagtgctgggattacaggcgtgagccaccgtgcccggcctaatttttgtatttttagtagagatggggtttcactgtgttggccaggctggtcttgaactcctgacctcgtgatctgcctgcctcggcctcccaaagtgttgggattaccggcgtgagccactgtgcccggcccttaaaggacagttctttaaatggcataactttagcactattgaaaacctgctgtgtcgtccctcttctcacctcttggaggttggatgaaaattctccttcggtccatgagcacctaggaggtgctgcatttgccctcggtggaacttagtaacccattcaatgtggtcttgaccgtgctctcgtggtatttgtcccctacaccaggctgtaaatgctgtggcgggacatggtgttttaggatgagcctttgcaccaggctgtaaatgctgtggctggacactgtgttttagggtgagcctttgcacatgctcttccttctgcctccagtaccttgttggtctctgggtacctccaagttctgcccagacgccctctcctgaagctttgcaggactggccttgcctctcctcgatccttggtaatcactgtcgactcgcctgcctgctgggatccaagtcttctctgttttggaccagggtgctggcgtaccatgttcccaccattgtacaccgtcatatgctgaaggatgaaggatgttggctggtggcgactttgagtatgtggcagaaacagataggccaccctcaaggactctacatggagcccactctgtctttctgtaactgattctaatttctacttcagtctttcattccaccaggttacagaaacagaatcacatttaattgtgggttttctcagccaacagaaagttcctccagcctcctgggtttgcgcgcatgtgaggagctcatgggggttaggggttcggccctcatcactgctgttccccagctctctgtacccctgtgcaggtctatgctgtacccccctttgtcctaactgtggggtctctgaagggaagggtgagatcctcagctgcttccacacccctcttggggagcaagggaccatttggctgtcccctgaaccctagcagccatctctggtctctggggctcacggaaaaatgctcattggctctgcatgaggagtaaggctcagcccctgctctggagcttgggcctctctggagtcttagcccactcttcaccaggcgtgggaaggagcatctgtttccttctcctccctcagcctggctctgggcagggagtggcccttgctggccttggctccgccgcgtctcctctgcacacatctgggccctagcttttgaaattctaaagccacggctttgattcttctgttctctggttcctcataagggcccttccctggggcatagatgcctcggtctggttagaataaaaggctacaaggcatgggggcaaaaagaaacctccgttcatacccccagtggttaacctgcagctagctgctcatctgagggaagcaagagggtgtgggctgggcacccctagggagcttacttttaaaatgtgcctgtgggtgtgggtaagtaaatgcagaagctatttagcattctagcttatttgggtatttttatttacttaaaaatcttaattttcagaggtaatatgtgttcggcgaggaaaggaaaaacaggaaggtgaatagaatcagagtcacttatctcagcacctggagatgccctcattccatcctggcgtgtgtctctacaggtagcgtagtaataaaagtagtggtaattatagtactaaatggaacacacacttaccgagggcttaggaagcgccaggcatttttttaaagaatcacgcagatgataatttaggaggagcctttgtacatcctcttccttctgcttccttgttgatctctgggtacctccaagttctgcccaacgaactaacgaccctgtgatgtggatattactgttttcctcactgtaccaatgaggaagttgaggcattaagcattcatgggatttgcctacgctacgtggctgggctgcctcgctgtgcacacatacccccacatgcctgcagatgtgcacattaatggccaaggtatagaatcagggttcctggtctagtttcttttgggagagaaaccatatctttgttccctggggacttggtacctcatttgctgaatgaatgaatgaggagagggggatgcttttgaatttggatgcaagcttttctaccatcggtcacaggcaaattactgttccatttggcaattattatttttctttcctgggcttataacacctgtacgcactggtgcctccttgtgtgacctcagggaacaccattcacattgtattcttttctgaaaacagctttattgaggcataattgacatataataaattacacatatttaaaatgtacaactcagtgagttctggcatcaccatcgccaaatcaagataatgaacgtacccatcaccccagaagtatccttgagtcccttggtgattgcttcctccagggcctcccccctcctcgccaggcaaccaccactctgctttctgtcagtctgttagttagcatttctagggttttatataaatggagtcatacagcatgttgtctttttttggggtctggctcctttcagcataattattttgagattcatccatgttgtgtgtatcagtaattcatttcttttcattgctgagtagtgttctgttgtatggatatgagacaatttgtccatgtacctgttgatggacatttgggttatttccactttttacttttataaataaagctgctgtgaacatttgtgtgcaagtctttgcatggacatatgctttcttttctctcgggtaaatgcctaggagtgggatggccggatcatatggaaactgacacgttgctttgcaaagtgaccacgctgttttctatccccactgcggggtatgagagttccagtttctctacatccgcgccaacccttcctacggtcagtctttgtcattttagccattctaacaggcatgtggtatatctcgtcatggtttgaatttgtatttctgtagtaaataatgatgttgagcatctttacctgcatttagccatacccatgtatcttctttagtgaagtgtctattcaaatcttttgtcctttaaaaaagtcgggctgtgttcttattattgttttgagagttctttatatatattctagataaagttctttatcagatatatgctttgcagagattttcttccagtctgtgatttgtcttttcatcctcttaacagtatcttttgaagaacagaagttaattatgataatgtcagtttttttaaatcttttttttttctgtttttagggatcatgctcatggtgttgtatctaagcaatcatcatcttttttttttaattaaaaagatgtgggtcttgctatgatgcccaggctggagtgcagtagctgttcacagcctcgaacccctgacctcacatgatccttctgcctcagcctcctgaatagctgggactacaggtgcatgccattgtgtctggccatctaagcaatctttagctaatgcaaagtcacaaatattttctcctgtgttttcgtttcttttttttttgagatggagtctctggagtatagtggcatgatctcagctcactgcaacgtccacctcccaggttcaagtgattctcctgcatcagcctcctgagtagctgggattacaggcacatgccaccaaccctggctaatttttgtatttctagtagaggtggggtttcaccatgttggccaggctggtctgtaattcctgatctcaagtgatctgcccaccttggcctcccaaagtgctgtgattacaggtgtgagccactgtgcctggccttctcctatgttttcgtctcagaattttatagattttaaaatttaggcctatagtctattttcagttaaagcatatggtgtgaggtatgggttgaggttcgtttttcattttttttttttttgcacgtagacatccaattatttcagcactatttgtggaaaagactcctctttctccactgaattgcattttgcccctttgtaagaaatcatttatccatatatatgaaggtctatttctggactcagttctgttaattgatccggtggtctgtctttaagccaataccccactgtcttgactagtgtggctgtataacaagtcttgaaatcctgtgaatctaagtcgtgttagctctgcaactttattcttgttcaagttgttctggccactcgaggtcctttgcatttccatatggattttagaattggctgtcagtttccagcacaaagcctgctgggattttgattgggattgagcctcacattgctctctgcagatggcctcttctggagctatgccacctgctgtcctgccacaccggtgggtgtaggaccatatgagtgactgaggggccagcgcccgtggtcggcagaaggggaggttattggtatttaataaggcattttcagagacactctgcattgaccttagggtttcaggatgggatgcttttggctgagcccaggtgtcctctgagaaatgtggaccggaaggatgaggcatgctcccggaagttagcatcgctcatggccctcagtcagggcatggcagaggaaccacccctcttgtaaaagaggcacacacagccctcctgctgtaatctgccccatgtcacctgctttaggcattcatatttgaggctccacggatgtggtgaatgggtgccctgggaggatgggtaagggcaggtgtgggaggaatttcctttccagaacattcctttgaggaggagagaaaaggaacttggccactgtggacccgcttgggctagctgcgtgtctctgtgtgttgctggctgtgacaggtactgtggaatccttgccttccaggggagacctgtggccggcaggagctgcccgagatcccggggcaaatgcctcccctcccttcaccaccaccccctcccctctctcccctcttatgcccgcaccatggctttacctagccctgctcttcagtgaaggtatcttgcagagggcgtatggttggagaggaaggcagggctctgaggatgctatgatgtgccatttctttgggcttttccgaggactgctcacttgaggcttcccctggggagaaggagctgttaaactgtcaaaataaaaagtccaccaaactccttaggccagtcgaaagcacctaactcagaccacaggcagcaagagcaacagatttccctgcaatatgttacaaggggaagaaaagactattggggaacttaaaagaaatgcaggaaaagtttcaaagatgggaatatacctagtcaatcatacattaaatttgggattcataaaaagaaattgtggtgaaaatcttcccaaataagtttttattctagaatttgatgacaaatctctcacggcgctggttatcccgtaggtgtggtattctgaaatacaacccgaggcatatatattgtcaaataataaagtattatgaaaccaatcagctgtgagctccccacttggcagtttggaagtaaaaccctttctcctttacaaggccaagtgactcttaattcttcccaggagatttcacgttaaaatgtgttcactgccagctgacaaaagaggcgagtccagatttattaccctggcacctgcagcaaaaaaaaaatgacggatgatgaaaatatatttaattatcattccatgccacatctctgtctgctccagtcgcggggctgcagctgttggcacacactttattttaaagtcaatgtgcttatctggagagaaggctgctctctgaataaattgacttgagggaggaaggaaatggcgatctcctccagacccagctgaacaaatgcagatttgtattctgtgcgcctgctttaattgtctaatccgcccgacatcacatcagctctgggatttggcttttgtaaagaaaacatttgcaaaaagtaaacttttccgtggttttcttgagccaaaatgaatgattttccttcctggactgaaaagtgctggccgacagtggatgctcatgtttctgctgcaggcacggaaatcactgttagttgcatctcagaatggaaggagccctagacagtccctggtggaccgtctccttcaccagatggagaccccgcagagtctggaggggtgggctcagggtctcagaaggtggcaggtcggaaactggagaccagaacttctggctcccaggaagccactgtgtttttgtgactcgaggctgtcggaggtctaactgtttaaggttatgcgcctgagcctggaggatggcctcagagaattgccttcctctttctcttccgttaaaaccttctggaaaataaaaacttgggatggagcagcagtgccctgactgaggtggaaagcatcagatttcttggagtgaagtctgcggggacttaggttggctgctgaaagtctgtgccattagttcctgcctatgatgtgttgttttcgacaaaagtagcccagataataggcagtatctaatgtggcaattttcctatatctcttcttatcaggagaagccactcgatgttttgtatatggtgggatttagtacaaagtgatggcatttccactgaaatgaaatacaatcactggtttagcagttaggattcagggaggagagatgatgctgagtgtttctggtggtgcctggtgtcactggtggccagaggcagatgcctgtggatgggggcaggagggggatgaggtttctgtaaatggagctaactcaggggttgggggagagggaggctcatttctcctgaccttctctttgatgaataaggattcaagattgtatctgctgagcctgcaggacatgagaactgggggaggaaagagagctctggcttatggatttgggctgtgaccagagctcttttgccaccaagctttttgatgtattgaccagaagttactataaaccagagagagggtggggcgtggtgactcacgcctgtaatcccagcactttgggaggccgaggcaggtggatcacgaggtcagccgattgagaccatcctggctaacacggtgaaaccccatctctactaaaaatacaaaaaattagctgggcgtggtggcaggcgcctgtagtcccagccactcgggaggctgaagcaggagaatggcgtgaacccgagaggtggagcttgcagtgagccgagattacgccactgcactccagcctgggcgacagagtgagactctgtttaaaaaaaaagacaaaaaaaacagagagaggattccactgccgtctccatcatcatcaccaccgtcaccattatcaccatcataaccatcacttatcaccatcaccattcaccacttaccatcaccatcaccattcaccatttaccaccaccatcaccatcaccatcatcaccgtcatcaccaccataaccatcactgtcatcaccataatcatcacttatcaccatcatcattcaccacttaccaccactatcatcaccaacaccatcatcatcaccactaccatcatcaccatcaccatccccattcactacttaccaccaccatcatcaccatcaccatcaccattcaccacttaccaccaccgtcatcaccatcaccatcaccattcaccacttaccaccactatcatcaccatcaccatcatcatcaccactaccatcatcaccatcatcatcaccatcatcattcaccacttaccaccaccatcatcaccatcaccatcatcattcaccacttactaccactatcatcaccatcaccatcaccattcaccacttaccactaccatcatcaccattcaccacttaccaccaccatcgtcaccatcaccatcatcatcaccatcactatcaccatcaccattcaccacttaccaccaccatcatcaccatcaccatcatcatcaccatcactatcaccatcaccattcaccacttaccaccaccatcaccatcaccatcatcacagtcatcaccatcataatcatcactatcaccatcaccattcaccacttaccaccaccatcaccatcaccatcatcactgtcatcactaccataaccatcactgtcatcaccataatcatcactgtcaccatcaccattcaccacttaaaccaccaccatcatcaccaacactaccaccactaccacctcacttaatttatgtatcacttcttatgtaccagacctttggagaaatcccttaaattggtcatctcctttaatctcagggggcagatattctgcctgttttacagatgagaaaacagaagtctcggtaagtaacagaactaggacttgaagccaggacttggagtccactctcatagccatacctttttatttaggggctttaaatatatacagtactgttaagattttataggataaaaggatgaaaggagacgtcaactctgtacttttgtcaagagaaatgtttgaggatgcaataattttgagtttgaagactggcccatggggatttcctttcccatgtggctggcaaatggggagagaggtacccccctcagctctggggaccagggcggctgagagactggttggctggggtcagggctggggtggggaggatggaggaggcgctgcagagagctggccctggggacttggttgcgtcacagcaggaggtggggagcaaaggggaggtgccaggctctgctccatgctggcagccctggggccacggcagcaggggagggatgcgtctggggctcttgaaggcttggctggcgggccttgggaaagaagtcaaccatgctgtcctcccaggtctcctgggctatgtgagcagcagcatggcctgttctgctgtgtgtttgtcctgctgggttgccttgttttcacatggtcagtcggagctggtaggctgggccaagtggttcatactctgatctctctgtcctggccacacagcctccaggaagcttgagctttgtttttctggcctttcatgatctcctctggctccctgtggcccatctgggactctgggtttggtgcttgactgcggtatagactgaccagtattatggcttcatgcttcttggctgagctgcccagacacatgacagggctgtggccaccagaagatggagacgtgtcacattctcctcgctgccctgcggccccactgtttacatcagttcccaagacgtttgggcctgacagatatgagtctctcaaagagcagcttttagcagatatttgtcatgcgtccattgtccaccaggcacagtcctcgccctgggacccagcatgaatgtggcttgggaaaactcagggagttgccatgacccatagggctggcccacacactcacatgtgttgttatgagaccctagggcctttgggatttgggttcgtaaccagaggagcaggcgtggagcgtcagaggtcaaggagatggacatgtcatcactagttcagcaggggaactgcgggcaaagaaattaatactgattttatttccaagtgaggctgatgactctcctttttacattaatttttattaagcattttatgtattattccaaaaccacatactatgcagagacagtttagaacacattatgggttgtgcatttcataattatcatatggcctcagtccagaatgtagaaaagaaaataaacacaatcattttccaatagaagggaatcattgataatgtgtggacaggacttggagctgccagcaccgcccatgggctctgggctcaggacccagcacaactccatgcacagcaaagtggctccaacctgtcctcctgccatggcctcccgtcctctctgtctccagcctgcaggggtcctgcttagcctggtcccctgtggcgagagttcttcctctccaccttctgctgtctggaccctatttattccctggggcaggactcagcacagaagcccttcttgctgctcagatctcacctcagagaagcccaaacccaagcaaaccccggtcacccttcgtcacggcgcagggctctgttttcatcttggcacttcctctccaaggcttctgcctagcatctgtctccctgcttcaatgcaagctccatgagagcaggcaccttctctgttcaccccagcaccccaagcaactgggcgagtgccgggcacagagcaggcatgagcagatgctcgctggatgaatgcatgcatgactgtgcatctcctccactggactgtgagctcctccaggccagggacagctctacgtggccacatggccaatgccagcatatccgtgtctaagcagaagtgtgttgagttgagtccccaccctgcacctgtgaaatcttcaactaggtgctgggatggagtttgtattagtcagggttctctagagaaacaggacccctactatatatatgaatgatatttatgtgagatttataaggaatggctcatgagattatggaggctgagaagtcccatgatctactctctgtgaactggaaacccaggagagctggttttggaattctagtctgagttcacaggaacaccactggtgtaagtcccagttcaaggtcagaagaccaaggcccagctccagcaggcaggcagagagagggttctgcttcccctcacctttctgctctactcagatgctcagtggattggatgatgccccccacactggggaggaagccctgctttactcacctactgattcaaagcctaatctcatccagagacactcccacagacatacctggaaataatgtttggctgagtgtctgggaatcctgtgatccagtcaagctgacacctaaaatgaaccatcacagagtccctcctggggacctagtgccaggctagggtctgtgaatcgttcagcagaaaagaagaaatgggccttttgggggccaagggtccagaggagtgacacttaaggactctaggggcaatagaaacgagggcctcagtgtgcactggggattactggagccctcggagttgagggaggccagagaaggatagatggcaggtgtccacacagcccccttcctcaccgacacccacctcttcatctgccaaggccgggctcagcactatcccccatttgtgatggactctgcagggtgtcctgacaggtgggcactgtgctcacaggcaggggatcctcacagggaaaggggatcctcagggggaggggggatccttgcaaggtggggggatccttgcaggcaaggggagattcttacagggaaggtgtgtcctcaggtaggagggaccctcacaggtaggcatgactagtctcattttctgccgaggagcccacatggcctggaagtgcagagcagggatggaactgaggttcgccgacttccagtccctggtgtttccctcgtcctgtctgctgcccctctggtatgtctgaagatccccatagctctcaatagctgcatgtagagttccagcatgactgggaattgttttcagttgtctgcggggcactgggcacagccgcacttgaagtcgtaggacaccattgggagaccgggctgtctccaagagaaagatgcccagtggcccccaaagccttcttgaatcgcacacttaccccagctctccagcttttccgaatccgagtccctcagaggccaggcactggggtgttcattgagcagcaaggaagccgtgaccgggagagtgtggggacttggtgcctgcatgtggctcccctagacactgacccgaggcacagatttaggtgtaaatggcctatttaggaggtcatcccagaaaacacatcagggagggtggggctccagtcagcccagtgttaatgagcaggttagcgccgtgggcaattggggcccttcagtgacagcagggagcacacctcagggtgtcccctgacaggcgaggaagctctcgtccttcatgggtgagagtcactcctgaagtattagtacctagcacttctgggcagtcctgcagtgcaggtgacctctggaagggtggaggccgtacaggtgaggcctgcagttctgctcctgtgcccagccagcagtgcctgggatgggctagaagcccatgtgtccactataggcatggccagggctcttttccatgactgcggaaggagaggtgggagccttggcttggtaaatgcagccactgaagagcctgagaaccaggaaaacttgccgaggatggacaacactggccttgctcgagtgagtcagggctgcgctgctgtcctgggaaagcttcacccacgggcttcatgcaaggctgcccctgtctatgccctgattctcttttttcttttttctttttttttttaaagaaatctcattttacaaatggttttctgcacattccaagtgctgttcccagcatttacaccctgcttcataattggcctatacaatacaccctgttcagaatttttaatcaactatggcaagttgccccagcaatttaaataaaaatatataaatgaatttagtattttaatattacagtgacattaaccttatatatgtacttagcaattttgaacagtattacaattttataaaatattcttcatttggctggtggataaaccccagagttaaaccatgggctcacttggtactgtggctcatgctataatcccagcactttgggaggctgaagcaggaggatcacttgagtccaggagttcgagagcagcctgggcaacatagtgagacccctatttctacacaaaaataatgataaaaaattagctggatgtggtggcctataatcccagctacttgggaggctaaggtgagaggatcacctgagcccaggagatcaaggttgcagtgagctatgattgtgccattgcactccagcctgggtgacagagtgagaccctgtctctaaaaaaataaaaaataaaaccaaaacaaaccatgggctctttgtgccacaaacggagaagggagctgagccagttgggaggagcacaagctgtagccaggtctgccctgagaggcctgatagtctgagtggccctgtacccctgtgaggccagtgtggccagctgtgatgggcagcacggccagacacgatgtttgcgtgtttaaggacttcagtctgtgcttggacactctcactcagagtggcccctgggcagtctgctctgggccgagcagggcatgagaaggtgccacagggcagaacgagaacacgaatgcagaggccccggctccagcttccagtgatttctgttgggggccttcgatgtcctgggcaacgtgctgaccactctgtaagcactatccctgctcaaggtcaccagcaacctgcttgtggctggtgccgtgactggccctcattccttatctcgtgggaccccattagcagcggttaacacagccactccggccctcctcccctcctcccctccgtccttcctcccctcttctcctcctcccctcctccctgaccgtcctcacctggcgtccaggacaccatggttcctggttttcctccctcctctcagcctcctcagggctcaactgtggtccccttgtctcccattgtctaccttggggctgctacagtcaggagcattgagggtccctgtggcagaggggaggaggcacctgatttcagagagcggggaagtgcaacctgtcctgcaccagaaataggtggcgccccacacctcctcactcatttcccaactctgccctttcctccctcagcgtcttctcaacacggcggccagggattctgctttcctttttaaagttattttaaattgtgttaaatacacataacggggccaggcgtggtggctcacacctgtaatcccagcactttgggaggccgaggtgggcggatcacgagatcagagttcgagaccagcctgaccaacatggtgaaacccccgtctctactaaaaataccaaaattagctgggtgtgatggcgtgtgcctgtaaccccagctactcaggaggctgaggcagtagaatcgcttgaacctgggaggcggaggttgcagtgagccgaaatcgtgccactgcactccagcttgggtgacagaaggagactctgtctcaaaaaaaaaaaaaaaaaaaaaagaaaaaaatacacataacatagaattttaaccattttaagtgtccaatttagtagcattaagtacattcacattgtggtaccatcaccatctccatctccagaactttgctatcttcccaaactgaaactctgttcctgttaagcacgaactctccatctccctatccccccagccgctggcacccctgcatttgaatttttgtctctgtgagtctgactccttttagagcctcaaatgagggaaccatacagtatttgtccttttgtgactggcctatttcacttagcacaaggtcctcagggttcatccatgttgtagcatgtgtcagaattttattccttttgaaggctgaatagcattctattgtatgaatggaccacctttgcctatccgctcgtctgcccaatgacacttgggttattgagaactatgccactatgaacatgggtgtgcaaacagagtgactcttttagaacacaggtcagtccgtgacagtcctctgttcaacccgggccttcctgttctctcagtggagaagcccaaagcctttatgatggtccccaggacctgtacaccccaccccatcacgtcctgcagccacactgagctcctgctcttgctcagacacatgggcacactgctgccttatggcacaggcacaggctgctctcctgtcccctctgcctggacacccttccccaggcggtcccatgctgtcctccaccaccctccagtgtttgccccagtgactgcaccacctgccccggtctccctgtgtcacattgcgtcataaccctcccatgcatttcagagcccctacctgtttctctcgtttaaaataacatttatcactttctgacatactacagacagtctttgacttgccgtggttcgttttgcagtttttccactgtaccaatggtgaaagtgatacgcattcagtagaaaccatacttcgaattttgaattttgattttttcccaactctagactaatggaaatgctctgagcatatttaaggtaggcaaagctatggtgtttgataggttaggtgtagtaaatgcatttctgacttaatgacattttcagcttacagtgggtttattgggacgtagccccatcgtacgtcgaggagcgcctgcgtgtggtttgtgtttttattatgtgcattgtctggctcctactctgagagggcagggatcttgtgtgttttgtttactgatgtatcctgtccacctagagcagtatttggcatatgatgggtactcaaatacttgtatgaatcaatgaatcttttttgataacagctttattgtgatataattcatatagcttacaattcacccattaaaatgtatagttccatggatttagtgtattcaggcagttgtgcaaccatcagcacaaccaattctgcaacactttttataacccacaaaggaaaccctatgccctttataattttttaattttaattttttaactaattttttttgtgtgtgtgtgacagggtctcactccaggctggagtgcagtggtacaatcacggctcactgcagtctcaacctcctgggtttaggtgatcctcccacctcagcctcccaagtagctgggaccacaggtgtgcaccactacgcctggataatttttgtattttttgtagagatggggtttcgccaggttgcccaggctagtctcaaactcctgggctcaagtgatcctcctgcttcgcctccaagtgcagggattacaggcgtgaaccactgtacccagccaccctatgccttttagctgtcactcctgtctccccgggcctaggcaaccattttctgtctctatagatttgcctattctggacattttatataaatggaatcatgagatgtatggtcttttgtgcctggcttctttcacttatcataatgttttcaagtttcatccatgttgtagcgtgtatcagtacttcattcctttttattgctggataacatcctgttgtatggattaagccacactttatttgttcattcgttagtcgacggacaataggtttgcttccacttttgggctatgatgaatcgtactgctttgacccatcttgtataatcccttttgtggggacacatgttttcagttttcttgggcatatacctaagagtgaaattgctcggtcacatggcaactccatgtttaaccttttgaggaactgccagcctgttttccaaagctgctgcaccatctgaaattcccactagctgtataggggagttccagtttctccacatcctcaggtgatattattgtctttctttctcttctttttttttttttctttttttagagacaaggtctcaatctgtcacccaggctggagtacagtggtgtgatcatagctcactacagcctaaatacctgggctcaagcgatcctcctccctaagcctcctgagtagctaggactgcaagcacatgccactatgcctggctaatttttaaaagatttttttagagctgaggtcttgctatactgccaaggctggtccttgaactcctggccttctgaactcttgtcttagcctcacacagtgccaggattacagggataagccatcttaactagacctatctttctttttgattatagccatcctactgggtatgaggtggtatctcattgtggttttgatttgcatttccctgatgattaatgatgttgcatatctttttatatatatttgtgtatcttctttggggaaatgtctgttagattctttgccaattttaaaatagtatttgtctttttatcattgtgttgtgagagttctttatatattctaggtacagatcccttgtcagagataggatttgcaaatattttgtcctgttctatgggttgtcttttcacttccttcaccgtgtcctttgaagcacaaaagttttacattttgatgatgttccgtttagtttttcttttgctgtttgtgcttttggtgttataactaagaaaccattgcttaatccaaggtcataaagatttacttctatgtttttgtctaagagttttgtagctgtagctctgacgcttaggtctttgatttattttgagttaatttttgtatacagtgtgagggagggatctaactccattcttttgcatgtggacatccagttgtcccagcaccatttgttgaaaagactctattttcccccattgaattatcttggtatcctttttgtaaatcaattggccataagtgtgagggttaacttctgaactctctatctctgtgcagtgatctgtatgtccacccttatgcccgtaccacactgtcatgattactatagcttggtagtaagttttgaaattgagaactatgagtcttccaacttcttttcgctttttcaaaattgtttgaaatcttgtttcaagactgtttattatttgtatatgggaatgcatcccatggaaaacatggggtgtgtttccatttatttccattgtctttaatttttttttttttgtttgagacagtctcactctgtttgcccaggctggagtgcagtagttcaatcttggctcactgcaacctccaccttctcggttcaagtgattatctcatctcacctcagcctcctgagtagctgggattacaggcgcgtgtcaccatgcctgactaattttttttttttttgagtagagatggtgtttcaccatgttggccaggctggtcttgaactcctgacctcaagtgatccaccacctcggcctcccaaagtgctgggattacaggcatgagccaccacccctggtctgtctttaattcttttcaacaatgttatatatagttttcagagtataagttttgcatttcttttgttaaattttcctaagtattttatccttttgatgctattacagatggaattattttcttaattttatttccagaatttttcattgtaaatatatggaaatgcaattgatttttgtttgttgatcttgtatcctgcaaccttggtgaacttgtttatcagttctaatagagttttcgtggattcttcaggattttctacatacaagatcatctcatctgtgaattgagacagttttactttttcctttccaatatggataccttttgtttctttttcttgcctaatttctccacctagaacctccagtacaatgttgaatggaaggaataaatgaatctaaatcctaacgtcatgtcagtaattatcatgtttattcccattttacagataggcagactgaggcttagagtgggtaagtaagttgcccaagggtgtgttacagccgaagagctgtggggccaggccagaattgctgtgtacagtctgcttgctgcaatgcctttcccccagctgccatcttcatatatggtaggcatttgggggaggtaccagccaacctggtggatgacatttagagtttagtgagaagctctggaagtctcactggtagcactaagctcctctctgtgtaccggctgcttcccatatgtacatgcgtaggtaagagcaagatagaaatgacagcacttgtacattccactgagggctttctcatcagtgtctcgtttcatcctcttagcaaccctgtcagataagaaagatgagttttattgtcctccatttaccgatgaggaactggcacttagagagctcaagtgactttcctggcctttgggaaatgttggcatggtggggacagggtggggcatcatgtgtgttgattatcttccctatgttagacactatgctggacagttgctgtatggcgtatggcttaatcctcactcagcattattatcctcttcccacagttcagaaaattgatgcttagagagcttaagtaaagtgctccatgtactcagctcagaaatggcagggtctcccctcaaacccaggcatttgacccccaaattctacctgctttcctcggaccacaaggcctgaggtgatcgaagaaatttattaaagggaaacaaagatggataaaagagcaattcccacgaggccagccttggcaggtgctgttgctccctgacgtgtgtctccttgtgtgttatcccccactttagggtttaactgtatcttgagaggtgggataatcttccagggaaaagcagagaaggggaccatctgctgaggcaagggacctgttcaagcaaactcctgtcttttctgagataagtctgactaatccggtccttgtgactaatccactctgagactttatctttagaaccaatgattaatttaaataggctaaattgttccatttcagcccccatacttgagtgttcctgggggaagtggggttagggcaggagggtggtgcctgggagttgtgagggtcctcgaactgttggaatttcagagtttctagcagatagggctggggccagatcccacataggaactgcagccctttctgctgacatcatgggagatcccgctttgaacgccctcgagggcagacatatgcagggggtccccattctatagaccccgtgaatcatgctgtgggtgagaatctctgcaagacgatgttggcctctgtgactttcctttcctcttccactccaagagccaatattttcctccaagatcacagaactccggctgagcgctgacgaagctgtaaagtgctctagaaaggctgctggcgaggaaattcacccatccaatcccccttcagaccttacctcctgaagacctggattggagaggctagaacccagatgccagagtcagatccctgcagctcactctctgaatgaccttgggcaaattttttagtacttctgagccccaatcttctcactgtagagctaacctagtccaacaagttcatttttcaaaagatgacattaacgttgcatccccaaagccacacaacaagtaagtgcaaaagggagggcagtgaccaggccttctgccctcggcacgccaggcccttctgcgtcattatctcatctggtcctcactgccagcctccgggatgctggctgcatccccatgggacaggaaaaggcactgagactcagatgcgtgggtcatgctgccaagccacacagcaaaacgtggcagagccagaatgggctctacgtgtgcctgattccaggccccatgcaggccctatgacacccaaggaagggtgaatctgtgggcctttctctctgctggcccttagttcagcctctggccgttgcctcacggaggctgagcagaggtctcatctgcccaggggcaggggatggtgctggctgggcggaggcagcaaggagggggacggccttctcatgttcccagcccacccttctcaacacgcccttgctttgcacacaggcctaattaccaagaggagtctggggcccatggaggctgtcagttcctgcaacatcacagcagcctcttatcttgatgggtgtgtgcttttgttatatttttaaattacagacagtgagagtattcccttggcatccagagctgagagctttgggactttgaatggtggaaaaggaacccaagtgcctctgtgccaggcttcctcccaaaactcatatcagaatagactataagaagcagcagccccatagctcagtggattaaaacagcagaaggcgttttctcactcctgccacatgctcactgcaggtgggtggccaatcagagacctggctgatggagtattgttggtcactgtgccagagagaatgtggagtcctggaggccttgaactgattagtaggtatcccagccagaagcattgtgctcctttgcagctcactgggcagaactggtcccatgcacccccaccccccagccccaccaatcaaccacagtgctacgaaggagcactcccgtcatgtaccacaaagcagggagaacaggtcatagcattaatgaccgacaactaccactggggagaagtaggaccaggacgctctacaatcggatgcccagggaggggcttcctgtcatgggctggccaccagcaggaggtgtccagcgtgtgttctgaggcctgagctgggctcctgcagggcatctgtgctgttgctgctcatggagacctgaggcagtggcctggcctctgcctggagtggaaggaggaggctgcacagttgacctccttttgcttttccttgtggttttgggctgggagttgcagacaacctttctatagctgatttggggtcaagaatccccataggacccaagacaggtcctagaggagggaaatgtgtttgttcccacttttttatggggtccagtggcgaaaaggataaaaactcacagttaaaacaggagtctgacatctgtctgctggggaggccacaggtgggggatctggatcagatgggattcgttccttcattcattcaataggtattgaatcttagctttacatttgtgtaaagtgactttaggtaagtcacttaacctctctgagccttagctctctcatctctaaaatttgagaactattccatatctcacagggatattgtggggattgagtgggataatggatggaaagtctctgggagaagcctggcacatattggatgcaacagattcctgtttaaggaacaaatgtctccgttttctcctccataaaatgagggttataagaagcgtctttatcccccaggactattgggaagaacaaaaaagagaccatttccataaagctccagcccccacagacactcaggagaccccagtctcctcctgggttccacgggtgggaggctctagggggaccattctcccgcctcctcggccatcgggctatagctccccagagtgggtccagggtccggagccttcctgggccctgtccgaggcccaagagcctgtcccctttcctgctgaggctggagcagagagaggttagccccagcctgggaaaggcctctgttgtcatcctgcggggttccagggtgagggtgcatgcaaactgtcaagcgcagtaagactgtgagacatgccgtgcgaactgtgaggtgctggatgagggtgaggtgttgcgttccgtctctgggtctggactggcttcctgctgctcccttgaaccacagccccaaaccccatctcccacctgtccagcctctgcccagtgagtcccactctgccagcctgccgtctgcatcccactgtgccttctgtcaatggtgacagttgtgtagagaaggaaaacaatactgggtggttcagatgtttctggcatcaaatgggataacataggccgggcacggtggctcacgcctgtaatcccagcactttgggaggctgaggcgggcggatcacgaggtcaggagatcgagaccatcctggccaacatggtgaaaccctgtctctactaaaaatacaaaaaaattagccaggcatggtggcgggtgcctgtagtcccagctactcaggaggctgaggcaggagaaaggcgtgaacctgggaggtggagcttgcagtgagccaagattgcaccactgcactccagcctgggggacagagcgagactctgtctcaaaaaaaagaaaaaaaaaaaaaaaaagagataacatagtgaagagttttctttgggaataaatattatttaaatatgtattatattttagcacaatcaatttcagttgtaaaaacaactatttggccaggtgtgtctcacgcctgtaatcccagcactttgggaagctgaggcaggtgtatcacttgaggtcaggagttggagaccagcctggccaacatggcgaaaccctgtctctactaaaaaatacaaaaattagccaggtgtggtgacgggcatctgtaatcccagctactagggaggctgaggcaggggaatggcttgaatccaggaggcggaggtagcagtgagccgagataacgccactgtactccagcctgggcgacaaagcaagactccatctcaaaaaataaaaaacaaaaataaaaacaattattaattgcagggaacttggaacatacagaaaagaaaagaattaagaggaaaacagggatcccccggatctcatcacccagaggccaccgtggtggacactgggttctgtttccttcccgccgccttccgaaccccagggcatatgtgtgttttgcttgtttcataacatcgggttcatattttttgtagcttactttttcacttgataccatattgtcagcatttccctcagttattaaatattctttgcaaacatgatttgtaatgtttgcctgatagcccgtcctgcatctgtcccgtcgttttctctccatatcagtgttgcagcttccagggattcagtatagattccattcgtggagccgagcccagtctgagacctagaacagattctagaaactgtcgagagctctctcttttcaccatgcatgtccctggcccttgtgagccatgtggagacctggaaggacttggaggggccagggtccaaccccgggaacgtggccaagatctcagttggtctttgttctttctcgccgcgtgagtcccctggtagccttggtgggggtcctttcaccatcatacccggaggctgtggcttcaggcctgggtctggatcccacctagcaagtccttccttgctcagggccgccttgctcaggagggctggcttaggaccgaagcccaggccccgcagggagcctgcctgctcctgaatttcccatcttcctgaccttggaatccacttttcttacctccttgtcacctccttatgcccagagttggctttgattgagggactctaatataagatggaaaaacccaagggtatgaaagtcactgcactttatagccttttaagggccttttaaaaacaatgttcattcaatttttttcttttttttttttatgagctttctggtacgtacagcacataatcctacataaaatggctgagcacgacactggcataaacagccggtgatggggtggaagtccgtgaaacgacgggtttgcctctgtgggagaagccgcagtctttcagcactgagcaggctccggattccagggctggggttgccaggtcttctgagtgctgctgacctgagggcggcactcgagggcttgggtccttggggagggacgctcaggcccctgcctgggaaggatgcctgcgtggcttgaaccctgacctccaccatcagccacatgtgccatttgggacttgtcctttttctcaccatttcatgaaaagcttgtgttgcttttgccagccagccagccagccagctgggaaagctggtcccacatcatggctttctaaatgacgccctggctggtcgcctgatgattgagcaggccatggttaaggctcttgacagcacgtccaagggccaggtgccccgtggaaagactggagcagacttgatgtcagttccccagctgttgtggggttgaaggggatttaccctgcaggagtaacgctcctattgctcgagctgttggggtgtggacgggggaagctccagcttatttatcctcataaaccatagtgctatcccctttgtcccacgagttccagtatttcattatccaaagtggatctcctaggctgcctccaaattgcacacaatgattttgtcagattttgaggtctgagttttcctttgcagaataggaagagtcactctgtcccagccttgcacctggtacatagtagcccgagtggtggggagtctgccaatgagatgataaaagactctcagaggttaaggctcttgctcaaggccacacaggagacaggctctgagctcgggggagcccgacccttaagactaaatcctcaaggaccgcgagtgcctttgaaagccctgccccgccgcctgggcagctggagtgggagccacgcaggcaggcacttgtttctgagcacagctgagctggcggggccctgccacctccttggacgccgccttccctctgcttgcctgggacgggctggggagcagcctcgtctatggtgcagccctccccttctcaagaccaccctgacctttctcagcatgtgcctgttttccaggtcaccgtttcgatttcgcttcacttcctagtgtttattctcctccgttagaagagcttcgtgtttattgattgttgtctccggaccttcaatttttgtctgcggctctggcaatctggaaatgagtcttccactttcattagccaccctgttctgaagagcatccgacctttccctaatcagttccagctaatcatggccagtggctttggatgagctggggtggggggttgggggagcagggacaggggttgccaagaggcccacaggacctcccctgggggtagacgatagtgacggtgatgatgatgatgtcagcactgggcgtgcaccctgctatactctcaccatctcccctcacccctccactcctcttccctggcgccagaggcatctgacccttaggaagctaggggctgcagtgggtcagagtgagaaccacggtcaagctgaggggcccctgcttgtctatagccaaaggccaggtccaggaaatagtacttggggtttggagtcgggggctttgactcagatctgggtggagtcctggccttgtggccctggacaggctatttaccttctctataaactggggataacaagaaagcctcaaagcttaggatggctgtcaggtgtgcggtggcaaccagtattactactattgttgtgactgttgagtcagatcaggtttctcctgaaggccctacctggagtgatgttgctgtgcccggtccctagctccgtgcctggtaagatgttcacggggcttagtgaacacgtgtctagctgagccccactgagctctgatgggggcattttgttgcttgtggagcaagaagccatttggatggggcagaggtcagctgccaggactgtgtggcctgacctccatcctgcaccatgcccagcagagtcaaggctgtcagagggattttctcccgcgggtcttcctgtgcaaatcaataacccttcaggcagcagcagggagggaagcatgcactgaggaggcaagggtcagggctgttcctgcagcttccggcaagtcctttgcagggtttttcagtatcttccgctcgagcaggtgctgcagcagagcctcagatacgtactgagcgtcgcctcagtttcatgcacaccgcttggggctccccaatccctgagtccagaaccacctggaggtctattgcattctggccccggcagctctccatggaagcagagatgaactagcagggccagaggctgctcactatggtggggtccctgatctcctatcagcaccctagtttctagtaggaatttgggaggcagaaaatattcccccttccctccaggtgaatactcaggtgcatactatgtgcttgaagctcatggccaacctcagaggctgatggggccttgtgggctttctggagagctctgcagggtcccaagtgtcatttctcccttgcccctgcttgatgcacggtttgtgagtactctctttggctggtcctcttcactctcttgtttaccatttgctgttaacaacagtaattacagtatagttgtgagatgaaaacatgactaaattatgacactgcttgtgtaacaatctcttaaaactgactcagaaggcaacagctgcacaattaggctataaattctcttaaatgaacttgtcggtggcagcagtacctgtgtggcggtgttgtgtaagagataaccaggcttaatgggcttggagagggagcaccaaggatggcctcgtaaagagggaaactttgttctttgtcataaaccacttgttctcttataaaaacaaagggctcagtgttggcccattaactccctctgtctgtcgggactgtgggagcagagcatctgcctgacaagctgacaccagggatgctttctgccttgaggtgtggctttgtttgaggctcctccaccctcatcccgaggaggcatggccagcaagaggcctgggtgggattagttagttagtagcggtcgggccagcatggccttggtgggggcccagctgagctgctgcagtcttcccagctgggctgcgaggcctgcccttcttatgctaaatgacaaacttcaagacaaaacccacgaatcagagcgccttggatgtggggctgggacctaagaaaccatgtgattcaacagagggatgatggaggcttgcttcagatgcgctctttgggaaagaagcatgtatgccgcagatctaagggggaaggatgcaactgatgaggtgttacaggatgctcttaccccaccccagcctgaatgtggccagcactgggactggtgatgctgacactgggggccctgctgtctgcctccaggtcagctcttagcagcgtattcactttctgtggctgctatcacaaactaccatagacttggtggcttaaagtgacacaaatgtactatcttgcagctccaaaggcagaagttgggtcttgattttgacatgggtctcggtgttttaaaatcaaggtgttggcagggctgtgttctattctggactctgggagataatccgttgcattggcttttccagctttcagaggtcacctgcatcccttgattggtggccccttcctccgtcgtcaaagccagcactggcaagtcaagtctctttcagagaacatcatagttctctgactctctcttctgcctcttctttatcttccatttgtaaggactcatgtgattccattgggtacatgagtacactaaggtgattgtttccatctcgagatcagctgattagttgccttaatcacatctacagtcttaattccctttcaccatgtaacgtagtatattcacaggttttgaggattatgacgtggacatctttagggggccattattctgcctgccacaggcaggtggagagtagggctttgagccagcttgacttttgtgccctctgagctgggcacaggcaaggatcagacgtgaggaagcaaagctgagctggtcctacaggaaatcagagagagaacagcctctctgttccctcccgcctgtcagcactggactcggcctgcacctcagatgtcacttgcattttctaggggctcccagtcagagacagggtgtggtctttcgtgaacaaaacccaggagtggacataccccatggcttcccagactgtgtgggagtctccctgaatgaaaatggtaagtgtgcaccctttccttcctggagaacctagcattagcatccacctttcccctaggcccctccctggagaaggtgcaaatcgggaagcctgctggtataagataaagttcagctttaacagttttcaaaataaacgaacaacacacaaactccagacgctgcacaaacccaccagcagggagtcatggccacaggttttgaaaactttcaccattctgggattgcagagcgtctcatccgcagccccggaccccctggccacctctgctctttcatcccagcctggcggagaggcagctggactctcctctcggacaggttctctgatgaatttccaggcatctccctggacctgtccacacaacagatttctggagcgcatccccagggacctccagctccaggcctattactgaagtccgtcacccagaaaatctgttgacggaaccgttctccctgaactgcaagcaaattgggaaatttgaatgtgacgcaataagcctgcaataaaacagagcctccaagaagtgcatgaagcgaatctcctcccagcctagtccaccacccctctgcagcttcccgagctgtcaccctccagggtggccacatacagtatttattttttttaattaagctgcgttgctgtgtggctcaccctccacagatgctttataaagcccagccttgtaagttgctgaaagtttttatttttttttaagcggatagtaaaattaagcagttattagtattcacgaaaaatgctcgtggcaggcttcgcacacgtaatgagaagccacctgcagttcaaagcagtacttgataatgctgtaattagatttgagatgcaaaaaagctcattaaaattaaataacatatttgtcactgttttaagaggtacagattgcctagaaccatgctggtctcttgaccttgagtattttggcagagtccttgctgccgacaattcaaaaataacatcagcaattctgcagagagtcctgaaaacatgctcatccttggttcagtttgtattgaaaaaattatatagatatccaggggaaatcacagatttgtacacagtgtgttctgggagaaaagggtggccacagtcctctctgagccagtagctcagacgctgtgaagaagagatggatgtgtgcctgtgggaggctggggcaggtggaggggtcccccataggacacggggacactgtgagggagtttgcaggaagcggcggccttgggcaccactgcttaccactaagctgagctggatgaagccacttgctcagagcaggcccagggcgactggtaatcagattgtcagtcagtgtttcccgggtgcctaccggtgtaccgggtcccgggcaggggatggtggggccgcaagtgccagtgagatttgcctcaggctgcaaaagaggtcatagcctcatcacggagatgaggcataaagtcaggtgccaggaaagtatttattgttaataaaagtagctaatgttgactgagcgtgtctttcatagtaggtagccaagcgtggcatgcattatcttaggaatcatctccatagtctgtgagacagccctgactgccccattttccttgaggttacgttgctcttgtaaggtcacttcactagtaagtaactagtaagcccagagctgagccgggttcagattcaggtctggccttctgcagcaccccttctgcatgaatcacagagtcactcaggtcccatgggcagagcagagagacccagggtgggagaggacacacatgaaggcactcactgaggacccactcttcaccagatcctgctctaaacactgcgtgcctgttcatcattgtatccccatagcaaccctgtgattccattttacagatgaggaaattgaggcatgagaaattaaataaccagtcccaggtcaccaggtagttggtggcagagttaggattaagctctgaccttgactgttattctatgtttaatttttcttgaaatctgtaaagcattctataaaggtaggatgtaatttaaaagcaattatgatgatttttgttcttggagaaagaaaatgcaagttgctttcaaggggcagagaccagaggagttttcctgggggcagagagcagttaaacgagacgtgagtggagggggccagatggagggaaaatgaggccaagttagaaacagaggcctggcctgggctccagggacagtgtgggcccccattttggaggagctgcgtgtcctccagggcagggagtcattgggaaggcagtctgggccgactgcccctcctcccggtggctggattgattttccaggctgactctcttggcactgggtccagatttagttctgtggagagctcgtctttcaaagtccagctcaaatgtcacctcctcggcaaagactcccccaccgcctgaagcaaaattaatcactcctcctccatgtcccacagcactctgttgatacctccggaatagtcttatcacatcggacacggatttatgtgtttacaagtctgtctctccagctagacagcgacttctcgagggcagagcccactctgcctttgtgtcattgtgcctggggcagtgctgcgtgtgcagtgggtgctgaggaaatgatgcatacatggaggaccagtggatggtttaatttgatttcagtgaccaagcacagagctcttactttgtgcaggtcttgttctaagctctttacatatgtgaaaggatttagcctttataaccccatgacatcagttagttctatgatgagcctgttttacaggtgaggacactgaggctcagagaggttgtgtaacttctcaatatcatacatctggtaagtggtagagctgggagttttaaacccaggcagcctggagtgaaaacatctgcttaaagtgattttgtagctacagattgtatatagtgattcttattaggggagtttctggaatgaattctcatttcactcttcttttccctaacttgtctgaatttaggaaggtttggagaaagcgattgggctgcgatgcagttaagtttcctttgttgtaagccgtggaaaccaactctagctaaattaagctaaacagggattctgttgtgaggatctaagtagcttgcagaaggagcacgctggaaggaagggctttggggaggccagagggactgacctagcgggaactgaaggacagacttgctgggatgagctctgcacgtcacgtccctcccagttcaggcgccaccatcgtgaccgtgtagggaattggggtgctggtaagaccttgggtgctgggccggcaagaaggtgcgctgcctgccgaccaccatgcgttcctgctggccattgcttgggtcctgtgttcaccctgggcccagtggcagcctgggctgagccgggggcgtgagagcccagggctctcagtcatgtttccttgacacatagttctggagtttggggcgggtggggagggtgaggcttctgaaaggaatattcactggcagtgacctttcttaggtttttaacattttgaggggattgattgaattgatccaagcccattcattctcggtctccaaaggacatgaataccgcaggaccagcccagcttgaatgtttgaaaactgggtgcaaacgaggactagactgattctttctcaccgggcttgcccccagcctctaaactagaaggggcgtctggctgggtgtccctgggaggacggccagagtgcgccttgctcagaggttgttgcagggaagccccttttcctggggagggagggaaggcgctgtgcatctctccccggcggccagtccagcgtcttccggtatggcagtcctttgccctgtcgggtcaaagccaagccccctcagcctccgggctgtccccaaacgtgtctccctcgcggtgtccgtggcgcgcaagagcctggagcctgctgctttgggcctcacgcctctgtctcatgcctctgccggggccccgatttattcaggacacacgtgtgctccgagtgccagatacatggtggaccccgacaaggcacgcaggtctcagacaacaggtgacgctgtgtccccggcctgtgcagcggggacacccacctcattttactccccccaggtcagctggtccttgctgggaggctggtccctggggcgaggggccaggggcagctggaggagagcgcctgcccctccccaccccgccccgcccctcctcccttccactccccctctgggcccgccctccgatttggcctcttccccgggcccaccctttctatagccccaccctttccgttttggttcctctctccctgccagccccgccccctcagaacctatcccgtttcctttatggacctgccctcgtctggtcccatccacccatcttgccccgcccacatccagccttcccacctggccccacccctcctttttggctccgtttcacccgccccgcccctctggacccacccctctttcctctgtggacctgcccctgtctggttccacccacccacgtggccccacccactccctgccttttatcctgcccctgccccatggctggccccatcctccatcccttttcgtccttgcccaccgagctcctctggacccacccctctttttgggcccgcacccatctggctcctcccacccatctggccccacccactcccctgctttccatccctgccttgccctgtgactggccccaccctccatcccttttggtccctccttgcctgccgagctcctctggacccacccctctttcagttggggccccgccctcatttggcccctttcacccgtctggccctgcccattcccaccttccaccctggccccgccctgtggcagaccccattctccattccttgtggcccttctcctctggaccaacccctctgtccattagggccccgccttcatttgacccatcccaccctctggcctcacccactccaccttccattttgacccagctccttggcaggctccagcctccatctcttttggctcctcctcacccgccccgcccctttggaactacccatctttcctttatgggccccgccccatctggctcctcccacccacctggccccccccccccccccgctttccatcccggccttgccctgtgactggccccgccctccatcccttttggcccctccttgcccgcgccgcccctctggagccacccctctttccaatcgggccccaccctgttttcctggccttcaagctcccgcctggcgccccgcagcggcaagcgtgatttataggccgtctgagccgtgacctataaaccctgttcttcagggggtgcctttcttggattaaatgcctctaaaggagcctctgtctcagaagtgtcatgtagaatgtttccgctgacggagaacatgacctttaaaaccccgagtaaaggaagcagagctgccaggggaagcatcgggcaaggcggcgcctcaacccgcctgcacctgtccgctctccgacccctccccagacctggtggggcgggctgctgacctggctgggggggcgcgctcccggggcctgggggctgggcgcggctcggggagctgcgctttgcggactggaggtggcgaccgtgcgagcagagacgcccctcaccatgggccaagagccctgaccctaacaatgggaaagggccagggcccttgttccacttcagtttccttccctttgtgccctgggggacactgggtcctgctaaaggctggggcgcctgtcgcagaagacccagtgtcctgggtgctctgggtgaggcacagcgtcctgggtgcccagataggggtgcagaatcctgggtgcctggttaggggtacagagtcctgagtgcctgggtaggatacagaatcctgggtgtctggtttggttgcagtgtcctgggtgctttgggtgggggcacagtaccttgggtgcccaggtaggggtgcagtgtcttgaggatctgggtaggttcagtgtcctgggtgttcatgtaggagtgcaggggcctgggtgcctgggtaggggtgcagcgtcctggaggtctgggtaggagtggtgtgtcctgggtctgtataggggtgcggagtcctgggtgttcatgtaggagtgcagtgtcctcggtgcccccggagggtgcagcgtcctgggtacctggggagggcgcagcgtcctggctgttttgtacaggggcacaacgtgatggcttctctggatgttccatctgcagtgtctcagaggatgtcatagaacttggaagaactgtgcctaggtcccaccttttatctgacactgcagtctttgtttcttgggtggaaaagccatggctgcctctctcccaggttggagaaagcatatttctggtagtagccactctgtaggtccatatggacactttatactaaggaggctacattttcttattctcttgcccccacaggctaatgtcacaagtagaaacgtgactgatacactcattcctttgtacacttttataagaaatccccgcagacgctgttttgctttggtccctttgaggtgcttagaggagtggctggattctccaagaggcctcatgcaggaagcactcagtatatgttgcttgtgagatgccgccagggattctctggaaggaggaccaggagatttctatggagagacgagtcagctgaaggcctttgtggatggaagtaggggactgtcttccaccgtgtcttttttgagagctgggaaggagaggccgggtcggctgggaaagagctgtcttgtgttggaggggctttgagccctcctccaagggtcgcagagcagcaggtagagacttagagtctgtgctaacagagagggagggtcttgtctgggagacttgcctgaccctctcttacttgggtgcatggtgctggcaaggaagaagcagggccagcggaagggctgtatttctggtgagatgtattaatatgtgaaagccacttcgggaaaagtagtgagtgtggtatgagcatgagtgtgtgtgtatgactttgtgtgcttgtgtgtgtctgtgcatgtgtgcatgtgtgtgggcacgtgctcctgggggcatgcacatgtttaagtgtgtgcttgtgtctgtgcatgtgtgtatgtgtgtgggtgtgtgtgtagggggcacgcagccagctctaacttgagcagaggcattctgttgttataaataaggctggtttttatattcccatttgaccagggagtgcaaccagcagaccaaaggtaatgcatttcagctgcctgtgggggaaggtaaatgtggtttattagcccccctggctcagagggggctgggcactggtagcagctgaagcaaggcggctctagatggagggaggggacaggttggtgattgtgtgccctggtttctctaaaggaaaaaaaatggacgtgccgcctgttagctaatcaacagtgaggagaaagtcctgacaacaagtaaagaaaacttagctggcaataaaataagggactttttatggtggtttttatgagaacattttcgctttgggagttattagagttagtgccggttgtgacaaaagctgcatttgcatatcgccgtgatgaggtctggatggagcctgaatgcggcattaactgcatatcagagaccctttcagaagccaaacaggatgacatttattgcaagctcgatgccgcacgtctggcattagttactgcttgttgtgtcctgtggaaactagattttctgtcttgggatctttctgggactggtcgcagcagcttcctaggtcaagaacaagctagggctttgggagtgtgtgggggatctcggggatggggaggggacaccatcgggagaggagaaggagttaggcttcacagggctgcgcgctggccaggtgcctgtcacaggctgacctagatgagactgccactctcagattcaagccccacaccaggacaaacaggaatttttcccacttttttaatttttaaaattacgatgtaattaacatatcacgcaatttactcattttaagtattcaattccatggcttttagtatattcacaaaaacgtgcaaccattgccccagtctattttaggacatttgtgttaccccaagagaaacccctcacttcttagccgtcaccccaaccccctcatcctccctagccctaaacgaccatacatctacttctgtctctattgatttgctgcctctggtcatttcatataaatggaaccatacagtatttttccttttgtctctggcttctttcccccagcagaatgttttccaggttcatttatgctgtggcacgtgccagaacttcattcctttttatggctgagtaatattccactgaacagatacgttctatttatgtattcatcagctgattttccctaaacacttttgaaacctttttttttttttttagagacagagtcttgctttgttgcccaggctggagtgcaagtggtgtgatttcggctcactgcaacctccacctcctgggttctagcaattctcctgcctcagccttccaagtagctgggattataggcacatgctggcatgcccagataatttttttgtattttagtagagactggatttcaccgtgttgcccaggctggtctcgaactcctaagctcaggcaatccatcctcctcagcctcccaaagtgttgggattacaggcatgagccaccgtgcccggccaaaaccttttttattgtaaaagatactcatgaaaaaattcatggttgagactgggcacggtggctcacgcctgtaatcccagcactttgggaggccgaggtgggtggatcacctgaggtcaggagtttgagaccagcctgaccaatatggtgaaaccctgtctctactaaaatacggaaggtagccaggtgtggtggtgtgcacctgtagtcccagctgcttgggaagctgagacaggagaattgcttgaacccaggaggtggaggttgcagtgagccgagactgtgccactgcactccagcctgggtgacagagtgagactccatttcaaaaacaaaaaaaccaaaaaatcagggttaagcccattggaacccacctgaattttttcagaaaatggagttctagattgagggagacatagggggttgatgaagggagtgagatggggtggggtggggggtggaactgcgtttcctctggaaaacatagagcccatgctttgcacctcccagctccccacccgcgaatgtggcctcagggctgactccaggattgctgctagggtcctgggagggtctttgttgcttgccattcagagagcattctctatctcaggggaccttcagccactaggtttgaggattcccaggggatgttggtgtggttgagggctctagggcagcttaggctggtggccacgtgttcctgcctcacatccgctcctctccatgagctctggctgtgctgtgtggttcagccagcatttgaaaagtctgggctgaggctgctgtggagaggaagcaattgtgcatttcatagatggtgacatgcatctctgctgaaggctgagagtgatattggaggaggcacagtgggcttctgcctggctcagatttagggagaatcttagggcagggggtgaagtcagaatgtcctattttttctcttccagaaaaatcggtaggatccctgggtgactcagctcttagtcttaattatgctgctatgtaaatatttctgaggtctcttggttttctcagttggcattatatcacagttaataaccagagggcacattataaatatgcaaactagtaataatgctttaactcgaagaacatcgataaattgccaaactgagctggcagcgttcagcagctcattccctttgctgtggagatagcttcctctactcctgcatcatggaacccacgaattccgttggcccctccctgccccagatggcaccctcaggagcagtcggctgtccgcttggtgtgccgagaaaacggctcttaatgtggccccgggtgtgttttccagcatctagaaatctcccagagagagcaaggcatgtatcgtggcttgccctccgctctttctgtgctgggacaagatcggaagtagagtctggaaggatggcccttgcccctctcccgtcctttatttggttggaaagatcatagcccccacggtggagataccgccagagttctcctccccgctccctgccttgtatatggcctcaggaagtcacgtcagcttcttcatcagaaattcatttatatgacaaatgtttactgtgtgcctactgcgtgccaggtgctgtgctgggcagtgcatatggtccttgtcctcatggaactgatgttagggtaggagagacaagcaggcagtagttaggattgtgatcgatgtgtgtctcggaagcacaaggggttactggagcacctgttcaggacgtatcatccattcccggtgggtcaggaaattctaccggaaattctaccgtagcaagtgctatctaagtggagatctgaagataccctggcaaaaggagacggatagagagagtggaggtgggggcttgggggaggcgggttacagggaagaacatcctggtcagagggaacagaatgtgcaggtgcttcaaggagagaatgcgggatgtgactagggagctgcaagtcgccagtgtggctgcagcatggagctagtggaggacaggtgtgctgaggtgggctgcagaggcacggggcgagggggtgtctgtctccaaggagctagtctgtcttgccaagttgagggacatttaaagggtttgactttatcgggacagagaggggccagtcttgccttagaaagctcctggttgtggtgagtggaccagaagaggtcaagaatggcagctgagatacataggggtccttgcttggcctccgtgggcattttcagtgagggctaaaccagatgccttgtctaccgcaaagggcacttgttggatcagcccgagccatgctaaatcaggcagcttctgagcaggatgcaggttgggggctctgaacttggagtctgggcaggaaggaggtggtgtttgtggtttgtggaggcggcagcgggatgcctgtgacctgagtggagctagaaggggcaaggaacgctgcagaagtaaaggcggccaggttgggggagtgagcggctaggttgggtgagggttcctgggctccagccgttggactgccgcttgccctggaacctggtccggctcctcccccggatgatcacatctgctttggggcggtgaggagggcccagatgatgtagtgggaactggtggtgcccagtgagatgagctttttcatgcaggccttggacttcaggcttgttccagctcagtgcacttttcctgcctcagcttcctcatctgtgagatgggcacctacctttggggtttctttgcaggctctgtgtcttcccatatttacaaaataaaggttggatgggtgtttattggccttcaaagccagtgtaggcctacgatttaaacttcatccacattcctcagcaatgggtgtagaccatagttagatgtattttaaactttttattttgaaatttatttattattattacaggaatttgcaaagagagttcagggggcctcatgtagccttggtctcctttctgcaatggcttcatcttacctgacagtatcacagccaggacccagatgtcgatacagtgcacatgtgcagttctgtgttgcttcatgtcacacgtgcaaatttgtgtcaccaccaccacagtcaaggtgcagaattgttccatctccacagacatcctcccaccaaccctgtgtggtcaactcaccctctccctcccaggatctctaaccccagtcaaccactaatttgttcaccatctctgtaagactattttaaattacaaatgtatttttgttataaaattatataataatcttccagaaattgagggacatggaaagaaaacatttccatttccctaccactctcagtgatttcagcgcatctctgtgccttttttggtccacatgcatatatttagtgtatctgtaatcctaatgtgtacgggaccttatgtcctgctttgcttgcacgacgtgccataagcatcctccatatgtattggagccgtggagtgctcacagacagcattccaggaggcggaatgggtggcagggagtgggaggcagcagaaggagtggaggccggtcccagaccagcatcggtgaggaggtaatgggggttcttgccaggccagggactctcggcttggagggggtcactccaagggcctggcaaaggatgtggcgacaggacccagggactccacctgaggcctgaaggataccgtgagtctgaagactccacagaactgatgttgggatgggagagacaagcaggcaatagttaggaatgtgatcgatgtgcatatcagaagcacagggggctactagagcacctgttcaggacgtatcatccagtcctggtgggtcaggacattctactatagcaagtgctatctcagtggagatctgaagataacctggcaaaaggagacagatggagaacagaacagacccaacaacctcaggagaatgaacagccaggtgttccctgaggccagtggtagtgtctgcatggaccgttgctggctgtggtcctctgcagggaccactgctgtgtctgtttccagcctctcctttcctaaaccaggccggccctgtcagcctggctccaaacttcactccctggcctttggagggaagaccctctggttcgggccttccttccttctcagggctttggaagcccctcttctttccaaaggggcttggctttctgtcacccagcagccagctccattgtggtcctaggagtgtcagtgagcacaaagcagacacagaagaaaccttgaagtaattaacagagtgagcatgagacgttcctgctggagaagagcacacgatgggcctcgctcctcatgctccccactcctgatgagtaattacacgtggctgtctgggagtgggagtatttatagcaacgcctcttttgctggagtgttgaactttcttctttgtggcagcacgcttataaaaaggtaatcaaatagcagacgatcggattgtatccgtgtcattctgctgccactttaatgaggactgagaataaatagaaatcctgaaattgtgctatcccaaactgtttgcaagcccctcagtgggggagtccggtttgatttggttttgtttttaccacccccaccctcactactaattttacgttgtctttggagttgctcaggggccaaagtgccttctgggtaagtctctaaccgaaaactagatccacaggcaggccttttattaaaaggcatttaatgactctgaattccttgttgtgttagagctgatttggggcaggataatggtgtctgtggctgggataaaaacccccatgaccatcctccatgcttattaggtaagtgattggtgtggattcctgctctccgaaggaaaaaggaaagagaagaaaaggccaggcctgcctgtggccgcccccgggtctcagcaatggcattatcactgctaacccaggtgtgacttggctccgctgccattggcgtcagcaaggcccgtcagcctccccaaaaagccagagctggcctggagagaggagaggagagcatcgcgggcaggtgctgagggttggccttgtgttctggacaggccgtgagcaggagactgatcgtcttgatgaggtgtgcagggcaggactttgtaatttgacattgttggagaaggaggggcgggggtagagtgaaggccccagaaggagaactgggtcagaagtgtcctttgcttctcattttcctcccaacaaggggcttccctgttgggaaggtttgctaaggcaggggggttattgtgcagagaagggggtgactgccctgtcaccccagtggtgagggaacttggctttatgacatctaagattgtgagcctatgtaaattgcagggaagagtaacaagtaactgaaagtcccgtgtgtgctcctagtgacacacctggccggttgcctttaataaaggcagaaaaacctccgttaagacatttactcatgcctttgagtaaattaatattgatttgacattcgacaactgtttgaatttttacttcttttttttgcatctggagaaaggatctgtgtttagtaagcacttctgtgtgctgatttctgcaattagcctttattcatcccttgcctgccgtgtgccaggctgctctttcccagcatcagggtgctgaccaggcaacacggtccctgccctcggtgagcttatgttccaggagaatggtgttgaggcaaagagggaagtcctatctggctgtcttaggggctggcagttggccagggaagtgctgattagaggggccaaagcctgaattctgcctgtgcttcctggctgagtgtggagtcagtgtagacgtctttctgtctccaaacacagcctgaacctaattgtttcttttactattattattgttttggtaagaatgctaaacgtgaactccatcctcttaacagatttttcctttccttttccttttccttttccctttcccttttttgagacggagtgttgctctgtttgcccaggctggagtgcagcggtgtgatcttggctcacggtaacccccgcctcccaggttcaagtgattctcctgcctcagcctcccaagtagctgggattacaggcacccaccaccatgcctggctaatttttgtatttttagtagagatggggttttgtcacgttggccaggctggtcttgaactcctgacctcaggtgatccatccacctcggcctcccaaagtgctgggattacaggcatgagccaccacgcctagccgtctgaacagatttttaagtgtacaacatgtgttgctatctttaggcatgatgctgtgtggcagatctccaggacgaactcatcttgcatgactgaaattttatacatgttgaacatcaactccctatttcctcccccatctagctcctgacaaccaccactgcagtcattgcttctaggggtttgaccatttttgatacctcacataaggagaatcatgcagcatttgtccttctgtgactggattctttcacatagcatagtgtcctctgggctcatccatgttgtcacatgctgcaagatctccttctttttgaaggctgaataatattctaccatgtgtatatcccacgctccctttatgcacgcatctgttggtggacatttaggtggtttccacgtttgggcttttgtgaatagtgctgcagtgggcacgggagtgctaatatctctttgagattcagatatgacttgttttggataaatactcagaagtgggattgctggatcatatcctaatttatcttgacagtggccacgattctgaacctctttggttttgtcatctgctgggtgacaccgaccttgtaaagactcagccctcacctggaccgtggcattcttggtcccatggctgttcatgtggccctgagagcgaatgaaagtatcgcctcatctcccttctacagtggctggcgggaggtggaagctagtgctgcctcctgccccaccttcccacagccggggaaggggctttcacgtttctgaatctcagcgccaaaaggaacttcctctgtcaggacccacttttgtggaagcctgtgtgaaatgtgatcctcaaatccagcttgaagctgcggttgaatttttgtggggttctcattatttaacgtttggcccagaatggcatttgtctgaagacagacagacaggctggagcttactgggggcccacacagtgtgtggagctcggtctgggctgctctggtttgtaatatattgttctcagtgccaggagctgcagcagcatctccagtgaggaacaaggagagggaggaacctgggagcaggaggggaaacccggagtcggagaatccaatttttcatacagtaacaaaacaatacagttgtgtattcccataatatcccttcagtttcttggggtctaggcttgcatctatttttaaaaacacttggaccaataattctgctttatgcagaccaactggagggtctctagcttggagatttaatgtaaaataaactctaaatggggtggcacacagcatggtggcctgcaactgtagacaagcaatttttcttaaacaagctgagggattgaagtaaatgatggtggtgttcagttctgtcccagagttgggagtgaggcgaggccagggagatggaaggtccaggcttatccaacctcctgtgcgctccctgtgaatgttggtcgggcagggaggctgctcggagggagtctttgaggaagccgactcctcttacctgccgcacggacgtcctggaagacagtctgtgcatccagactggggtttcctagcactttggaactgggctcagaaggcttcagtttggcaaagacgcattgcattttgcaggttcctttgatcacggcccaggtggggccacatccccttagaatacttttctctgtcttcttcccttgggcttagacggccttttgccatctaataataaaaaaaatttatctgacaaatatcaagtatttgttggaataaacataaggcttgctatcttccttggacaaggggaaaataactctccttcacttctgacgagtttacaagatacaagttaatttttggacagattatcctgccaacttaaattatcaataaatcaccctgccacccatggtccttctcgtgaaggaggcgccatctctgttttctgggggaggatgctgcagggctgagatgacggggcctgcctcgagtcacaccagagctggaaggtggcagagctggaagccgagcattccacactgtctccccccaccaccatcagtgtgagccttggggaaaaatagggacgttcagcatgttgtccctgctcttgcggggctcaggatctttgtaagaggaacaggagtaaaccctgaaaatttcggtaaaaattaagaagcagcggagtggcatggttagcgtcactgcatgcaaattgtcctgtggcttgctgctttgtttgttgttattgtttgtttttcatcagactgtgggctcttggggatgctcctctgtgcgctgtttgctgtggaattcccaggagggacggtcatcgtttgttgactgcaagaatgaacgaatgctacgagagtctggggagctgggccttgaaggatgggcatttgttgggcaggctgaatgcaatgacagttgttcaagctgatggggagcgtggcaggagaggaggaggtggagcctgcttggagcataataacggcttcattgagacagaattgtaggctttagatgggtacaattcactcatgtaaagcctacaattcagtggttttagtatactcacagagttgtgcagccacactacaaccaattttaaaacattttaatcgccccaaaaggaagccttgtactcctcagctatcacccccaagcccccaacttcctcccagcccttggcaaccaccaatctgctttctatctctatggatctgcctattctagacatttcatgtaaacaggatagtgcagtatgtggcctttggtaaccgccttctttcactcagtgtcatgatctgttcttccctgccgcggcgagcgtcagtactcccttcctttccgctgctgagtgacactctgcgatgtggacagagaccagagcatcttgaatgctcactcgagccaggcaccaggatgcctaaagcaaagctgttggagtcagactttgacctaattgagttggggttccaggaagatcaatctgatcatgggacaaaacgaaacagtcagtgcctggaggcagaggccccgctgagtctttcttgggcttcttggaagaaggccacaaaggtcaggacgaggaacagccggagaagtgtgactgcatgcatgtcaaggagaactcatcagcaggacctcctgctgtgtgtgtgtgagatggggcagggagacggatctggcacttctggcctggaaaactgggcctggggtgaggattgtgtggtggctgatgggaaggggagaaataggcgtttccacctgtgccttgcctttcagagtgttggcaggcacagagttcagttggctgctggactgtgcaagggggacgtgggagacaagggatcccacagaatccatctttatggaatctacctttcagagagagcagatccacgtgaaagccaggctctcgggagcagtagagcatctgtgatggaccctaggtgagtggcttgcccaggaggaaaggacatgggccaggatgatccaggagggctttctgagagggaggagccaagctctccgtgaaggatggatgtgccgagcatcagcagaggagggaagagaatattccagacatgtcaggcaaatagcaagcacagggtgatatggtttcgctgtgtccccacccaaatctcatcttgaattgtaactcccataattcccacttgttgtgggagggactcagtgggaggtaatagaaccatggggacgggtctttcccatgctgttctcgtgatagtgaataagtctcacaaaatctgatggttttataaagggcagttcccctgcacatgatttcttgcctgctgccatgtaagacatgccttctcttctcctttgcctttcaccatgattgtgaggcctccctagccatgtggaactgtgagtcccttaaacctctttcctttataaattatccagtctcgggtctgtctttattagcagcgtcagaacagactaatacacaggggcactggatgggggagaaggtcgtgtgggtcgggtcctgctgttggaagttgcaacctgcggaggacatcggagaataagctgggcaggctgggtgccatcaacagatgccgatgcccagcacaacagtaactacagctcttgccgcatacttctgttcactcggtgccagtggggttatgttggagccaagtactgggcaaagcttttttttttttttaatttgagaaggagtcttgctctgttgctctgtcacccaggctggagtgcagtggcgcagtctcggctcactgcaacctccacctcccaggttcaagaaattctccagcctcagcctcccgagtagctgggactacacgtgcgtgccaccacacctggctaattttttgtatttttagtacagacgaggtttcaccatgtcagccaggatggtatcgatttcctgaccttgggatccactcgcctcggcctcccaaagtgctgggattacaggcgtgagccactgcgcccagcctggactaagcttttttaagcatatcatgtcatttactcttcacagcagcccactgggtagattgggtgattattacagctttagaggtatggaaaccaaggtttagagagattgagtgcttagcctaagtcacgtatctaaaaagtgctgaacctgggttttaaaaaattttcctttgagtgtaaacaagccagtagtatgtggtatttatacacaacagagtaccattcagccataaaaaagagtgagatcctgttatttgcaacagcatgaatggaactggaggtcattatgttaagtgaaataaaccagacacagaaagacagtcttcacatgttctcacttctttgtgggatctaacaatcaaaacagttaaacacgtggaggtagagggtagaaggatggttaccagaggccaggaagggtagtgggggtgtggtggtggtcagggcgctggagattggctaatgggttaaaaaaaatagttataatagaatgaataagaccctagtattcgatagcataacagggtggctagagtcaataataacttaattgtacatttgaaaataacaaaaaaagtataattcgattgttttaacacaaaagataaatgcttgaggggatggattcctcattctccgtgatgtgattattatgcactgcatggctgtatcaaaacatcttatgtaccccataaatgtatacaccaggccaggcacggtggctcacgcctgttatcccagcactttgggaggttgaggtgggtggatcacccgagggcaggagtttgagaccagcctggccaacctggtgaaactctgtctctattaaaaatgcaaaaattagctgggcgtggtggcaggtgcctataatcccagctactcgagaggctgaggcaggagagtcacttgaacccaggagtcggaggttgcagtgagctgagattgcgccactgcactccagcctgggcaacagagcgagactccatctaaaaaaaatacatatatatagttaatattatatttttatattttatatattatagatatatatatatctacaatgcacctgcaaaaattaaaaattaaagtcagtaataatgaccgcatgttttagacaggatggatgtattctattggtgagtctaggaagcatctagagatgacatttcaactcaacaaacattaattgctcggtgtttgggatacagagctgagcaggacaccctggacctggaggtactggatgagcatagaagagacaaccatccctgtctgtctccacacccgtcagtaaatgcttgtgtggtggatgcatcgtgaacaggcaggtattagcctggggagctcgctctcccttgcacctggctgagtgggcatctgaacaaagacacagaggagacaggctgaggtgaggttcagtaccccttagtgagttgttggtgtggctggaggagggagtgcggaggacagcaggggaaggaaaacgagagggaagctaggatgtggctgaaagacattggggagagctggaggggtggaccaggcctggcagggcagccccatccctgcccccttggaggaagtttcctgaactctcccagctcctgcacagggtctccggcacaggggggcttcctaggtgctgctccctctcccactctgcaggcagctgccgcctcctccaactcctgggcctattttgcccagtcagggccattcaattctgcatcaaggtgctaaatgggtctccagcagctccagagaaagatccatttaaaccgtgtgcatatggggaggagtctctgggaagagcagcccttgttggattcctgcattttgcagccttctggaactgagcagcttttagaatttcaagccacaatttgtattcaaatgaaggtcatttgaaaggtgtaacatagtaaacagccattatttcattttgatggtggcactaaaattatagtgttggttgaattattttagtgtaggaccattaccatctccctaaaacacttagaggcgttcttagaacgctgctaccatcctaaaattagaagaaaactaaaaatcatgaagctgagctggtggtggtgtagctgggggagaggacccccagtgcttgggacactgtcgcctcatggtggcgtagctgggggagaggacccccggcacccgggacactgtcctctcatggtggtgtagctgggggagaggacccccggcgtgtgcaacactgtcccctcatctagctttcctggctctccacagctgtttgagggctcagcccactatgtgcgcatgaagacgggggagtctcagtgctgtgaattgtgggacatagaaaaacgcacccccatcccacctgttcctctgttattcaagtccttaaaatctcactattgagaccttacccccatgagcttttctttcagagagaagcacccttggagggcgtgcctcttactgacagcccctccaggagcacttactggagaagctgtgagtcctttgctcacctgcagctgtgctgaagtctcgcctgttgggggcctacaagtcggggtggagtcgagggcaggtgctgtcttgcctgatgggcccttaccattctgctaccattggacatccagaatcctctgtctccctccttaggcccggggctcctctctctggccagccaaggatggaagtggctggtattaggtgggctggaggggtgggatcccctttagggactctgcactgcattgaagtagcaccgggagtcacgagcccgtggagtgacagacccagagagacttacagatcttcattcttcatggggcagatctggaaattgaggccctagagggacgtgacttctgttaggttatacagtgatttggtttgtctgtgtccccacccaaatctcatcttgaattgtagctcccataattcccatgtgtcttgggagggacttggtaggaggtaatcaagtcatggcaggggtgggtctttcctgtgctcttctcatgatagtgactaagtctcaggagatctaatggttttgaaaaggggagttcccctgcacacacactcctttgcttgccaccatgcgagatgtgactttgcttctcctttgccttccgccatgatcatgaggcctccccagccatgtggaactgtgagtccattaaacctcttttctttataaattactcagtcttgggtatgtctttattagcagtgtgagaacagactaatacacacagcaagtcacagaggatacgagattgagcctagagccttgggcttcctttgctgtcactgggtgtgtggttccctcatcggaaacccttggagtcagttctgttacagaattcagaactctctggattccagaggagtaactgagggtacgtgctggcacagtctcggtggctctgagaacagcccccaatgagcaaacgcactgatatttctgcagtaagacgtaaatacaccaagtgggaccaataagggcaatagatgatgtcagttcagattaaatgtggccactaaaaggtgccaagttgaagaaaaagacattggattcctggaacttttaggatttcagaatttccaataaaggatgtggccatttctaatagtagcacgtgctccttgaagaaaagctgaaaaattcaaaaagtactttagaagatggtaattgccccacatttaatcaatttacagatttttacttatgtatttttacatagcagaatttcttactctgtacaattttgcactctaattctcattattattttatttatttttttgaggcagggtctcactctgaaacccaggccggagtgcagtagtgtgatcatggctcaccgcagccttaacctcctgggctcaagtgatcctcccatctcagccttctgagtagctgggaccataggcatgcaccactacacatggctaatttttaatttttttgtggagacaagttctccctattatgttgcctagggtggtcttaaactcctggattcaagtgatcctcctacctcagcttcccaaagtgctggaattacaggcatgagccaccatgcctggcctattattatttctgagacagaatcttgctctgttgccaggctggagtgcagtggtgcaatcacagcttgctgcagtgctgactcctgggctcaagtgatctttgtgcctcagccttccaagtagctaggataacaggtgcacaccaccatgccccactaatttttaaattgttttgtagaggcagagtcttgctatgttgcccaggcctctcttaaactcctgggctccagtgatcctcctgcctcagcctcccaaagtgctgggattacaggcataatgtatttttttgacatttaatacatgatgtatttttaattgcattagataataaatgtttttctatgtttttaaagaaacatttggatggctgcacagtgttaggaagcgggccttcttgactctcagcctggtgcttttctccctagagcacatgctgcttctccagctagttacactgtaaacccacagagcactccctgagtgttctctggtaggtgcgccgatggccagtgtctgggagatcccctaggagtcatcccagaagcctcctagagcagcaatggggagaacagtctttagggctggagatgatggacagagctcccaagctgtgcccaggaagtgacatttccctctcccatgctggccacaggcaattgggaatcccatcaacttggaaatgagggcagatcctggagaggcacctctcattgcctgtgacatggagagcgggaggaggggccagagtgggggccttcagcaggctccttatgggggtgggtggcacagcccttggaacaagtgtttcctgcctgaatttcaccctcgggaggcccttagctacttcttaagtgtcccaagtacttgtctcatgatctagcgcccttccccaaagtcacaggcagcatggccccgggttctggctccctgtccccacgcagttggcagagcatggctttaagctcctcagtgctgcctaggaccccctcctggctgcctcccccttcactccacagggatcctcgctcagccctctgtgcgtagtggctctggttgaaggtgctggccgtagaggggtggggaggggtggggagcaggagcgatcctgcctcagtggcccaaactcatagggcttggtggggaccaggccaatgcaggacaattgggcctggtttgtgggcctccttgtcactctcccatgaaggagtgagtagggtggagggaggattattgggctaggagactctggagtcctttctggagcggggagcctctgaggctgacccatgtaaacttaccttgatgattcatcctccaaaactctggggattgggaacagtcaccaggacttacagaacattccagattgtggctcctgtgtgctgtctttatcctgtgttactctcccctcaggcagattgtccaaatgtaaattccagaaagaatctaagagtatgtgcggggaaccttacattcctggaaactcattctatcttggtgccatggtcttagaaaatatattcattttcagaaagagctagtgtctatgtcctgtggagccccctctacttctacctgccttccctccactacgttccagctatactggctgcctttcagctccagacgctccaacagtcagggctgtggcacctactctccctcttcttccccttcctcatcactcttactaagtctcagtttaaatctcaaccccctaaacctacaggcacccctgtcataatctgttgtcatactatatgcttttcctttgtaatacttatcacaatttgtctttatatattcatgttaatttcttttgtattatttcatatttatcttcttcacaaagcttcatggaggcaagttctataactaatttgtttacttcagtagcccagtagctggtacagagcaggcactcaataattggatctattatttgatggaaggatggatgaatgggtgagtggatggttgaatgtatgggtagggggatgggtgggtggatagagggttgggtgggtagatggatggttggatggataggtggatagatggttgatggatggatggatagattaatgcatacataggtggatgaatgggtgggtgatagatgaatgggtgggtggatagaggcttggatagatgaatgggtggattgatgattgggtgggtgggtaaatgggtggatgggtgggtggatcgagggttgggggtggataaatggttgggtggatgagtggatagatggatggatggatggagggatgggtggttgggcagatggatggattaatgaatggatagatggataaatgggtgggtggatgggtggatagatggatgggtgggtgggtgaatagatgggttggtagatgagtggatagaaggtagatgggttggtagatgagtggatagaaggtagatgggttggtaggtgagtggatagagggatgggtgggttgatgggtgggtggaaggctgggtgggcggatggcaacatcaagtactttgggaggccggggacttctgcattgtaaaagtgcataaaggggtttctttcttttcatggagaaaatttctattctgaaaatggcagcacattgcctgttgcaaagccaacactttgggaggctgaggtgggcagatcacttggggttaggagtttgagaccagcctggccaacatgatgaaccccgtctctaacagaaatacaaaaattagccaggtgtggggtggtgcggggctgaaatcccagctagtcaggaggctaagacaggggaatcacttgaacctgggaggcggaggttgcagtgagccgagatggcgccactgcaccctgcctgggtaacacagtgagactccatcttaaaaaagaaaatactcacaaaaaacaacaaagaaatgtctcctgggtgagtaggcttcaggcaggacctgggccagtggccggatggccattgactctctctgcacgttttccctctctgtacatctgcatcgtctttcctcagctgccgatggctgggttctgctcctcagtccatctgccagacaccgagttcagacgcgtcaggtcagctacctgaagaggcgactttcagggcctcaaatccaatgccaaattcctggggacgacagtctggagtaatctattaccagggcgctggggtcacacattcggactgtgggaggaccctgcttcccagagaaaggggtcgttgtatctgccacaccagttttacgtagactgcctatgggtctgacttccagttttggctgaagttctcacatcccgtttgatgactgcctggccagatgcctgttaggtcccaggcctggaagcccacaccgattacaaggctgtcccctaagctacaagcccgggaaacctgcccatttggagctgtgagtgtagggggcgtggggctgacttgcagagccaggccaggctggctgtaggaagagaactgcagctgtagctacgggggcccctcagtaaaggcgtcctgggtttgcccaagagagctgctccctgggcctgtcagatgcccactgtgaatgggaggagctggcatctgagtctgacagatgatctctgctcctctccacagcctggctttgcaagaggcaatgtgctgccattttcagaatagaaattttctccacgaaaagaagaaacccctttatgcacttttacaatgcagaatctaatttaggtttcaataagggaaggaaccattatatcaccctacttcagtgctttttgtcattacgttatattttttaaaatactttcatcggggacccgatatacacttacaatctctctgcatttattttcttttaagaacacatataataaaactcaaagttaatagcacgaaaataatttctacaataacagttgtagcaaatcttcgaattgccagggtgaaggtggctagacagagtgaggcaattacgtctattattagcagtgcacggggaggattgatgtacagtgggctgtgtgtgagcagaagccttcagacgtgaactacattttaatagtgaaattctcatagattataacttccttcattaacattttcacacatcgctgactaacaaatgaggagagaggccttctgcactcatagatttattatgcttgggatgctctctgcacctctgtgtatgggcaggagcttcgtcttctaacctctgactaccggcgattaactctttccggccctacctgtttccttcaggcacggaagaacattctggaaatactggctttgcactttaagacttttacaaggtggttcctcgggacagcccccactggctgctccctgccgtctttctgtgcctttcccctgttgccctgcaggtgggtatcagaggacggagggtctgggggaatgagtcaggccagatttgggctccatccgtctgctgccatgtctctcaccaggagaagcagaatctgatccctgctcaggtacttgagttgctaagtggggcgaggcagctctgagcatcaaaggatggttgtttgacacaattattagatctcctattagcaagaggagtgaagtggtcttctgtcccctgcgaggcaggggataccacccaagatgtgacagagggagttttggggagggctcactgggcagagaaggggaagtgggctttgccgtcaggatccaggtgaactgactttccaggtgcagagccttgtcctaggagaggatgaacgatttacaaaggagtcggatgccagtgcccgccctggagggatttgaggttaaggtgggaaaatcttgaggaagggacagtgtttttaggtgatttgtcaaccatcgtccatggttgtacctgcactgtgaggcgagtgctggggcttgcagagaaatgccatcttctggtcaccccattaacccggggaggcttcctggaaaattctgtgagtactggggctccaagatggtggttcctggtggttgtctgtacctggtaccaagtgggttagaagggtgctgtggacgtgagttaatgcagggagcaaacctcccaggtttggagctgggcgttgagtttccagcccatccttcctgatgacgcactcctgctggtttcttttggggacacaaagccttggtgacttaggacccaatattctacaagtttgctcttgggcatatcttgtggtgtttattgggcccccaatggcatatgagaccccctagggccaggttccccagcccctccgcccccacttcccatgctcatttgtgtgtctctgagttagggtattttggtaaactcttcaacaagattgaaattgaacccaggggttttcagtcctgtctgcatattgtcatcactgggtaacttttaaaaactaatgccagggcccaccctcagagactgttttgttttttttttttgagacagagtctcactctgtcacccaggctggagtgcagtggcgcaatcttagctcactgcaacctctgcctcccaggttcaagcgattcttctgcctcagcctcccaagtagctgggactacaggcatgtgccaccatgcccggctgattattttgtatttttagtagagacggagtttcaccatgttggccaggctggtctcgaactcctgacctgaggtgatctgcccgccttggcctcccaaagtgttgggattacaggcgtgagccatcacgcccggccaaagactcttttaaatggtctgggtggggctctggcattgctattatttaagagctcccaaatgattctagtgtccagtccaggttgaggaccaccaaaaccatttggcaggtgatctggcctttaggtgaattagctggaaggaagaagttctgaccggaacaaacagtgaggctgtgggcagatggggatgcatttataaaaccccttactttttctttctgtcttttgcaacctgtagatactcgttgctattggatgcaatgtgggaggcacaggactaaatcctgtaggtcgttgaggaaagggccgctttgcttttggtcccgggaatccaggttccccttcttccccatcactccttccttccccctccatccccagcctgtgctgtgtggtgcccaccccagcctcatggtccccaggtgggcatcatccgcagcaagagccggcgtctgtcatctttgatctcctcctgtaactctgtagggcttagccagctctgcttgactccagcaccagaccagcagcaggagctgctctgcttcccatccctcttccctgggaacattatcccttaaataaaatcaatagacctgggacatgcttggaatctagaagctaatctttcctaagttccgttttcgtgtcagagttctcctagtggccaccattggctgtgcagtgatgggatgtgggaatgaatccatggggacccccagtgcagtctggggaggtggtgcgggtgcgctgggtgattctgctgggagaagggccgtgacgctccgaaagctggtgctgggcttccttccactgcacagggctccatcctgcatcccggcaccccaccaagtgttagggagtgcgggaggcagacctaatgaaaacccggtttcattttgcataatcaggcactattgaaacgagcctttcagtgctgcttgctgcaaattaacaatctgacttatatacaataaaaacccgagtattgtacaaagtgatacttcttaggtagtggatacacagatggaaattcatttaatgaactacaagtccctgaatggattctaaacttcttgtaattaccctggaaagaaccctagtagaagcagaaaaaagccttttggattcccccccaccccctacccctgcgccacggcagttggctttctccatccttcaggttgctttgtcggaaatgagcatcattctgtgaagagtacttggagtcccgtccaacgggttgggccgcatgtggatgagcaaacctcattccccctctccaggttctgaaaacagtgtgatttgtaaaggctttggtgctgaaccaaatgcatcttaaatggtatcgtaaagagtttaacccatcaccccagcatcagccagtgaacagtctggctggctgcccgagggactggggagacctgctctttgtagcactggactgactgagtctagactgagccaatccgaggcagagactcaaccctgctcctggtagttttctttgaaagatggtgtcccaatggggaggccttcagaagagttccactaggccaggagtcactttcccctttgataaggcaggaggggcaggggacatgacagggcagaagttccttgggaaaaccagagcagagccaggttccagccctcaggtgagccatctcccacctccaccaccacagcctgatgcaggagccatctgggacctgcctcttccaaggagacagttccatggaagggggttagggacggatgtggcatccacaaggagtgccacactcgataagtatcccaacctgttccatatttattatgggcaacaatttgactaacggagaatttagattaataacattcaggccagagaagtaatttcctttgagaaagcgatttacatgcgctctgccagagagagccgtggccgctctcttgtcatgtcagctcaaataatgaagttgaaaataacatggaaggttaataggtccaacttatctctttagaactgaaaaggaagatttacagtgtggaggctgttttgcatatttccagtgggaattgaaagttttttttccccaaacaagatttatgagaactcaccgttcaaggtatctgctctgttattgctcctaagtgaggcagtaaacctcttcatttgggtggatgccccgggctttaaagatagctgtcttcccccacgtcactggcaggggtgtactggaatgctggcatgggggtgctacctcgggaagagtttaactttgaaaggagagtcaactgcttctgactctaggaggtcacatcctttgtttgctaatgactagagagaggattaaacatttccattacctagacctttcaaaacatttcttggatttattttgccattatttactgaccttggggggtgagtcctgggctggaggaatagagggaaagggagctgggtcagagcaaggagaatgggggagtggggcagcaacatgacctctgcattccaggcaacaagtgggtctttcaggctctcacttgcttcttaactggcttccctggaaagctcacccaagcccttctgctaacatctcactggccaacttcatctgcagacgggctgggaggggcaatcttttgctcagcactttcctgcccgtaatgaaattggagtgtgttatttaggaagaatgggagagtggatattggtaggtcaccagcagtctttagctcaagtgtttagttcatttattttcaatctttcttgttttctgttaaatgcaaactataaattgtcctttaaatactgctttagctgtgtctcacaattttttttctttctcccaaacattatactgaaaaatttcaaacgtaaagaagagttgaattagatatgatatatccatcactttaacaatttgctatatttgctttatcccatattcatccatgtatcaattcatcaatccatcttggtttgatatatttcacagtaaatcacagctaacagtacatgtcgcctctaaatatttcagcatgcatattatgaactgtttatttactttttaaggtaaaattcctacagtgaaacacacaatcttaagtgtgccgtgcgatgagttttgacagatgtgtctacccatgtaacccaaacttctataaagacacagaacatttctatcatcccaaaagggttcctctggtctcttcttagtcaatgctctcctacccccaggcaaccaatgttttgattattttcaccattagttatttttgcctattctagaactttatgaattcatataacatgtactttctctctctctgtctctctctctctctctctctatatatatatatatttatatatatatgtgtgtgtgtgttttaatctcaatagctttttgggggtacaagtggtttcaagtggttttggttacatggattaatttggtgaaggctgagatttcagtgcactggtgaccggaggagtgtatattgtacctaatacgtagctttaaacatgtcctcttttaggcaaggcttccttcattcagcatgttttttgagattcatctgtgttgttgcaagtatcagtagtttgtatcagtagtttttttttcctttttattgagagtagtattccattgtatgaatgtaccatagtttgtttatccattcattcatggacatctggtaggtttccagtttttggctattatgaataaaactgctgtgaatattttgtacaagtcttttttggggatgtgtgtttttatttcttttgggtaaatgcctaggaaagaattgttgggtgctgtgttttcttttttttaaaagaaactgctggatgtttttttcccctaaagtggttgtaccatttccaccagcaatgtatgaggattccagttgctctccatactcaccaacatttagtgctgtgactcttaatttcagccattctgatgggtgaacagtgggatctcattgtggtttccacttgcattccctgatgactaatggtattttccatgtgtttattagtcatccatatatctccctttgtgacatatctgctccaatcttttgtccattaaacatcgtggatttcccttttgttagtgggggcttgtagtttatatattctggatacagttctttgttagctatatgtttcacaaatattttctcttagaatgtggcctgcttattcatttttatttttatttatttgtttatccattcattcatttattttgagacagagtcttgctctgttgcccagggtggagtgcagtggagtgatctcggtttactgcagtctccccttcctgggttgaagcgattctccggcctcagccttctgagtagctgggattacaggtgaccaccaccatacctggctatttttttttgtatttttagtagagatgtggttttgccatgttggccaggttggtctcaaactcctggcctcaagtgatccgcctgcctcggcctcccaaagtgctgggattacaggcgtgagccactgtgcccggcttttgtttattgttataatggtgtttctttatgaccagaattttacattttgctgaaatatattttttatgatttatttatttatttttgagctagtcttactctgtcacccaggctggagtgcagtgatgcagttatgcctcactgcagccctgacacctggggctcaagcaatcctctcacctcagcctcccgaatagctggaactacaggtgcacaccaccaggccggctaatttttgtatttatttttgtagcaacgtggtcttgccatgttgcctaggctcgacttgaactcctgggctcaagtgatctacctgcctcagcctcccaaagtgctgggattacaggcataagccactgtgcccagcctgaagtttatcacttttttccctttctgattatttctttccatgccttctctaagaaatctttgcttattgtgaagatattctcctatgttttcttctagaagccttataatgctagcttttacatgcaggtctgttgctcatccattttcacactgctagaaagaaatacctgagactgggtaatttatcaagaaaagaggtttaattggttcatggttctgcaggctgtacaggaattgtggctggggatgcctcaggaaactttcaattatggcaggagggaaagcaggcacgtcttacatggccagagcaggaggaagaaagtgaagtgggaagtgccacatacttttaaacaatcagatcttgtgagaactcacctgctatcatgagagcagcaagggggaaatgcgttgccatgatccaatcacctcccaccaggcccctcctgcaacactggggattacaatttggcatgatatttgggtggagacacaaatcccaaccatgtcaccatctcagattaacttttatgtatggtgtaaggtaggagacaacattgttattttccatagtgatgtctagttgttcagcaccatttgttaaaaaaagactttcttttccccattggattgctttggcacctttgtctaaacattaattaaccacataagggtggatctattttggtttctattcttttccactaatctatttgtctgtccttataccagtacctcactgtcttgattattggagctttataataaatcttgatgtcagttctccaactttactttttcaaaatgatttgactatcttacctctttgacattttcatataaatttagaatcagcttgtcaatttctattaaaaaaacctgcaggtattttcattaggatagtgttatagattatttggagagaactgtcatctttaaaatactgagtcttccagtccataaaggtggtatatctcttatttaggtcttctttaatttccttcagcaatgtttttagttttcagtgtggagattttgcacatcttttcctgaatttattcctaggcattttatgattttttttttagacaccattactaaaatccccaattgagataataggtctatttctctctttatttctgtcaatttttgcttcttgtcttttgaggctctgttattaggcacatgcacaattatgattgtaatgcctccctgattaattgcctcatttttcactatgaaatgtctctacttctggtaaactgtttgtcttgaagtctacgctacatagccatttccagccttctgatgtttgtggtttacatggtgtatgtttttttatctattgctttctttgtctttctatttaaaatgtgtttcttgtagacagcctatagtttggtcttgctttttcctacattctgacaatctctgtttttaaactggagtgtttagtctatttatatttaatataattattgatatgtttggatttaggcctaccatgtcgacatatattttctgtttatctcacttgtttttaattgctctttgggttaattgaatgtattaaaaataattttaatttgttcatgcctctttgcatgttttgaattttttggtggttgcactagggaatgtaatgtatattcttaacttttcacaatctacatgtagttaatatttgtatcactttatgtaaattataagaatcttgcaactatattgtttatatcttaatttcttcatgctatacttgttatatgtattatatctatatatgctataagccccatagtgtattttttctttttttgctttaaacagccacatgtgttttatgacagtaggagaagaaaatggtatcttttataatcatactttggaagatctttgtttcttcctgaaatcagagttcccatttgtatcattttcctttggtgtgaagaatttcatttaactttatttcatagggaagatttgctggtggtgaattttcttatattttatttttcttaacatgtcttcattttgccttacttaatggtggatttttcactgggtgtagaattctgagtggacagtgtgtttttctctcagcacattaaaggtgctgttctcttccttctggcctcttgtttttgataaggtgttctttagcatttgtgttattccctgcggaacgtgtcctttatttctggctcccttcagaattctccctttatctttggggttattcactttgaccatgatgtgcctaggtattatttgttttgttttgttcattttgtttgaacttcttttttttttgagacaaggtctggctctatcacccagactagagttcagtggcacaatctcggctcacagcaacctccacctcccaggctcaaacgatcctctcccctcagcctcctgaatagctgggactacaggcgtgcaccaccatgcctaactaaattttgtattttctgtagagacagagtttcgccatgttggtcaggctggtctaaaactcctgggcacaagtgatcctcccgccttggcctctcaaagtgctggggattatagacatgagccattgcacccggcccgagcttcttgattctgaaaatctatgcctttcaacaaatttgggaaaattttggccattatttcttcaaattgttattctgccatattctcattgtcttcttctgggacttcaattatatggatatttgacctcatgtttttgtttttttaaaaaaataaatcaccaaggcttgttcatgtttttcaaactctttttttttccagatagatcagtatttatcggtgccagcactattgacattttgggccagtcattatttgttgcatgtgggaactcacttgagcacatttactttagatcctttaaaatcttttttttcttttcttttttttttttttttttttttttgagatggagtctcactctgtcgccaggctggagtagtgcagtgacatgatcttggctcactgcaacctccgcctcctgggttcaagcgattcttttgcctcagcctccccagtaactgagactacagacctgcgccaccacgcccagctaatttttgtatttttagtagagacgaggcttcaccattttggccaggattgtctcaatctcttgacctcgtgatccgcctgccttggcctcccaaagtgctgggattacaggcgtgagccaccgcacctggcctaaaatctttgtcttccaatttcaacatcgttttaaaatacaaatcattattattcaagtatggtgtgactaacagatcgggagatgattgcttttgaaaagaaagcttgttacaattccaagaggaaggggtactgcctgctacgggggcacatgggagagcaccaggagtggtcagaggtggagggagcaaggagaagtatggatcagagcctttgctgtggtttctgtgagaagggcaaggccaggccaggcaacttagacaggcataagactggctagttcaaacaattttggtgggctctgagcgaaggggctgtctcttgctgcctggtacctggccctggggcaagtagggcaggggaacagtggtatgagtgagagctcaccaagggaggcgggtgtggcgtgggcttcagaatggttggtttgcacatgaaaggggcattccttggcaaggcatttgctatctgcaggaattgtctaaccctgggaagtgcggtcctttctagagttagcaaagccccaagacgtcaaaacatcagaataaacagacatcttcatacaaaaatttgtgtcatctcagagtccattgattgattgccttttctcttgagtatgagttgcatttttctgctcatatatcttgtaatttgggactggattctggaccttgtgaatgatacgttgcagagacttgggattctgttacgctattcagaataatattgagtttttgttttagcagatacttcgctgagttcaaactataaactctgtcttgtctctgctgcagcagaaatctctgtccaggtgtttaggccttaggtgggctgcttacagtctattccatgcaaacataattcagagatcagctggagattgaggcagtttatgcacagactttggtgttctccctctgtggctctttccttttagggagttcccctttcattttctagctgctgtggttaacccaagctctcctctgattctacaaaaagtaagacttcagttttctatctgagtattagctgctctgtgacactgactggggcctgcctcaggcaaaaagctatttaaaaaaaaaagaaagaaagaaagaaagaaagaaaaaaagtcacaaaccctcagaaacttacccagtcttattcccttctttctactgtccaaatcccacccatttctgcctgcctttggtctctctctattgtcctctgattaaaaaatatatatattttaaatgttggaaggttggtccaacaagagctacttctccatgattgaaagtggaattctatgtctcatgaattttgacacatagtgattttcctgtgttctaagtgttcaaaaatttcccttacgattttttcctttaacaagtatcactgggatgtcttttcgcttccagatgtgtcggtttgcaagcgaaccttttgttggtaattgtaagcattcttatgttacagtcttacgtgtggttcctaggacgatgattctttggcattcaccgaagcttcccttgtggctcagtgcatgtttaatttttttgtgaatgttctacacgtactcaaaaaggatgtgcattctctgttggacgaattttccgtgtatttattagttaaaccctaataaattccttcatctttgttttttgctttgtgtgtgtgtgtgtgcgagccatcagtttgtgaggggatgcgttaaagtctccaaccaaacctactgatttatctatttctttttgcagccctgtcagatgttactctgcattttttgaggccaaattccgaggtgcatatcttttcaggatcatgacatcttcttgtgttagttcctttcggaagcatgtcgcgtctctccctatcttacctgtcctttggctcttcgggcagcctctcaatttcaggtttttacacatctctctaattctgggaaattcttggttattagttcttcatacagattcctccattcatgtttctgtcctcctgggtctcctgtgacatggatgttgacaggtcgtcttctgttttccatatttcctttcttttctttctttttttttttttttttgagacagagtttcgcttttgttgcccaggctggagtgcagtggctcgatcttggctcactgcaacctccacctcccgggttcaagcgattctcctgccttagcctctggagtagctgggattacaggcgtgcaccaccacgcctggctagttttttgtatttttagtagggacggggtttcaccatggccaggctggtcttgaactcctgacctcaggtgatccgccctccttggcctcccagtgtgctgggattaaaggtgtgagccaccgtgcccagcctcctttcatttattacaaattttttttccatctctttatcttttttttgatgcattctggtaagctccctgttgtgatcttaacctcactaaattattctttggctgtgtactgagtgcctttttttgttttgttttgagatggagtctcgctctgtcacccaggctggagcgcagtggcacggtcttggttcactgcaacctctgccttctgggttcaagtgattctcctacctcagcctcccgagtagctgggactacaggtgcgtgccgccacatccagctaatttttttttgtatttttagtagagacagagtttcaacatgttggccaggctggtctgacctcaggtgatccgcccatctctgagcgctttcttctaggaataagatagaataagtctgcacctccagcaggcttcttcccctcatctgagtccagagggagccctggagctctgcgtgctctccgcacatgccatgccactccctctgcgtcacatgtccctctgccaccaagatctgcttttatccctgtgctcctcagtcaccagagggagcccagactcccaagcctgtccccagggagacctgccctcaaggtttctttgagaatccactccccatgcactttgccttctccatagcaccgtctggtgcaccttgcgtttcgtctctcttgccaaacgtaagagccacggaggcagcactttttgtctcttttgtcctgtaacatatccctggcatcttgctgtggcgtctgacatgcggtggatgctcaataaatatttgcaaaattaatcaataattatactgtagttttattttacctatcatgtttcttttcataaagctaccttttattggacatctatgttcaaaagcagtgttaggatctttacatttatgacattatttaaatattcatttattcatttctttctaccttttttgtattgtaaaatacacataacataaaatttaccattttaaactttttttagtgcacagttcaatggcattaagtacattctcacttttgtgcagccatcatagtctccagaagtttttcattttcccaaactgaaactctgtgcccacaaaacaaagcaattatgtttctatagccagcgtttccagtggcttcttcctatgactgcctcttcccactctgtgttcccagtgtcttccctgatctctttgaggatatctgcttattttgaattcttgttctggtttgcctcttaattctgcttcctgatataaacatagggtttgtctttgtgttacgttgttcttgcactgagataaagaaatgcctgagactgggtaatttataaagaaaaggggttgaattggctcatggtttggcaggctgtacaagcatggtgctcatcacttggcttctggagaggcctcggggagcatttatttatttatttatgagacagagtctcactctgttgcccaggctggagtgcggtggtgccatcttggctcactgcaacctctgcctgtcaggctcgggtgatcctcctatctcagtctcccaagtagttgggaatacaggtgcatgccagcatgcctggctaatttttgtgtttttgtagagacggggctttcccatgttgcctaggctggtctcgaactactgggctcgagtgatctgcctaccccagcctcccaaagtgctaggattataccgtacccggccgggtcttttttcttagagcggttgtactccttggatgtttggttatttttccctgtgagccatagctgccttggagggtcatacaggtctaggccaggggcagggcctgcaccctcacttgtgctctttctggtgagttctagagaattgggggtggggagtgaggagaatacgttggtgataaaatctggtcttgatcattccctgatttcagtctgctttttcctccctgtagtgccctggccaacctgaccctgacaggttcttttctgagagctgccagcctctattgcaagtcccccaaccaaggggtggagaaagagaatcgagtgttcaggggccaccctgctgccaggttccactgtgatagactgtctgcgttgtctgggccctggtaccagctggtgctgggtgaggggctggtgcttctgctcttctgtggtcctcgctctagggacaggatgggagatgtgtgtccagggcaagatggagtggggagctgggccaccgaaagctggcttccttgcagcctgctcaccctggagctggcgcctctttcacttcccggtcctgcagccccctgcgtggggaggacccactcatgcttgtcttccccaggaacttctcaccatttctacccaagactttcctcttgtttgggggcatctctaaaatatggggaaccagcccctgcgtcagccactgtcttgctagctacctttgtcttttgaaggccacagggcaggggagtaggtttaaaatggctctgcttaggatgggaagttgaagaggcaggacaggagcgaggtggggagcatgtcttatggagcggggcctggaaaacaagcagtggaacagtctggctgtctccccacagcctgtggagcaggtcagcttatggggctcctatcctgagagggagcaggtgccttggcccgtggaagtccaaggttctgcatgatgtggcctctcttggctctgactttgggtgcttctgacttgtttaccacatatgtttcctttcaggttcattcttccacattcccacccttacctgttgacctcccccaattcctgctcatctttttgtctaatgagcttctggtgacttctaatgggcaccttatgttttaaagtggtcagatttgtttcagagagagagactttgtgggaagccacagacatgtttttatagaatcccagtgtctttgagcagaaaggggctttagaggtgacaggtcccattgctctcagattatcttatatttgactcactaattactcatttaagaaacccagttcccacaccgataggaaaaaccctaccctttctttcagttgtcacttacatatttataattgtcgttatatttttaatttctttagttttaaggccatgagtatcggagtaatggtgatgggagaaaatttgctggggagttcttaatcatcgtgaaaatcccatgttttcaaagcacttctcaccacttcaaaaccaccaactctctaaactccattttcagagcacttctcaccatttcataatcaccaactctataaactccaggaggataggagtttgtctttgtgttcactgctgtctctccaggtcccaggacaatgctctctacgtatttgtcaagtgaacaaatgacaccgttagtaaccctacctctgaatcccatctcttagctccaccctgcacttgaatattttcagagctgaggagctcaccactttgcacgctgacctgctatttctgcaatagtataaatggtcagcaagttcttgtttctgctgagtgtaaattattcaccttgaatatacattatcagtcctgcttctgtcccctggaaccacagagaattccatgaattcatctcatccatgagggcgtttctgatattgacgacagccagtgtggtctccctaggatgtctccaacaagcacatgtcccggatttcacgtcttcttcaaaggatgctggtcttcaccacctttgtcatccttttgggagtgagcccttgtttacagcactgattttatatgtggtaatgacaactaaacactgcatcaccaacgtggcttctgatcagagcagagaggaacggctgtgccaccttccttcttcttgacattatccttgattaatgcaaccaagctaatgccttctgcgtttgcacttaattacaaccctttttctttctttcttcttcttcttcttctttttttttttttttttgagacggattctccctctgtcgcccaggctggagtgcaatggcgctatctcagctcactgcaacctccgcctcccaggttcaagcaattctcctgcctcagcatcctgagtagctgagattacaggcgcctaccaccacgcctggataaatttttgtatttttagtagagatggggtttcaccatgttggtcaggctggtctcgaactccagaccttgtgatccacctgcctcagcctctcaagtgctgagattacaagtgttagccaccgcacccggactaaaacccttttccaaatagattctcccctgttctgtaccccaatcaggagtaaaaaccccatgttttgaaccgaggtgcagtgtcctatacttgcccccagcactgtgggatacgggagtcaggagacccacctgcattacagactggtgatggtgatcacataaaacagcgcagtgggaaagtgctttgaaagccatgaagaagtctaaggctgcctattattgctgtgtagctggtttattctatcataaacccattgaggtctgtttaaattgtgtgttggcccaccagaatatcagcatccttctcagtgttgttattcacggggtctaataagaatactttctatgacttcatttaagccattgatagaaatgaccgacaagacagggctgagggcaaaggccgtggcacatacttgtggggtgacttggatctatcatatcgctccatcctttgctagttcagttactcaaccgacagtgcatctccttgattgtactaccatctagcccatgtgccttcatcaaatttacagggataacatgatggcctttgctggctgccttgctgaaatccagaggcactgccgtctatggaaatgcaggttctatcaaaagagggaacgtgccggtttgccatgactcactcttgacgatgctgaacaggctcctggaggccacagcttctccctaagcgctccccaaacctgtaatggccagcatttcagcacagaggacagcgcaaagaagccatgaggactccttgaaggaacatggtaaagagcatggtaaattgctgtgctcggactcagggtttctgaaccttggcactattcacattctggtctgggcaattctttattttaagacttgtcctgtgcattgcagggtgtttagctgcatgcctggcctgtgcgcaccagatgccaggagcaccccttgctcagttgtgacaacaagaaatgtttctaggcattgccaatctgggggcaaaattgcccctggttgcaaaccactggtctaactaaaggagaaggggccagaaatatttagaacagtgatacctgccccaccaccactaccgcagtttctgggtgtgccttcagaataacatagatttgttatatctgaattgcattttgcagaggttagtatggaaatggatttgtatgctttgattctgctctgtcaatgtagagtaatgtggcccagaatcatgtttggtggcagcaggggtgccaggcagggaatgatccctgtagcatagatggctatgttagtagatggtccacgtgagaacacgtggaattcgacacgtcggcttagggaggtgctgatggaatcccagcacttaccagtacatgcctagagcgagggagctcctggactttattattatggtctggagcagcaaaactaaaaaagataatctctcctgggtgtctggttttaaggaatcactcatgcaggtaggttggtgatcatgggaggccacagaggtactttgttcagaagttattgtttccattagaaagagtaatgattttcatataccagcaagaaaaaacccatgttatcataggccagggatgagaataacaggaaatctccaagtttacggaagtatctggtttatgccctaggaggtaataggagttgtgagaggtgggtcaaggcctgccaacacatgtcagacaagagattattcatcattgttatttttgttttgaaaattaactccccgaaagggtcaggttgtgctgtgcctctcgaaggtgtaattccactttaaactgtaagctgttctgagatgatttcagcacaagaacgcgtttggttatggaacatgatttccccagctttccttgaaataaaaaattgcccaacatgcttaggaaatgggaattatggtggacacaatattattttctaggtggatcaccttataaacgaaagttccgtcatccagttaatggtgaaaaattgtctatttgaagagagaataattgccaaggagcagggaggccagtgttattgttttttcttttcttttttttccctcaaaaacagggctttgatatccattgcatttcaattgcatttagacttttgcatgaggcagctaggatcccagccaaagaacctgggtctggaacctgaaagtgggttatgaagaggaggcagctgctctgggttggcttctggaaggttgagctggggcttggccaatcagctgggcagagctcaggtagtcccattttattgctagaatgttctcataatcccacggagccttcagaactatgtgttctgcttgctttttttctttctaatttcaagtctgtttgttgtgaaataaagcatatatacaaaaaagtctactaaatggaaatatgccgatccatgaatgaaagtatgaaaaccacttaattcaagattatatcatgccagcacctcagaagatccccttcatccttatcccccatcctcctcaaagacaaccactatcctgatttccaacattatactttttcaattttttcaatgtttcctatttttaaattgtatttatttatttattgatttggagatggagtctctttctgtcacccaggctagagtgcaatggcacgatctcagctcactgtaacttctgcctcccaggttcaaacaattctcatgcctcagcctcctgaatagctgggattacaggcacatgccatcacacccggctaatttttttttgtgtttttagtagagacggggtttcactatgttggccaggctggtctcaaactcctgacctcaagtgatctgcctgccttggccttccaaagtgctgggattacaggtatgaaccaccatgtccggcctcaaagttttttagtttgaaaaagttgtaaacctacagagaagctgcaagatgattacaatgccacctgtctacccttcacctaggtggaccaactgtgactatttgccacatctacttgatctcacctgggaaattcttagccacccaccttggaagctggcttttgggccatcaagtgacactctggccggttttccagacaggcactccatttgctaaaatccagctggttctgagtggccatgcaaagactcctggtaaaatgaggagggctacatccctttggaacctcccaggagtccaggttcagttctttgggaaaaatagtttatcaatccatctgtgaattcatgtattaatttctccccctgcctttccctcccttccttctgccttctttttcttcttgcttttccctttcaagaaatactttctgatcactgtgggcctctgtggcaggtgctgaggatgtgctcgtgggtgagatgggcctgtctttgccttcaccatctatcttctgggtatgggggaaagcttgattaatatctaggcaatgacaaaaagtggtacacaaggaagtatgggatacaaagggaatacataggtatttcctacgtacgtaggtattccctccagtctaggatggcttgggaaggcttcctcgagggagggaccccagtccagaaggacacaaagaagagaaaaggggaaaagttgtttctggctagagctactttgagtcctgtgtacttgagtaccaaatggatgcggcactgaaacacatacagccatttgcagaatccaagtggctcaacagggtctggaggggtggcccctcagtggagggattgctgccccagatctggctgtacggagttggtgtgggatagaccagggcagggtctgttggcggattttggtgttggaagaacagagaggacagggaaggtagcattgggtgtggagcatttggaaggatggagaagcagggtggggtctgtgccagtcacagtgtctctgggtttagctagatgtggaggaaaatgggaagggcttcgtagacctgcccatagtatttgggtttggaaattttccagatttaattctagtctttccctgggcaatgggatatcttcagattctcccaactctatccttaaaatcctggatggtaagatctggtaggcagagagatttttaagaatagagtttacttttccccattaaaaactaatatatgcttattacggaaaatttataaagtacataaaagcagaaagaagaaaataagaggtggtattttactggattgtggattagtcctagaaattctatggaatggtgggtggccagatttattccattcattgtttatttgatgggaaaaaaacccaagcagcccaaccctgtactgttttcagaatcaccccaaggcctgggttcagaatattagcttgttaattatcaggaaaatgatagagctgagaagaaattcacccatctctaaggccagctggagaacccagttgaggtgggctgagatggaaatgaccttctccaaagcactgagccccatgaatcatccctggggcacctattagctgtgagctccattcatccttcccggaggactgtccccacctgaccggtcacagctcaccccaacccagagcctctgagggctggagcctctctccatctgagccctaagcttccttttccccttgttcccacactaacattctatgatttcccccttaacctcttcatgacatcaaccagtggagaccttgtatgatttctagagttctttttttcccggttggaggacttacttatttactctggttgacattctgctttctttcaggaaggatttgtgagagcctagcacaaaattcactttcttaacaagaatgtcagatggtagtaaaaaaaaaaaaaaaaaataagaatttttggatacggtattaataatgttacggaatgggctttcagtttggccacaggtgtcctggtagtcagggccaaggggatggatgatggctcgtggttgtttggtgggcaccatgctacctctgagaagagaggtgctctgctgctggctgcggcaaggaactgatcacataggatctcacgtggggagcatcgaccaggagaggggtccacattgtcacagcagcttggagcgtggaagcacacatataatcatcacttaactaaagctgaggccagatagaggagacttggaagtgagggacccgaaaatgggaacccttgctaaggacacaggcagctgtacgccagagcctgtgggccaccccgaggaagtgacccctatgagccagccttgtggggcaacagaatgtcacacccaggtccttccctcgcctcgagaaccccaagcgaattcccacttcccacaggaagtagttcagacccttgggatacctggcgtggtcctcctgaccggggctcagtttacctcctgcttcagcccttactcgcctcctccaatcccaaactcctcccatcctcaggtgacctggtgcttgacccagactgccgaggggtggccgggccctgtcagtgctgcggaggtgagctccttctgaaaggaccccctgtggggctcccggggcgtcgcttctgcctcttccagtgctttccgaccctgtgcttttctaccgacttctgggccgggtcatccactcctccagaagagaggccagggagcattccatcagccccacctctccagaggcccggcacacagtaggcactcaatggttgtaaactgtatccacctacaaagcccctagagcttgtgagacccgggaaacagcgttccatacaattgagtgacagagccctgcgtggaaagggaggcccgtgttggtgccctgtcctcatccagtgggaggggaggagagacctggaaggaagatgggagtcccaccccagcctgcgtgtttctctgggaaacaggtttcaagtgcagggaggtggtggagggctgacttcatggccagcactgtcctgggcaccgtgggtcgtggaagggaggtggagctcggttttccgtctgggcctcaggtggactcagaggaggttcttagagaaccatacagggcatatcaggtaagcacgggtacacaatgcagagaaacagtgcttgctgcaattagagaaagcagagaaataggagctggagtggtcactaaaggcacgaacggccttgacggtggagtggggagaggcagacacattgccggcacaaagagcatgctggatgacaggtttcgtggcttgtttgttgctttaattgatgtggacaggggattccaggtaggagaatccaggcaggctaggaaggagcttggctctgtgtggggcatgagaagacgtgctggtcttagcggaaggtccccagaggaggggaggctcaggggccggcaaggtggctgagcctcgagcaccctccacagagcaccgtgccaggggcctggggcgcatgttgtaacctggctgtctacactagatgaatagaactttcacaggttagtggcttcatcttgattgtttaaatttcataaggcgttgggaccccttacgagtagctctgaaagggaatggattgctaataaatgcaaactgtaaaatattcatttgagatgattattttatattattgcataagtgcaaaatgaatgaactttctgcttacttatggtggaatccacaaccatctgagctatttagtgaatgaaatatttaacctaatttctatgccttaagtgacctaaggataaatgttatggtttaatgttttagtgttagagaaggaactaagggaaataaacagacttcgaggcctcctgctggcttccaatggggaaggagcatctcctgggccaggagtccttgggagcctccagcatcttcccgcccctcacggagggtcagcggccatgcccagccatgctgccaggacctggggagagcagtaccctcagccctcactctcaggagctcagggctggggaggggacagcaggggccttggccatgtcccttccctttctgggccccgtttactcctcagaacaaggcaggctcggaccaggaactcctggggctgtcagctccaatgtggcagagttgtgagtgctggaggctgctgggaggtttctggggggctaggactaggatggctgccaggacttgagggtggaggcagggacagagattccccagaggcggcatcgtgggtgggaaggcaggaaacccgggtctgtgtcctcctggggcagtgtggttccaggacccaggtccagctcagtggccaaggaaagcccttgcctgcctgggcctctctgtgctgcagtgtccctgtccggccccctcttcacttttgcatctgatgcatctgcactgccagggctgccaggcctgttttgctgccaggtgccctgtgttgccgtagcccttgaagaaggaccaccgcagcctcagaaaggggcaagcatcacactgcggcatcacggacacctgcagctccaggaagctcgggggcgagtgtgagccctgctgcttctgtcccccagagccccggtccgggctgcactcccaaccttgcctcccagcttgacgtgcactgctgatgagttggtccgtgcagagcctctaaggcagcttggacatggggagctgtgggtttggtcctgctttgtgcccagggctctgggttcaggtagccagtgctgagccctctgtcactgcagcatggggctgctttccctgcggtcctcgtgcttgggctctagcttggtccaaaaggctttcctcagggagctccccatttgagctctgggccttggcagggattggagcaccatcccttggaggtgttggcgctgtccaggtgccggccagtgtggaaggagctggctgctgaggatttaccagccccttttggttaccaggctcaggcacttgccaggggttggttggtttgtttcttctggatttggatttgtccccaggacagacgtccttgggtcttaccaggaaccatggcctgcaggacactgctgcgaggagggcttcctggagcttggggaagcttcagtccagagaagacagaggacttgactgagctcatggtcagggagtgtcagaacgaggaccaggaccccagggccggctcctgggccgccccctcactcggcgtccagtgctcaggcctctgggctctctctggcccttgcttggttgagctcagctgtgctcagtgactttgggccacgggctgtggcgtcacatcctccagagccttctctggtcactcccaggtcatgtcagtcctgaggatgccaggagacgctttctgaacacagtctgcgtccttccttattttttgttatcttggctgtttgacaaatagactttggaggtggaaagacctgagttcaaatctcggacccactactgaccagctgggtgacgtttcattatccataacatagagaagatactgagagtccatgagacaccacacagaaggctcatagcatggggcctggcaccgaataggtgctgtttacgtgatagcttgtatggttggctctccacacccaccctcactgccacccccagccccagccttcctttgtgcccgtttctgagtagtaagatttcttactaacagtttcttgtactcagcttccccatcaccttccttccatttcagcagaaccctctggagtggagcaagcgatgggaaatgctcttatcaggcacctgggacctaagcaggtgccctaaccagcagcagctgagcactgagccctgggaacacctgtgcccaggtgcaggtgctggtgagggtggctgccgctgtccagccctgatctctggggcaaatgaatgttccaaccccaaacatccccacagcggtcccgacagacgcctactggtttggcaagcactgtcgtgcgtgggagctctgcttactggcttctgtcttggcatggtctctgcagaaggaagccactgcagacttggtggctggtcttcgcattgggttgaagggtgattcagtgttccagtttggattgtaactgctttattttttaattgtttttttgagacagagtctcgctcttttcgccgagactggagggcaatgctgtgatctcggctcactgcaacctctgcctcttgggttcaaatgatgctgggattacatgcatgagctactgtgccctgcctggattgtaactactttaaaaaacccttccaatgctcctcagtgcccctagaataagcttctagaccctcagccctgccggcatgcccattcccatctttctagcgccctctgagacccttcgccctcctatccactctgaagatgcggaggacctaccttgaccttccccccatgccatgaacatggcgggggggccctctcctcattccagacccagctctggcatcactcttctagaggtggtcccagagcatccgtgtcaaaaatccccgtcccagttcccagcttcatccctgtctacttccttcatgacgtttatcacagtttctagctattttattatttgttcctttcctttttggtccacgtcccccactacagtgtaacctctacaaggcgagaaactctgcccacctgtcactggtgtgtccgcagtgccagctcagaggctggcaggcagagccgctcattaatatatgctggctgtgaccttgccattcccagtagttccgatacctccaaattccgagattacaaacatcccactcttcaaataccacatccaacatgtctctccgccccactcctccaatttcccctgatgcccctgagactacaagcccccagtgctcagggggccccttcccaatcctcagactttctggccctgtctcagttcatcatgctcactgggggaaaccacaatgctggggaaacccagcccttgccttgccccttgtccatacctgtgcagccggagagacacctgcgggtgtgctgatgtcacggttcaagtttttaacctcatgtgggcccatgatactgcccggtcaggtgctggtggtccccgtccacgcttcccattctccaaggtgactcttaagtaccttcaccctctctcaagcccccaacactcctcccgccctctctcttagctgttgaccttgccaggtagagataattgaaggagaacttcctccagctcctcctgccagatctgccactttctttctggtccctgtgaggccctggctctgtccactgctgctcttggtcctgcctcctgggtttctggcaccggtctttctctcctccctggatcttcccgtcagcatacaaacatgccacgatttctcccatcttaaagaccctctctagacctctccctcctccaagccaggccccctcctctctttctcatttgcaggcagactcttggagagccgtccacagggctgagtgctgtgggcgcttctcagtcctcgcccttgcctgtcggcagcctgtgacgtggctgattgcccctctctgtgacgcacttccttcccttcgtgccacctcacactggcttcctttcctctcaccactggggctgccctttctcttcctcagtttccccccactctgaattctgtcttgctcctgggctctgtccttggattccctgtctgccacttgtgtgcagactcacatctctaaatgtagcttcccgccatgtgcctgcgggctggacttcccgtctgagctcccaactcaccgtccagctgcttctcgggaacctccacttgtctcgggtatagaacctgagtgtctgtaatctctccccacatctgatctggctgctgcttcccagtaatgccaacttcatcctgctagtgtcttgggccaaaagccttgggatcatccctgagtcccctctctcgtctccacacgtccagaccttcaacaaaccctgtggccgtgacttcaaaacacactcgtccctcattgccttgtgccgcacctcctccgtgccagcacttctcgctggggaagttgcagacccttctaccattctccaggccctgcctttgcccttcttctttttttttttttttttttttttgagatagagtctcgccagcctgttgctcaggctggagtgcagtggcacggtgttatctcactgcaacctctgcctcccaggttcgagattctcatgccttagcctcctgagtagggattacagaagtgtaccaccatgcccggctaatttttgtatttttagtacagatggggtttcgccatgttgaccaggctggtcttgaactcctggtctcaagtgatccacccacttcagtctctcaaagtgctgggattacaggcgtgagccaccacacctggcccctttgtccttcttgagtcttttctcaacccggaagccagagccattctgctaagatcaggcctggccgtcctcagtgcttaggtaagcagagtgtggctcagctgtgcactgttcctggctgcaggtggcagaggtggagtcagggatggagccaggagttgaactttggagtgctggactcaccgcccccctggtgtggacaagcccctctgtgatctgctggttctacattgtgttcttggtgaggagggcaaggatacttttgcaattctcaacttctgggagctggcggaacttcccttcctgtcttgcctccactcctcaaggcctcaaactatcccataatgctcggcttccttgtgactcctcttcttcaaccccaacgacaagcagccagctgagagcctcctccaaagtcagagacaaggagcttggcagtggacctgctgccagaggcaaggccgtgatcttggaacatggaagcccagcacatttgcttgtcctaaaaatacagttcttaaaatagaccagtccatgtgggagatagggaacctgtcgagtgcggttctgaagggcttgctctgccaaggggaccggctggctggggcagcgcctgggcagggctgtgtgcctcagagggtgccctcagccgtggcagaagccacagcctgggtttggggtaccctgtctggctcttgttcttcaaaccccatccagaggcaggccggtctcttacctgctcgatgtctgcacatagggaaacctgagttgaagccgagccttgggttaggccctgcaaaagctgcaaacaacagtttgtgtttggggtgtgaggctataaacagcccaggagtcctgagggggttggagagttggtcaaccgtgaacaagctggagactggctccttcttcctggggatcccagcgcccactacaaaggtgaactcctttttgctccctgccccagcctgccccattagacagggcatggtgaggcgaatggctgcagggactgaggcctttctgtaactaaagcccagcccaagtatagggagcaatggccgagcttctgttttaaggcagcaaaacagcgtgcgagcttggtcccttaacacggagtctggaattgtttctcataacccaacgcttggcttggtttcaaaaaggaagcctctcctctcgggtatcatgaccaggctcctcgtaagaggtgggactcagccgagggggccagtctagaggttacacattctgagctacctttcggggtctgtggaccctctcagaccctgcagcatgtcgggggccgggtgggggagcgggtggtggcatcagtgggtttctgatgaatgcctggagttgtttgtataattggggctctgtgtgtctttttttggaggaagagcttctttcacattccctgactcaaaaaccacaagctaaatgatctgtacattgtcctccaactctgagagcctctgatcctattattccaagtcaagaaattttgaaaattacaggatagaattctttctcagaacagatgctagggatttgtaagtttccattccctgtgctgccctggtttgctggatggacggatgtcttggaattttcaagacctccagtcctcaaagaggttcttctcacctgctgtcctggtgagctgcatgggcctccctccatggtgactgtgttgttggaccgagtgggatcagttgagtgggaggcgctaatgaccggatttcctacgttgtcccctgctcccctgactctattcctcactgagccagacagactcaccgcttccagtgtctgtggcatgttcccactgtccaccctcacggttcacattttctggaatgttctgctcttccccctgtccaggtcctgtgtgtcttcagggtctggtcagatgtcttccggtgaggctgcagctaaacttagcctgcccagcctgcctctcctctgaatgcacatagtgttgacatttttttcagtttaaaaaattttattttaaaaatgatcttacagttaaattgacgtttttggggctgtgccgttccatgacttttaacccatgttagcactgccacaagtaagggacagggcagctccaccacatcctgcagtgtattcgtctgttttcgcattgctataaagaactacctgagactgggcaatttatatagaaaaaaggtttaattggctcacatttctgcaggctgtacaggaagcgtggctggggaggcctcaggaaacttaggatcgtggcggaaggcaaaggggaagcaggcatgtcctgcatggctgaggaggcctcaggaaacttacaatcatggcagaaggcgaaggggaagcaggcatgtcctgcatggctggagcaggaggaagagggtgaagggacaggtgctgcacaccttcaaacagccggatctcctgagaactcactatcatgagaacagcaagagggaatcctcccctatgattcagtcacctcccccaggctcttcctccaacattggggattacagtttgacatgagatttgggtgggacacagagccaaaccatgtcatgcagccacaccctgccccatcctaaccccccgaaatcactcatctctgctctgccaccatgggttggtctttttgagaatgtcagatgcaggctggcttctttccctcagcctgacacccgtgagagccgtctgagttggtgtatgtgtcaacagttggttcctttcagtggctgggtacgcgtcctgtcttatccacatgttctcttggtgaattttgcctcattgtgtgcatgtcctatgtcactagatgcagggaggcaagggcagcatgtggttcatttttataacctttcaaatgctctgcaaacagtaggtgctcagctgtcgaatgggtgaatgaatggaccacaatgggtaacaggaaggggaaattaattttacagaattttgtatttcctatatcctaaaaaatctccagtaaacataacccttaatttcctgaattaaaaatgattcatgctgggcgtggtggctcatgcctgtaatcccagcacttggggaagccaaggcaggtagatcacttgaggtcagggattcaagaccagcctggctaacatggggaaaccccatctctaccaacaatacaaaaaattagccttgcgtggtggcagacacctgtaatcccagctacatgggaggctgagacaggagaatcacttgaacccaggaggttggaggttgcagtgagctgagattgcaccactgcactccagcctgagtgacagagcgagcctgtctcaaaagaagaaaaaaaaaaggaaaagaaaaaaaagattcattgcctctctgtattctgttagtagccgagacaggagaaaaagcaatcaaggtaacctaataacagggatttccttctccagactccctccctgcctactcacctttctgtctctttttctggtaagtatttccctggccatgtcctgggacctgtacacaggtgcccacttcttacaccccaccactgggagtcttcgacagctctcacacagaagaggaatactgtggtcctggaagttgctaggtaggccccgagtcccagttgtttcatttctcaggacctcctggtgctacagaagaatgaaacaggccccagactggaagttgccacacatgccttgtgatgctggctctgatgggccttgctgtgtgatcttgcttaagttgcttcccctttctggtctttattttcattaccttattttgtacccattgattaaaagatgaatctgaaagagatggtttctgtagtctcttcaagctctgaaacaatatgattttgtgaactcacatactcatacagacataaacacaaggaggatttgctaatgaacttcttcgttctttgctaaatataaatgccttgcttgtgaccacagaggttcaggtgctccgtcagcgagtatttaagtacctactatgtgtaggtttcaaacttgaggctttaagtgtttgtaggaaatggaaacactgtctgatgtctttctagtctttaaatgaggagtggagaggtaaggaagaggtgcgtgttatcatggccctgtctcatttgtatgcatcagtcctctttttcttctgcttcctttcctgggatcgccacattcttgttggtgtcttacagacaaacctgttcaggactgaatgaccaagtgccccagaaacatgggttggtgtgggtggtgcccaagcctgacccctgcctgttttctcatacacggttcacgttgcccccagcagaagtggagagtaaggggctcactggctatttctccaaaatgcgttggttggtgtggaattgggtacaacctggtactttctgtgagtgttgagggcctgctcctccaggccatgggccatgccttccaaggttttttgtttttttttttctgagacatggtttcactgtcacccaggctgtagcacagtggtgcgatcttggctcgctgcagccttgacctccaagggctcaagccatcctcccgcctcagcctcctgggtacctgggaccacaggtgtgcggcaccacgcctggctaatgccagggctttttaacagatggtctcaggagtctcctttgtggaggttcaggtcactctggggatggatggagcgggggcttaggactcctctctcgactcctgggtcagaaagtgactccatcaaacaggcatttttatggtctcaaatgggtttaacaagaaagaagtcatggaggcagtgaatgaagacacagatagtgagggacacggacctactggtggctcgcagtgcttatgatgtaggggttgaatgtcttttgtctccagcaggcttgccttgaggagagacaccattttgccatcatctttacccccagaaagaacaggtggggagatttgtgtaggactctttttccccatatggagaactctatggccattttacaaacattccccatccttccaaatcctctctcccgcttctccttgccaagtttacactgccaattatactagactagcaacaaggagcttggagagaagggctgcttttagagatgccattccaagtgccaacaaggtgttctcgataaccggaatcagcaccgctctccttcctgtcatgtagccctggtaaccacagagcatgtttatgctcggggagtctatttcccgttgttggggtcggaaccattcctggagtcatttcttggttttaatgctcatcctttccctttccagccattaaagcttctggcctagaaaagcctgtctggctagcctgacctggtgctccgtttctgttatctctgatcagcagcggggagggcactgtggacagaaacatgttagagaaggcccgtctgcagaggggcccgaagagacccgaggacaccctcctggctgcagggtgcctgttccttccctggttctgtgcacctccatcctggcaagagggccttggtgggcggggtggatgcccgcatgcctttggtgctaccatgacaaggtggccctggcccgggagtggagcggtgcctgggttccgcgaaatgcctcagagccatgactttctgcttctcacagcttctttaactcagtctcttagtcttcccctgaactcgcggacactcgggttctctgaccagcatgttaagggttgggctgggcagcctctgcaaaggtcttctttactgtcaacttgaacagtttccataaggttgtgtcggggacacctagaaataggttcctttgaacaacagtatgctcgttgactaccaagaccttccaaaagagtgagagattgggttggggatgggatttcaggctgtgtgtgtaaattcagcatgatcctccatgtggagaggagacacactggtgagggcagctcctggtggtggggcaggggtcacaaagctctgaaatgaacagtgaagtcgtggaggggccctttagcagaacccaggattggggcaccagcgaccctttccttcccagggggaaagtggttcactgccagaaatgctttagaatcgttagaggacaggagatcagctacacagatgatgaaactgaaagccagggtctgtttgttctgctgctgagcaaacttggtaaaaatgttcatcgagatggaaaacaagaacacagacacactgtgagccttttgacctttgcctttgacccggaaatgtgactgtttcctggagaaagtgagttcacctgtgtccctgtgcctgtgcctgccacagccccgcccagctccccggcacctgctccgactccagctctcatggaagcagtgttttgcgatgaagtcttggaagccaacagctctcctttctcctctttcccatgtgtggtgtttgtgattccagaaataagttgggctccaccctcagagtggcaagcattgatggtttctcattcaggggctcactggggattgcctgaagccaatgctggcatggctgggctgcctgtttctccaggagggccgtgatggcacatttgtgtcaatattacctgcagaagaactttccatcttttataacaggcaattctgttcaggagtatgaattggagccaattagggctaaaagtagattccaaaatatatacagttatatggcatattacgatgttttggtcaacaactgattgcatataccacagtggtcccataagatgctaacgctatatttttactatatcttttctatgtttagatatgtttagatacacacatacttaccatgtgtaacagttgcctacagtattcagtatagcaacatgctgcacaggtttgtagcccaggagccataggctggatgagtctagcctgggagggtaggaggctatcccctctaggtttgtgtaagtatgcactttgtgtaagtacactatgatgttcacacaatgacaagatcgcctaatgacacatttctcagaatgtgtccttgtcattatgggacgcaggactgtataggcaacaaacagataaattgacaaatgatttctgaccaccccctactgtaggctgagggctcatgcccctctgagggctcctgtaggaggctctcctgcctctgattcagtgctgggggcagagggggctgcaaattgtgggcttagccttgagctgcgatatggggcaagatgatgacatggggaaggaccatgatcagagacagagctggagagggaccagggctgaccccaatgccacaggaagtggctggagttgttctaccctggagggaccggagctggggcttactctcaccagggtgttgtacagaggcaggtgatcccctgattgtccccactgggccaccaggcagccctcacctgtccttgggctagaagagcacttcttctccatcccaggcttaggcagtgcttgtgcatcctgcaggggtgtgggccaccccggcctcggtgcaccctgcttttgaccattcttcgtgctggaggcgaggagtgagtctggggacctgcccgggggctccatggctgacacagctggccatacaactgcaggtgtcagagatgttttgagaaactcccttcagggcaatcaagcccttgccaagtggaatcactctgcatttacatgggtggcttctgaacgtggccgtgatgaattgtgctccggcagggcctcggcagtgaaaaatggggcggtgcgatggagtaggaaggtgcggggtctctgctgggctggagcctgcacctgaaccgggagtctggagccactggaaacagtgggtgcctccaccagccccgggggaatgcacagatgtgccctcatcgctcagcttctctctttgtctgtctgctcccttcatgtgcatcgtctttttctgattttccctctgtctctccaggctgaaatgcagcatcaaacacacgctctcctgctttcttgctttgtctctcttacacttctcttcccttctttcttattcgatttttaaattataatcaaaaccactggacagtgagcacgggcaggagggacattggatgagggtggatgtgtcactgtcttgattgcggtgacagtttcccaggcatgcgcatgtgtcaaaacttagtgttgcacacctcaaatatgtgcagttccttgtgtgtcagctgtaccttaataaagctatatttaaaatcccccactcattttgagtaggaaagcaatgagaagatgtttttgaatatttaacttttagaaaagcctgtattctgcttccctgtaaagtagagggagacagagacccagcagggggcatttctttctggggtttgagcactggaagatcattattaacagtgcaacagccaccgccgttcagtgagtggtttattcggtaggacaagcctatgcaacagcccttgcatttgtcccagagactcagggagggtaagcaaagtgacctgcccaaggccacgcagctggtcaggggcaaagctctgcttcccagcaggtctcccgagcgtgactcccctccagtactagttgtgggatgggacagatgcacctgggagtggctggcagagagtgtgttggcaattgtttagcacttacccttgagatttagtttgagattgaagaaaagatggtctctgcttctctggctcacaggcagtcacccccttcctttcctccctcagccacttatgcattcccagcagggtacctttgatgctgggggaaggactctttatgatcccttccctccagactttggctggctggctgttgaggtgagtggaaaggccacaggatgactctgccgtgggtattgggtgggccagtggtaggggctagctgtgcaatcaagaggctatgaggagtgaggtttcctcttggattggccttctaattagtctaggatgacataaagaagcctctcttttaaaaaaaggcaaatttggtcagttcttggtttccagggttttggaatgtccaggcaaaattgccttggcaccttctgaaatcctagagaggtagtgtagcccacttgctggggctgacttctgttgccagcgcctcacctccatctgattgcagggtattggttggccatatgcttcagggatttgaaggagggttacctatgtctagggcttaacgtgttcttggagaatattgggcaagagtatgattccctgagtctgggggaaggaggagctccagtggaacttccagtcaagatgccaactatgcatatgtgggaatctctgttctctcactctaaacccatagaaatgttggattagttataatagcaacaaaaacatagctgaattcaaaggtgaggttgggagatttccaggtgccggaagccaggatgaaatttagagtgcaagtcgagtggccttactggagtttccacagtaaaccccttaagggctgaggtttcacaggccccagggagctggaaccaagtttcttgtacaaaactgggaacaagaagggactgtcttttctgtcatcaaaaaatagaaaaattcttcccattggctcaggaacacggtataccccagtcccccaagccgtagcttctaagagtttccttcaagaacgagggataccaagcctaagctgtatatagatatgagaccaaatcctgcactatcaatgtgggcagaaactccgagctgagaacctaacataaaatttggtcccgaattagtggtacccttaaagctgtgtcagatgtaagcgtaaaacttgttatgggggatgattcctcaacacaaggcacacatgagattcccaggggaaaaactgggggactcccaatgtagataagcccttaggcaaaaattacaaagcagactagcaaattgaccaccacgggagataatccacaaatgctgtgaaaggagaatttatgtttcagaaactatagacaacagagcaatctgagaaggctgttagatagatcagatatgtgtaaaatgtttgaagagacaagaaataaaatccataagacttgaataggagataatgggatgaaacaagtggttttttttaaaaaaagaatcagttattctagaaataaaacatgtaataattgcaatgaaaacaaaacaagatgccaaaacccttctaatagatggggataaacaaaagaatagacatatttgctaaagaatgagttagttaaggccaggtgtggtggctcacgcctgtaatcctagcactttgggaggctgaggtgggcagatcacttgaggtcaggagtttgagaccagcctgaccaacatggtgaaaccctgtctctactaaaaattcaaaaattagccgggcatggtggcaggcgcctgtaatcccagctactcaggaggctgaggcaggagaattgcttgaatctggcggggtggagcttgcagtgagccaagattgcgccacggcactgcagcctgggggacagagcgagactctgtctcaaaaaaaaaaaaaaaaagaaagaaagaaagaaagaaacaaatagttaagcataagatggtcctgatgagatccaccgaactgtggtttagggaagtaaaggcggaaaatgtgcacatgaaggtccagcacatatctaatgggcatctcagaggagaagacagagacaacaggagggaggcatgcttgaaagcaatacggctggaggaataaagacagacgtaagccttcctactgaaaatgaacatggaattgcaggtggaataaataaaagcaaaaatccatgtgtgggcacatcagggtgaaactactgaacaccagagataaagagataccttaaaaaaaccaccaggaaaacagcgacagtgagacctcattagtttgggtaaatataaaatggggaaaatgcaagataggggctggcctgctgtctgtattttagtatgtcttcctaaaggaataaatagggtaaataggatacttttggttcttcagtctgcaatcagtctgcactagcagtgtgatgctggcctttaagaacaaaagcatctgtgtgtatctgttccagtgtttttgaagttattgttcacccgatgtgtttctagggccgtgtctgctccatcgacacctttctgggatgaaccttcaaacatgggctgtgggcctgggatcccctcgacaggtgctgccaagaatgaaaatgtgatctttgcagggtgcttacctcctattaataaggaaaaaagcaaactaaattagtcttgggaagtaaagtgccatatgaatcagctttcctcactccgaaaataacttgctaagaatttatgatcccctaagttctgctgattttttatattgtttactttcctctccaaaatatcaaataattcacaggtggtatgtatggtggctgtatggataatttgaaatgagaaatggacagcaagagaaatttccttctagggggtcagtgctggggtgactccctaagactaatggtgctggattaataacctggggctgcttcagtattcatggcttgttccctctgaaggctgggatatttcccacttttatgtcctgcacaaaactgtaaagcaaagatggtttcattgcagctatgtgcgtaatgagatgcgcaagagctgctcttgcccattaatcagcgtttgggggaggcttctggaagcctgacctattgccgcggtagctgatctgaatgcaatgatttttcccctgtgggagccgaggctgcaggacctgagagctggctctggcagcctgggggccctggccatgaagttgtactgcagagaggaagggtggtcccatcatcagggcgcacaggcaaatggctggggtttctcagatgaaaaggctgcagggccttggaaggaaccataggatatatggtttgcaagagaccacctatttctggggtccatctcgccagcccctctggccttactggggtgggggaggtagaggagggtggatgtagctacattcaacagggatttgagtgcaactctgtgccaggcactgggccagatgccggggagagaaagctgaataattcagacattccctctcccattaaggtgctctcaagggtgtggggggaggcaaactgctgatttcaatgaactagactggcgaggtgggagagatgtgagcagcacacaggtgactactacttaccagctttggggatggagtgggggaagaggggcattgtggtttgagaaggcttccgggagaagtaatgtctgagctaaatctaaggagtaattaatatttggccaagagtctgggtaaaattgctcatgcctgtaatctcaacacttcgggaggctgaggtgagcagattgcttgagcctaggagttagagaccagcctgggcaacaacatggcaagaccctgtctctacagaaaatacaaaagttagctgagtgtgatggcggatgcctgtggtcccaggtacttgggaggctgaggcaggaggattgcttgagcccggaagatggaggctgcagtgagttgtgattgtaccactgcactcaaacctgggcaacagagcgagaccctgccttaaaaaaaaaaaaaagaaacaaaaagatttggccaagagcaggagagcaggcccatgaaggtggaagtgagatgtttatcccagcaagggacctgcaagggatgaagctggtggcagcacaaagagcgaggcgtgaggcaggcagcagtgaggcctgcggagcctgggtagtggattgctgctcaggccctgtgagaattctgacttcatcatgatattcctatatgtccagggggggagtcatccgtggcacggcctcatgtgtgattcagaatgtattgtgggagtggcagccccggtgggagaagggaaatgactcaggagagcaggtctggatttcctgctacctgtggctccccttgccagaattctgatataaactaagactataagattagtttcaaaaggttttagagaccttcatgggggctttccaataacaggaagataaggaccgtgaggaacatttctctaactttagacccagaaactaagggctgggaggatgggtggctgcttttttttttttttttttttgagacggaatctttcaccaggctggagtgcagtggcgcgatctcagctcactgcaaccgccgcctcccaggttcaagcgattcttgtgcctcagcctcccaagtagctgggactacaagcacgtgccaccacatccagctaatttttctatttttagtagagacgggatttcatatgttggccaggatggtctcgatcccctgacctcatgatccacccacctcggcctcccaaagtggtgggattacagacatgagccactgtgtccggccagtagctgtttttaccttttccggcatgacctttttctggctactttaatgttccttcccaaaaatgtcttatctttatggtggtggcttttcttgagacgtggcagagtcaggcctgggctggactccttccctgggattcatgtgaaccatggttgaagtctgtgcttcagggctcctccatccttcttagatggcttgagaagagggtgggaaaacagttgaagaagggtcagtgatacaacgttatctttctcgcctctggagataaagtagaaaaaaaagaaatgtcttcggtttgtatttggatacacacatcactcactagctgctgagatccatgatagcatcatgaatatcagcattaaaaggctgctttgaggatcaatagcaatgcttgcactgcatttaaatatctgcaattaaggtcgaagcctgaaaacacgactcctgggaggcccacgagacctgggggaagggacaagttgaaccttagttatatatttcaatgacctagagatcaatatatgccagatcacattttctttcttatctgttctttaaatctcaatcttcacttgggtccacattttcagggtactccatcagcttggtgtttttggtggcagatgcggtgacgccctggctggtagtgtttgaacctggcctaaaggacatctgagtgagagttcaaaagacggaagcatggcggggatatctgtgctgatacacagagggggaaaattggcacgacccctcatgcaaagctgaaaaatgtgggatagatttagtctgacagtgggcgtggagggagattctagcaagtctttaatgtgggatgcagccatctgtcttccagagttatgaaggttgggcatggatacaaagacccttagactttttatttgttcccttcagtagtaatgcttagatgttcttttactgccaaccagagatattatttctttttctttttcttttctttttttttttttgagacggagcttcactctgttgcccaggctggagtgcaatggtgcaatcttggctcactgcaacctctgcctcccaggttcaagcaattctgctgcctcagcctcccgagtagctgggactacaggcatgtgccaccatgcctagctaacttttgtatttttagtagagacggggtttcaccatgttggtcaggctggtctcgaactcctgaattcaggggatccacccacctcagcctcccaaagtgctgggattacaggcgtgtgccactgcctgaaatattctttagtatatttctccctgacacttttctgggcccaagtttatggcagaaactaagccaaggagaaaaagaaagagctgtcaggcatttcattgtcttaattgcggagcacagatattagtgtcagtgagtctctgcgtggtagagctggtggtcagagtggacctaaagccagaaatcacagcatgagccaatgaaactgctgaatatactcagcctcttggtttctccaacttctgaggctgtctctagcacaggtgtcttcatgaggtccctggttgccctctgaaactatgatttgatttcctgcatgttctccttcttgctgccgtccatgaatccgagacctgctttcatggttatcctttctcctgatgtttctctgatcatcataactcttggctgccatgccccactctggcctccctggagcactgtccattcacatgcccaacctgttgaacagaggatccttggtattattgtgagtcattttctgaccccacagccctgctttagagtatttctttttgcctgtcctttgcacgtgctcagtaagtgtttggactgtcagaggtaggtggataggcaaaaatctctgcactcatggtgtttatattctaatggagcagagagacaatacgcaaattgtatattgtacaaaaatgcgacatgttgtcagataagtactaagaaggaaaatatagcagagtaaaaagacagagagtgatatggcacaatttcagagacatttgaaagtggaaagtgttattgatttggaatgaggtctagattcaaatcctgattcccttaccctctaggacaactaacttaacccctatgagcctcagtttccttatccgtaatatgtaaatcatgtttattctttagggttgttagagggtaacaaggattatagtttgagtatggtgcctgaatatgggcgtaatgcatgtgagccttcattgctcttatgagcaccattatttttgtcactataaaatcaagggctcggctgggcacgctggctcacgcctgtaatcccagcactttgggaggctgaggcgggtggatcacaaggtcaggagatcgagaccatcctggttaacacagtgaaaccccgtctctactaaatatacaaaaaaattagctgggcgtggtggcgggtgcctgtagtcccagctacttgggaggctgaggcaggagaatggtgcgaacccaggaggcagagcttgcagtgagctgagatcagtgcctgggtgacagagtgagactctgtctcaaaaaaaaaaaaaaaaaaaaaaaaaatcaagggctctactggtcagctgcattgaacaggctattctttagcttggaatcttccagtgagtttgcaaatatcaagaaatctctctctctctctctcttttttgcatagactatgagcaactcaacttctctagaacaatgtttcttgaactttttggtctcaggacctctcttacactcctaaaagttattgaggaacccaaagagcttctgctcatgaattacagctatactatttactgcattagaaattaaaactgagaaattattaaaatatgcaaacttattaaaattacagtaataaactcattttatgttaacataaataacatattgtttaatgaaaaataactatactttccaaaaacaaaacaaaatttagtgagaagggtaatgtttaacatttttgcaaatttctttaatgtttggcttaatgaaagacaattggattctcatatctgcttctgccttcagtctgttttggtatgttgaaacaaatgaagaaatttagctttacacagatgcataattagaaaaggaagtagtattttaatagccatttcagagaattgtgaatatttctctttgttactatatcaaaaccctacaagcggtactttcttagatgttagttgcagcgcagaatctgatatatgctgtccgcagaagcccaccttaaataaaaagacaaaaatagtatatttttttgtatacagttacattaaaatccattggcctatccttttttcaaggggatatattttaatgtggatcttggaaagatcttttatcctggcattttgtcacagcagttgttttgaaaatattggttccctgagttatgcagatcttccacatgttgacacgttttattatacaataacccccaccccaaaatggctttgttattatcagtaccaaagtcctcagaaaagtctttacattttgcaagttgtcaagttcacaatggtgagcacaagtttttcccaattctaattcttacttaaaaactcacattttatcattggcaacaaatatggtcagttgaagtgatagtctgcccaatacctgtctgttattattaataatttctaatttaattccattgtagtcagagaatatactgataaatgaattcctttttttgtgaattcatttaattcttttaaatttattgagacatattatggctcagaatatatgttggtaaacattctgtgtgcatgtgaaaagaatgtgtatattgctgttagaatgttctacaaatgtcaactaggtcaagttggttgatggtgttgttcaagtcttctacatccttaatgtttttttttttttgagatggatccttgctctgttgcccaggctggagtgcagtggtgcaatctcggcacactgcaagctccgcctcccgggttcacgccattctcctgcctcagcctcccgagtagctgggactacaggcgctcgccaccatgcccagctaattttttttttttttttttttttttttagtagagacagggtttcaccgttgttagccaggatggtcttgatctcctgacctcgtgatccacctgccttggcctcccaaagtgctgggattccttaatgttttatgtttacttgttttattgattattaagggagggatacggaaatctctaattacagttgtagatttgtctatttcttcttgtatttctatcagtttttgcttcatatatgttgaagctctgttgtttcataaacatttgtgactgttatgtcctcatgactaattaacttctctataattaacttctctattatgaaatgactctttttatctgtagtagtattttttgttctgaaatctgctttttgtgatattaacatagccattgcaaatttctttttattagtgttgcaatggtatatcttcttccattcttttagttttaacttatttttgtcttttcatttaaagtgggcttctgtagataacatatagtttggtcttgctgtttaatgcagtcttgcagtctctgtcttttttttcttgagacagactctcactctgtcacccaggctggagtgcagtggtgcaatcttggttcactgcaacctccgcctcccgggttcaagtgattcccctgcctgagcctccagagtagctgggactacaggcgcgtgccaccatgcccagctaatttttttgtattttttagtagagacggggtttcactgtgttagccaggatggtgttgatctcctgaccttgtgatctgcccaccttggcctcctgaagtgctgggattataggcatgagtcaccacgcccagccaatctctgtcttttatttgaagtagttagaccacttatatttaatgcaattatcaatatggttaagtttctatttgttttctgtttccccatctgttgtttgtcccccttttctcttatttatttatttatttatttatttttgagatggagtcctgctctgttgcctgggctgaagtgcagtggcatgatcttggctcactgcaacctgtatctcctgggttcaagaaattttcctccctcagcctcctgagtagctggtattacaggcacccaccaccatgtctagctaatttttgcatttttagtagagacagggtttcaccatttgaccaggctggccttgaactcctgatctcaagaaatccacctgcctcggcctcccagagtgctgggattataggcgtgagccactgcacccggccccttttctctttttctgccttcttttggattaactgaacatttttttatcattccattttatctcttttgttggctggcttatctataaatctttgttattttactgcttgttttagagtttttagcgtccatctttgacttatcatagtccactttcaggtgatgttataccacttcatgtatagtataagaaccttattatagtataatttcatttcttcctccccatctttttttaaattcttctcataccttttacttatagatttgttataaaccctgtgatttattattttgctttaagtagttgtttatctttttaatagatttaaggaataaaaagtctttatatatacccacatctctaccatttccagtgctcttcatttctttgtgtagatccagatttccatctgctatttttttcccttctgcctgaatgagttgctttaatatttcttgtagtgcatgtctgctggtcatgaattctttcagtttttgtatctataaaaaagtatttcacttttgtttttgaaagatattttcaatggataaagaattctaggttgatagtttttgttttttctcttagcactttaaagaagtttctctatgtcttctggcttgctagcataatttctgatgagaagtctgcagttattcatatctttgtttttctctgtacaatgcatccatttcctgtggctgcttttaggattttttctttatcactggagttaatcaagatgattatgatgtgccgtggtgtagttttcttatgtttctggtgcttggggctcgttgagctacttggatatgtggatttatagttttatcaaatttggaaaattttggctgttagtttttctatttgtttctgtcccatcttctgcatagggaacttttacatatattagactgcttaaagttgttgcagatactctattcagttttttctttttcctgtttcatttcctgtctttcagttcactaatattttctttagtggtgtctaattgtctgttaattacacccagtgtgtttttcacctcagactgcatcttaggttttcactgcagtttgcatctttagaagttttacttggatctgtttaattctcccatatctctttttaatgtttaatcttcatacccactaattttatcagtgtataatttctggtttggttgtgattgatttttcttcttattatgaatcatattttcctgcttctttgtatgcctgggaattttgtctttgattccagacattatgaatttatcatattgggtactgtgtacatgtttattcttgtaaatattcttttttttttttttttttttttgatacagagtctcactctgttgcccaggctggagtgctgtggcggtgatctcggctcactgcaacctccgcctcccgggttcaagcgattctcctgcctcagcctcctgagtagctgggatcacaggtgtatgccaccatgtctggctaatttttgtattttcagtagagacggggttttaccatgttggccaggctggtctcaaacgcctgaccccaagtgatccaccccctttggcctcccaaagtgctgggattacaggcatgagccaccgtgcccagcctattcttataaatattcttgagcattgttctggaatgtggttacattatttggaattagtttaaccctttcacatttcgcttttatgcttttttaggtgggtacagaacatcattgagttcagggctgattttttttacccactactgaggtaaaactctactgagtactctcccctatgccccatatattatgaagattttactcttgttagcggaaacaggcactatttctggtccaagtgtgagtgacagtgattgttgttttgtttatttgtttgtttgagacagagtctcgctctgttgcccaggctggagtgcagtggtgcgatcttggctcactgcaacctccacctcccaggtttgagcaattctctgcctcagcctcccaagtagctgggattacaggtgcccaccaccacagccagttaatttttgtatttttagcagagggggctttcaccatcttggccgggctggtcttgaacacctgaccttgtgatccacccgcctcggcctcccaaagtgttgagattaccggcgtgagccacgtgcccagccgattgttgtttttaatcctgttaaaaggtgttacaaggcctgagatagtttcctcatacacgtgcactgatccatgtctatttgactacttgaagcagcctctgcacagctctggagttctctgtgtgtctttttccaacactctgccctgtgacctctggctgccttggccttcttacattcttagttccttctcaactcaggaagattgctcgacttaggatgccctcctgtgccatggtttggaaactctatagcaagaaagctggggcagtcccggggctgacctcgccgttcttcactcccagatgtctgatatctagagaactgatgtttcataaatgttgtcgttttttagttattttaagcaggagaggacctctagtccttcttactccatcttggccagaggcagaagccctgccaaatacctgcatctaaagaaccatagttttaaaaaaaatcagttgttttttttaaaataaaaattggcattccatgaaaaaagttgctcatttagcttgtaactcagtcacacaaatgcttttcttcaagacaaccatcatactttagattgcagcagaagtgttttaaaagcacattagaagtgatggtaaagaccacagttacttttgcaccaacctaaagaataaaagctgtcatttttggctggaggcggtggctcatacctgtaattccagcactttgggaggctgaggcaggtggatcacctgaggtcaggagtttgagaccacctcatcaacatggtaaaaccccatctctactaaatgcaaaaaataagccgggtgtggtggcacgcgcctgtaatctcagctacttgggaggctgaggcaggagaatcatttgaacctggaaggcagaggttgcagtgagccgagattgcgccattgcactccagcctgggcaacaagagcgaaactcggtctcaaaaaaaaaaaaatcttattttgattgcttcattaaggaattctaaagtaaaactggcaaagcgtgtgtgcatgtgtgtgtgtttttctgtaagcacatggcaatgaagaatatgtgattaccagtacagttggttgctactaccttgatttgtggtgaggccccagcagttttacccacggttgcttttgctccagcagtgcaaatgccaatacagtgaaaaaggcaaatcaattcttggtgttttacaaaaatggttctgacctctctgtctcccaaaaggatctcttaaggatgcccgaagggtctgcagaccatatttggagaactgctactctacagacagccttgtatctgtgtacagagacatgagcaagaatgttctgtgttaacaacgtttacactaatagaaattcggaaacaatttaaagttcatcagtagtagaaggggcaaataaattgcagtattcttatataatgaaatagtatatagcagttgaaatgaataagctaaggctgtgtgtatatatgtataaagatcaaaattcagtggggaaaaaaacaagttgcaaaaagaaatgtacagcacggtaccatttatataagcttaaaacgtaaaaaatatttgttgtttatggacgcctacgtatatagtaaataaaaactaaatggaagatagcagctgcctctgagagggagggaggagaatgagatgggcaggtacagagtagctgcagttatatctgtaattcttttttatttctaaaaaataaattggaggatatctagtgaatttttatgacagaaaatacgattggttggcacgcaggtttttattagattatcctctataggttttggaaagcttgaagtcttccataatcatcatcatcatcactgagaaatagagaagaagagagaatgtgtgaacacatgatggattctcagttctacgtgaaaactgctaaatgaatactagttggcgagcccaccacgattattatcatagtgctaacagctgccattatggagagggtgcgatcagccagggacctcacctagtttcatattcagctttattatcacctatgaagtaggacttacgatcctaattccacaacagagacgactagcattcagaaaggttaagttacatgctgatgtcatgcagtgagtcagttatgaagtcatgattggaaactaggccttttgggttcaaggtttgtgctttttccattccgctaacatctgaggtgattggcttgttatctgaagttactctgtttttatttctctttcagctcttcttccaaacctattttcgggcatagtttgttacgtttctgctaagcgagttggctctatcaattacagtatttttgttgccacagcaacaataatgcagccatattattaggtatcactactgttttgttctgctgtgagcttcagccaggcaggtgccctgctatttgcagaggtctctcttcgtggctgtggctttcttgtcttcggggttaattgcgtggaggctgtgtttcagtgaggccttggaagttcggggctggtactacagcctgctataggaagacttcttcatcggttttataatgggatcatttataatgtcttagatagtaaaacaaaagaaccttttgagtttgttgatgataatatcctacggacacatcaagcattgtctaaagatttacttgaactaattgagtagatgatggaaagagagacgatacacttgctcatttgtttagttctttctacttgcagctgtctgataaagaaaaacggaggtagaatgcttgagattgcatgaatgcttctgggaggatgggttgggatttacagagtttaaaaacagaagtttgagagtttcataggcatgtttacctgccagcatcactgcagaaccaggaggggtgcgtgaggcagagaggcaggcggaggagcagggagaggatcccacttgaggtggcacgttggcctttccctgtgctccggctggaatcaacgaggcatttgttccctgcccagccccaatctgtgctgctttctctctctgctgggttcttcgcattgggctttatgctacttcgaaaaatggacagtgttttcgttaagttttagataaatttaaaaacaggccgggcgcggtggctcacgcctgtaatcccagcactttggaaggccgaggcaggcggatcatgaggtcaggagatcgagactatcctggctaacacggtgaaaccctgtctctactaaaaatataaaaactagccgggcatggtggcaggtgcctgtaatcctagctactcaggaggctgaggcagtagaatggcatgaacccgggaggcggagcttgcagtgagccaagatcgcaccactgcactccagcctgggcaacagagcgagactccatatcaaaaaaaaaaaaatgcagctttgggaaacagtaactgacacacactgttactaggaatatatatattggtttgatctttattttttttttttttgccatattttaaacacaatggttaaaattactggcttcggagtgaaattgctattttccagctgtaagaccttgggcaagttacttaacctctcgaggcctcagtttcctcaactataaaatgaggctacgttagtgcctacttaatgaagttctcgtgaggagtttacaatacatgaaaagtgcttacaggagtgtctgcacagagtaaatgtgcagtgggtgttgctgttattattatatattaaaagtcaaagtgttgattttctttaagtcaaattcatatttagaaatttttcctataaaaatgtgatcatgagcattcaaaggcatatttacatgcatattcattgtggcattgtttgtcattgcaaagtaacctaaatgtccaccagtggggacatcatggtgcacccataaaatggaatcttgtgtagtggttaaaaaggatacagagatcaatgccatatattaagtgaaaaaattagtttttctgccatttcaatttaaagatttcaaacgtatttcaaaaatataacaaaattgaaagagttttgcaatgaaacccataaacccaccaagtagcgcctgtggctagcatttcattttacctgccttatcaatattcacccttctgttttcatccatccatcttgatattttgattcatttcaggaaggttgtacacatcaatacactttctcccaaatatttcaacaggtaggaatatcattcattagagttcacagtttgttcatatttcttttgaaacattagtttttataacaatacagatattgtatgtacccatttatataaataacaaaggctgggcgtggtggctcacgcctgtaatcccagcactttgggaggccgaggtgggcagatcacttgaggtcaggagttcgagaccagtatggccaacatggtgaaaccctgtctctaccaaaaatacaaaaattagccggtcatagtggcaggcgcctgtaatcccagctactcaggagactgaggcaggagaattgtttcaacctgggaggtggaggttgcagtgagccgagatcctgccactgcactccagcctgggtgacagagcaagactctgtctcaaaaataaaaaataaaataaaataaataaataacaaagatgtttctatatgccaagggtcatagcaaaccacttctggtggtaatttgctggaacagggttactgagcaatgtgacttttactttatgctttatatacttctgtgtgaattacgccatttaatatactgttggagtgtggcgtcatggctgccaccttcccacttttcttcctcctcctcctcctcccttcttttttactatcatcatcatcaaacctagttatacaaagctttgcttcccttgcaaagctacaaaatgcccaggcaacccttgtaattcttgaagcacaggggacagaaatggagcattctttggattagagagacttgtgttgtccttaattaagtctggggtcctttctgataccttggtttgaggactctgaattaaaattaatagcgcttcctttcacatctgaaccattgtccaagagcctccctcattttagtgagatattgaaaaacaaatggagatatttggaagacgtgtaggtatgtggggcgatttatctcaaggggcgttctattctgtgaaatgctcgaagctaattggcatgtggctaatgggaatcgctttaaagtctgaaaccaaagttctaaaaggcagaaagatgaggcgcttagatttgttgcaattaggtatccaagcacctaaacccacttgataattttctcttcatttctgtgggctgtggagtgtgggaggaaaatgggtaacctataggggagtgggagtgtgagtacagacttacatataatttactttcctggaaagatatagacaagtcatttcaattgccttttttctgggggcgtgtaccctacagattctgcttggagttggttggagtccattagaagtggcaaaacatttttttttttttatggaggaattcaggaacttttagagctttgcagtgcatattttaaaatatgttaagtgctatcagaaggcttggatacttcaatcttctttaaataaatggattttacaattgcaaagtggcgacttttctttttttgggtggcaactcaccacagccccacctttcaagtgaaattttagacacgctaactgtgatttttttttttttttggcttttagcattttggaataaagtcgaaagtttcaaaagctgccagcatatttcaatttaatctgctgctgtgttgtctcttgatagcgtaatgccagggctacagagatgttttcacgatgtaaataatttgtgtactgtaagttgtctaaacacggcatgcgtgtgatccggtgcaatcagattgcttggatatggctttacgtgacggactgtaatggttgcttcggagtcattagagcctagtatgtaaataatccacattttaaaattgtcttaaatgtgcttagacaatggatgaatgcctcctctggattcattaattccatcaagaattcacagttcacagcacctgaaggcatcagcctgcttcttcccaaatgagctcttggcactgtcagcttgcccgtctcccaggtgtacccgtaagcagggagtcaggggtcatcttttcaccttgacatgtgcaaggtcatgaccacagccaggtacaatacagaataaaaccctgacctaggactttctgccttggccatggatctccctctttttttttttttttttaaagacagagtctcactctgcggtccaggctggcgtgtgcaatggcgcgatcttggctcactgcagcctctgcctccctggttgaagcgattcccctgcctcagcctctcgagtagctgggaccacagatgtgcaccaccatacccagctaatctttgtttttagtagagactgggtttcaccatgttggccaggatggtctcgatctcttgacctcatgatctgcccgcctcagcctcccaaagtgctgggattacaggcatgagccatggtgcctggccctccctctgttttttaagacaggtgcgtgtgggcgcaggaggcggagggcccttatgctgccctggcattttggaggagcagggaaatgagataaagctgcaaaatgactccctaaaagttggccccaagccagtgcgggcgacggtgtcagccacccttggttcattttctacacgaggccccacacggccccggagctggagcttctaccgaagggttgccctctgtccccttctcggcttcctctgcagaggggctcagagccagtccagtcagacctgcgaggcctgggctgtggctgctgtggctttgccagcatctattgtctaagagggctggggaagctcactgtttgaaacacacacacacaacagaacataaatcagaggcagaatcttttaacatttacagttttaagtgaaattcctgttgagagtctcttaagctagatttatatctgattttgcattgaactgtgtcgttatgtggggctgagaaactcttacgaaattaagcataatgcgaaaacatgctgaaaagacagttctgtagaaatgtgaaacattattatgttatagaatattggagtgaagaaatacgcataaaggcacaattaccatggacattttccttttaatgatccttgtacaatccttggcagaaaggtttgctgacgtctcctcgtagataaaggaaaattgagacgatattgatattctacatccgttttgaattccaaagaatatcaggagagcgaaccagtctgtcttcatattcaaaacagcaaggcctagactatctcgataccttgggaggatctgtcattagtgtttggggatttgactgaagcctccacactatggacagaccaagtggtggcaataatgtgtgcaggggttaacgtctgaatgctctgatctggaagcttctagaagctcctagaatgggttgaggttgttggatgcttgtccctggagagtttttagggtttaaagcatctgtctagaatgtcttgagagtgtccttggggatagggtgatagaggtgcttgcttgtgctaaggtttgttccaggataccctgttcagctttgttttccacaggagaattcccctcctccagcctctgacttctgctgccctggcttagggctaaggggatattgatcatggcccctgggattttatctttcctttcagtctccagaatgactcccaaagcagatgctgcttctcttgcctcctcgtcccccttccctgggctgccctggcaccatagcctgggtacccagtgtaccatggagtgtgggcagaaacgctgtttcttcctcttgttcctggccgaccttcttctcttggctgggacttgtgattccagtggggggaaaggagcccagtttccctgcctctccctgttcagccctggagcagctggagcagggctggtggtggcgctgagatcgcaagccttccagaaacccttcctccccctgagctcatggcaggtcccctggcagggggaaagcttttgctaaaaacctccctgagcccgtgccctctaagcctggcattgagatgccaccagctggtcgggggagggggagcagcagccgagatgccgccccaggttggagcgcggaggcctttcgcatttgctctggaagcatcatctgagaagccctagcgggttttgctcagggtcaggtgacagccagtctcctcccttcagtagggctggcagcagctcccgactcacagttccttctcttctgctcttctcagaacctcttaaaggacctctaggcgtttgttacctagagttgcttgaaattaagctatttaattctaatttggctgtgcaatatctgattcttgaccaccagaggtcactgtaataaggtagaaagcaggtgtttctgagagtcttcaatgtgtggttgcctcaagaaaacaaaatgaaatcaaccaaaccaccccccaagtttcttcactggcctgggtgtgctgcagtgtgctctggggcatggacacgcagccccagctttctcacttgtggaaggtctgcccagctgtggagcctggcaggacgggacaggtggccacttagggaacatttgactgccaaggccgctggcacaggcctctgggcaggcttgctttcataggatggtgggtgcatcggggcctcactcagaggcaggggccctcctctttcccccaccctacgctcaccctgagctgcattctcaaagtccatttctggcagcaacctggggttagattttcttaggttaattaggcttgtctgccttacctttctgtgtgtgcacttgagtgtgtgcatgtctctgtgtgtgtgtgtgtgcacgtgcctgctccgtcaggtggggtcagtaatagtgctgtccacctacagctatttggtgttaaaaggagatggtgcatgatgtcgggtgcttaaaagcacagggcttgttttccagctagtgtccgggaaatgtgagccatcaaaattctcatccagaggctcggcggaaaacatttaccccgttgcagaatggcttcgactctttctcagacccacccttcctgtcctctttggttggtcatcttccttatatggtgacgtttttcagtagaacgtaagaaacgcctgcctttattagcagtggctcctgaaggttggttccagggaagctgttttcgtcttcggtgggtggctcacgggagaacattagggccttgggggtgcagtttggcaggctttgcatttagcaaatactcgggccctcaggctagagcttttgtgagactgctcacgcactggtttctcttccagctctaaatccccgagttgccggaacacagagaaattagagatgcatgtgatctccgcagggggccaggcagccaggggagagggtggttctggatgcaggagctcacattcctcactgggaacatttggaggatataggtctaggggagggtgactgtattacctggatcctccagagggccattagggctgccagcggaggtcaggagcagtgatctacgggagatgctgccgccatccccttcagtgggaatttctcctggatgtctctgcagaaggcacgtgggtgtcacatatgcacacacatgcatgcacagcgcatggctggggctgcagagcaggcgccccagtgtcatggaccctgtggccacagctgctgggcctgttcacacacggttgggactggccaagggtctcacccagactagacgggaatgggggagacccagagagacgcagagcagtgccgctggggaccccggggactcagagcagtgccgctggggaccctggggactcacagcagtactgctggggacgccgaggacgcagagccgtgccactggggaccccgggaaagcagggcagtgccactgggacccagatcatgcccctctgcatgtaaccgatggcacaaacaccaggccttcagcagggccataagcatctgaggctaggaaggcacatgcgtgattagcagatgggtgatggggcctctagcgggcagattctgtggtggcgctgaaacaggagacgtcctctccgaccttggagacctggcatttggagcctgaatgagccagagacaggaagcctgtccctcccctctctgggcgaccttccgaggaggcatcagctcttcccttgctttggggagggaacttaccctgcgtgcagtcctcctgcccccctgcctggcgcatctttccccctcacgtcctctcccccactccctcctcttcccgcctgtggttttctttcccattcctgtctgccagcagtgcctcctctccccattaacatcccgccattttgattaaaaaaaaaaatcccccaaaataaaaactcatacttgtttctatgggcttcctatgtttctttggaagcagcctcttcataaacccagtgaataaatctcttcaattgttgagactcctgtaagagagtctggtgaagtatagcttgtacctgaacactgcgcaaatgagtctatcctgtttttaatcatgggccagaactaagctaatgttttatgtgcttctcttttaaaatcctcctaaggaccccgagaagccagcactaatatcatccccacgttttagacgcaaagcagttcaaagtgtttaaaagataacttggtggtggtcacccagcgaaaggtggcagaacccaaaagcttgctccttatccactgtgacttggcctccagggatgagaccaacctctcctggaagggcattgctgttgctagccacacctgcccgtctggccccctcctgctgtagttggaagcatctttcctgttcattctgtcctcagctgaaatagcaaacagctggtcaccatccggcaccaaatacccccaatacctgagactgcatgtctgactagtcattaatttgtaccccccagcaggccaacctcaaactctttaaactttatatatatctacatttgaaagattatttttattccattagagccgttacatccttattgtagatgcccttagcaagaagggtttctggaaggggaggccctagaaggtgactatcggtactgaatcctggttcttttgattccagatatgaaattggcttttagagcacattgtgctgattaagcccaaataacaccacatgagtagattttaaaagtctcctcttgaagacgtcctctagcatctgttgttggattgtgtggctgatacgggcttggagttaagcacatccttcctcgatactagttctctctttccattaaaaaatgcaaatgcagaggcctcgaatgtgcccgatttagatgttttgatatggaaaggtaatgttaataagggcatttggcagtgatgcactgaagaaaataaaacagacgcatggtttaggttctgctgttccttcccaaactgcttttccaggcatccaaaacccagctcttctgaaagggcctgggattctccagtgggtgccttggttgggaggggaccccttcatgagaatctccctcttctctgacctctctcagtagaagtgcacagaaagtctgatctcagatctgcctctgcatattaatagcaatattatgtttaaattgaaaatttcatttttcctgcctggtgtgcaggcaaataattgagacctaatttactttatttaataagctagtagccaatgtagttaagcccacactgataaaaacttggagggcatttgttgacaacctcccacatttttctggctggcttggttggacctggaacagcaggaggccaggataccagagcctcccaagtcccagagaactcccaaagggtctcccagctgccggaggcttccagagggagggagtgccacatgggagctgtccgtggttcttgtggctgaaattggcagggctccatggtgctcactggcaagggctgcagcagcctggggctgccgtctgtgttccatcccggatgcagctgatgtgctcactctgcagacatttcttagtgcctaactctgctggccaggtgaacaaggccctgtttttcccttgaagatctcatggttcagtgggagagacagtgggagagaggagaaagtgactaactccacttaggaatgtgtgtggtttaggggcaagagtgtgagttttggactcatgttcttaaatgctgacctcaataaatatgtttaaattctttgagccttgatttttcttatctgtaaaaatgcaagtacagatagtagagcttttcttccagcttgttaaaaggagaaactataaaacctaatgtgaaatgctgccatggagcagtgaccatcacaactgctgccggagtagacatgggagatagccttagcactgagagttgatatttctgtttttcctcctgggtgcccatggtggaactcttcctccctgccccctttgaagttaggagtggttgtacaactgactttggctcatgcagggtgagcagaagtgacatgtgtggtttgctatgtgcccttctcctgactcagtaatcagggctgcttgtgctgaggtggaggctccagcagcctggatccctgagtgactacatggagtggagtctcctcccccacaacatgcaggggatgtgtggtgtgaacaagtggctttttgttgaagccactgaactgttagggtcaattgttattgttactgcagtataacatcttgtcctgactaaaggttcaggaggatagattttctcccttcggtgagaaggagggtactccacagacaaggttacacttcagcacagtcttaaatcaggactctgcattctctagatgcaggaggggataagggaattccagatggaggaactggcacacgcaggacctgaaggataaggtctctggctgtcaagtagatttacatttctccattgtccctcctctcttccgcttacctttctttctctcttctccattcctgtccccacccttcttcagcttcctccctttcattctcttttcttgccaggtgtcctgaggctctgagtgaccctagaagttgccctttaactggccagtgtctccaaagtggttgcatgtctcgaagctctttgcggcctcatttcctcctgctcattggttggctttggctttctctctctctctctctcttttttttttttttttggaggttactaggattagagattgaagctgataagtgcagcttctccacttggtgggtggtgatggtggtggagcgtcatccgagcaggggatatgcctggatgtcatccacccaggctgaatgccttcccagcaacagagctctgtgacttggggtgggttctgtataaaccctgaagcttctatcaccaggtgactttttctagtattcattgacaaagaagagattttaggacatctctcaccctaccccctagctgattccctgtttagccagttggtgaagtctaggctgagtcattctgagagcagaggaagcccttggtcataatggtgcagcctgtctggccaggcgaggggaggggggtggtcatggaggatttcagcggggagggtggaggcttcctggacttgtggggatcaagattttctcttttgctggctggctggccctagagctgtgctttattaagatcatttgaatattatggctttaggaacagaacctattaataattgtgacaaggagaaattgtagagcgtggaaaaaaggggaaaaagagtcactccaaggtaaaataaaccaccacaattggaaagtccaggtaactaccagagtgagacaaatactacctagagagtcacagtgggagccatttgaaaaacaaagtacaattaaaagtttaatttttgatggaattagtaaattaaaagtttcaggaatgggtcttctcaggagaggggagcgtctgctgttggctttggtgtggctacgccagctgggccctaatctcagcctttgcccggagagattctgcagcacctgccgagtgagcagtcatcccatttgagctctgtaagagatccagcgttcctctgggagtgtcctgagcacgcccaccaccacctgtccctgagccttcccttgcaacagtcttgccttcctttcattctcttctcagctggtcttgagtccgaagtgagcggcttcctttgtcgcttgggagctgcagcttgcaccgcactcaggtgtaaggacctgcaggtgtgtgcagacacagtctgtgtgttcctcagaaggaatgaccacttgaagcagagctttgtgacgaggccttccccaagtgcatctgagaacgttcacaggacttctgagactctaagatgagccgtcaacctgtgttgcaaatctcctccagctttaggaattagtttaaaattaaacttacagacaggccaaatctccccagactcaggccgacttaggaaagtacaatgcgtggcttcattttaacaagtagttccctgatacggtacatgaggaaaatgctgctgaacgtcagctagttaacttgaggacccagcatcagccattctccggactgcgagctcagcttgtttcaagtctgggggttcatgtacgaactacaggctggttctggggtctcagcctaagctgaagatccggcggggaccaatatggacaaagcatagaggaaactgcccagtcagaaaggcagtgagccagaagccaagatgttccttaggaacacccagggagggggcagcgtcaaggccagggggtgcagggcctgccagctcacctgtctcccaccttcacgtacatcctctattctgggaaagtgtgatcgatcctgctatgcatattgttgcattccatcttcattttgtgtctcttgattgttggggttttttgtttgtttgtttttttgttttgagatggagtctcgctctgttgcccaggctggagtatagtggcacaatctctactaactgcaacctctgcctcccgggtgcaagcgattcttctgactcagcctcctgagtagctgggattataggggcccaccaccacacccagctaatttttgtatttttactagagatgaggtttcatcatggtggctaggctggtctcgaactcttgacctcaggtggatccacccgccttggcctcccaaagtgctgggatcccaaagtgcaagagattacatgcctggctctcttggttttaaagaaacagcagctattaagttcagatgcttttctaagtgtttattcatcccatgacttagtgtgtgtcaggcactgtcctggacactaggatgtggtggttaaagcagcccagagtctctgccttcaaggagctgatgttctggtgggaggagggcatcgggggatcctcagtgaggagtaaatgtcacgagcccagtgggaaagtgaaggagggaatggggtccagcgggggaagggaatcccagggacatctgggcaaagacgttcccaggaggggactgcaagcgcggtgtccttggggcgggattgcactgggagtgtttgaaggtcagccgggagactgcgaggcaggagctggtggagagaggacgtggaaggaggtgaggccggggaagtgaccggcagggccacggaggactcaggcggctgttcccggcctgcaccctggtcctccatggtggtgaagggctgggggtaggaccacagcctccttgtcttgccttcctggggagatggggcaggaagagagtctgtagataataagctgcctgcaccctgagctactccagagacggcatctgtctgctccggggccagggcggagaagcctgaagctgagtccctggggtgcagggcccacactctggctgctcattgccactctgggtcccgaccgggtgtgggttcagatgaagactctcaaacaggccttggctgcatcaaacacatcgcgggggtgtggagtctagggctgaagtcacggggtagacttcagacttctgcaaacgtcacctggcagtgcccagttgagatatctgtctcggcagtaccaggctatttgaacatgtctttgtaggtttatcaccaaggtagaagagttcattgtctatttcttaggtgagggactccaatttgtggaggcaatggtgggggtagggtgggtggaggagagagtatggtggggaggggaaggagccccagggggccttggcctccacgagtttctagtccttgtcagggtgaggcaggcggagaagaggggactctgggaaggagaaatgggaacatcacactggggtatttatgggagccgtgcacaggagcgctggccattcgtcttgaggccccactgcagggagcagcgctggaagcccggccctctgtactgtgtgttcccaggcacagggagaatgactgtgctgcctctttccggggtgtaatttgagtttgcatgtggaacgaggccctggcccctaagtcagcccctttatgttttggtcgtgattggtgaggcgctgcggcaaggtgcccacgtccctctggtgatctggagacacggtgaacaatgtcgacattgaatatgttgccaggagtgcttagcggaaggttgatacagcacctcgggtctgaacgttctctcccagtgcttatgagctgaaaatctcagaattgaggcaggcaatttctgagttcattcagaacgcagtgagctgtttgggagatggccacgtgcagaggcagacggcagctgacgcaggcttctccggtgacacagtgaccgttcagccccaagagaaggcagtagggagattacctaccgctactgcagactccttcccaggcagacacttccagacccactcttcgctacatcctggagctgcgtggggtgggcaggtggggctgcacggacggagacctctggttcctcttggccctttggcctcccgctacccagcgctgtgagtggggtcttccagtgggtcctgattgccaggtcttgagctgcttcaggtgcccccagcctgggtgtccgaggttgctgatgcacttgggggctcagttgctgttggtgctttgatagactgtcccttctgaggaaacatccctgccaggacagactcatccctgtttgccaggacagactcatccctgtttgccaggacagactcaggaccagcctgtgacagaggctgctccctctggattgtattcattcgaataggtggtcccgttaaacccaagatggtgctctgtggtgtcccagtctacccttgcccctggactccagttcctgtagggctctgtacgccccctctcctgaccctcccaccccagctcctggaacattctgtgtttccttgggaacctgctgcacttagcaaagccccctctccgcagcctcccccttcttccgctcaggggctctggctctgccgtggggacactgctgcccttcagccctttcaagtggaggctgtgttctcctctcggcctgagtgttactgggccttggcatggggcgggggggtgggtatccttggtccccagggccacttctagttcactgtccccccttgtccttgagtctgcatcttcggctgcttcacgccccactgctgcttgtggggccacccttgggccctggggccattcttttttgctccctgatggtcgctggcgggttcttgtccagccctctcctgtgttgtggtgtttcgtgtcgttctctccgacgacaccttggtttctcagttcctgggctttctcccctctaaagacctccttgttcagcgactcatccctaggccctgggtctgttctctgtggcttcctgctttaccatctcaggttccagaagcccattcagactacctggccttctctgcccactcctcccagtgtctacagtccagccacgcctcaacaccagaatccagggaccctcggtgtctttgtgctgccccagccattcctggtctcacaccctccccgactcagctcagattccacaggtccctcctcgcccacgtgccttctgcatcgggcccctttcccctcgctcacatgaccaggtgcgtggctcgtccagctctactcatacctggttctcctcttgggctgtgcccacacccgcccagtacctggttctcctcctgagctgtgcccacacctgcccagcagcctgactggccttcagttcccagcaccagcatcaagtgcccccttggctctgtctgattctcctccgtgctgtccctcgaccctcctccgtgctgtcaatccatccctgtctggctctctggtctcttgggccgggccgtcccctcttatccctcctccaccctgctcccctccccgcactcctcgcagctgctgacctgctttccatcgcccagagcagaggagacaggggcagtcagaacaacactgacactgccctggcttccccctgccagcctcgcccggccactctgctgagggaatgggaaagagcggacacagccatgcaggggaggagggagctcgtgggggcggctggagggatggaccctcatgctccttgccaagggcaactcttcactcatgaacttgaccctgtccctttggccagttccaagtgtttgccgccgcagcgtcccttccctctcctgcggtggcagcttcttttccttccttcctggttctttcccatcagtgtctgcgtatgctcccatcgcgactcacttccctccagttctgtttctagtttttccttcacagcagagcttcatcgaagctctatgcccaccatcattagttccgctgtcttctcgcggcgaggtgtgatgcgggagcgtggcagccccctctctggtctcctgcatcactcctgcctctgcgcccttgctctagaaccttctccacgtggccacccaagaggccttgttagaatgagcgtcagatcatggcacgtctttgctcaaagcctttcagggcccccttctcactcaggatagatgctgaagtcctcactgtgacaggatctgcacccccacccgccagggcccctctgagcccatccccttccccttcctccctcactccactctggggacacaggcatcttggccacttctcgaagcagggcctttgcccttgctggtcttgcctgcaatgcccttccccaggtatctgcctggctccctctcactcccatagaaaggaatttttaggttttactgtgtccccagcgcccatagcagggcctgggacctggtggttggttgctcagcatgtctctgtgaatgaatgagtgaatgaatgctgcgtggaatctggagtcttcctggtgggagacagcccttaaagcagtatccctggcgctgtctcctcctctgttagccttacccatcctggcctgcccttgcccattttggggacttgctgctcctgctgcctctgctgcacatgtgtcctgggctggggggtccctgtgggtaaccctgtcaccacttagcacagaccatcgtcctcactgccagcccagcctctgacttaattaccactggaacttgggttgcacaaacaggggtcccctgggcctgcccacttgatttcctgctgggagaccagcaggggctgttcttaccctaagtttagctgggatgtggggagtggtggcttccctgctggcccatggacaactctccttggggacagctcatgtcctcccccacaaggaaggaaggagaagagaggccaggccgcctctgcatgtctgggtttctatgacgagaagcagcctcctgggtctttctgagcttgagaagcactgatgggtgaattcaggcttcattcctgctggtgcacatcatgcacatcttcgcctttttttgattctctatttttctctttcatttttgcatggctcagtggaagcagctaatgggggttcagcagcaagttctctcctcttaaagatgggctgagcctgacctgcagttgcttgaacaactggacaagccctggtggggctgtgcatgccggtggtgagggggtcgtacaggagagttttcagaagggatgcctcctggcagagagcgactgaggggaacaggcagtagcgtgaccttggagtcgggctgtgccacacttgagttacacggacaccacttccggctctgtgacccgggagagcagcctctggccttcagtgttctcatctgcagtatgggatggtatatgagtccactctcgcactgctttaaagaaataccctagactggtaatttataaatacaagaagtttaattggctcacagtttggcaggctggacaggaagcatagtgccggcatctgctcagcttctggggaggcctcaggaaacttacaatcatagcagaagatgaaggggaagtaggctggtcttccgtggctggggcaggagcaagagagagagtggggaggtgccacacactttaaacaaccagatcttgcgaaactcactcgctgtcacaagagcagcaccgaggggatgccactaacccattcacgagaaccctacccccatgatccagtcacctcctaccagaccccacctctaacaccagggataacaatttgacatgaaatttgggtggagacacagatccaaaccatatcagatagtaatagcacctagcttgttcagttgttaggagattaatgagaatgtgtgaccagcacatagtattaactggtagctcttactaaattaaggaaagccccagaattaagaaccagagccttccctttacagcagtgttgagcatctgtgcacagcacctccaagtcctgggttggtttggctctacctctcagtggctccagcctgacttagcatccctgagtccccagttcttcctgcaaggaaagggggctgtcctcaggaacagatgaaagaacacacaaaagagactccctgaactctaacacacaatacacgtgttagactgttgttacctattcttattgatttcatcagcaagcattcactgtgtcccttctgtgccggatgccatgggaagtgacagtggcctggatggagacctggcctcgaggtgggtcacctgagtgtcctgtgataccttcacctgggtggcttggcccttatcaggaggctgcggcagcatcacagtgggaggccctctgtctcccgccagtgggccccagtccgtttgctcactattttctatcccggagtttacctgcccaggcacactgggggcccaggccacgttctcccctccctgccatgagtcttgatgaagtacttcagggctcagcaaattttggtcagaggtgcccttctgcagagccctctgagttacagcgagtcccctgccccttcctctgcacaaggagggctggtcagaggtacccctctggggagtcctctgagttacagcgagtcacctgccccttcctctgcacaaggagggctgtgtcttcctctcacctgaagatcctgtgccttttgctcttctctgcacgactcatgtggggcctgggattctcactacactcgatatgggtgggagatgaacttataatcagaaggacacagagctggtccccggggccagaggctaggagtgacagctcaggtgatgtgggttacacagctttaggctcagtcctcatctggagtcagccaagaaaatcgcatttcacacacatgcacagttttatggcctcttttgatgtttccttggtggttttgaatatttaaatttatattttcaataatttatttttaacccctcaagtaactgaacctgccacgagaagatgcagcccccaggtgggaagggggctcatgagctgacccatcaggctgaggccttgtgggatcacctgagaggcgttttggagtaatttcctctccatctctttttattttaaaaaataaaaaatgtactctgttaaaacagtgacataagacaaatggtacagaatgccagctgtgaggattcattgatggatgaatttaacccatgtttatggagtgtcatgtctttggtgctgggaaaaacagagagggtgacttagtctccctcctcaagggaggagctcagagtcaggggatggggaggcagacccccgagggactcccagagcccacccttggaaaggagagatgagttggtggtggggggtgggtgccaggagccttgggagatggggcctgcactgctgggaaagtaccgaagcttgtgatctttcaaaggagttttgacaggtgaccagacacagatagatggtgtctttccctcccaaagctataggggccatgagagccgatcgtctcatctctgggtggttccgctgggacacccctcagaagactcttggttatgaaccccagtgtcagcatcccccgcactcatggttcactggttcttccctagaccatgacctcttctcctcctgtctgcatggcatagggccaggcacttcccacctgcatggcttagggccaggcccttctctcgggtggggaggaaagtgagagagaccgagcccctggccctctgctcttctccaccaggcctgagatgggggtctgggctcctttctatgtgtttgcaatccaaggtccttttgggaattcacctgtttggaagatgaatcctatctccagttttgcctttgggtttctcagcttggagacacatgtgcgcggcgagctcccgtcccggttcccctgggtcctgcagtgtgcacaggagcagccctgggatggatctttcgaagcacctgcgtcgcagccagaacagggtttttaaaaaatcaactatacaggtatttaagcagggactagggtggattttatggccctccgtgtggcaggcagcaggcttggctgattctcagggcggcggggtggcccttgctgcagttcaagtcacagtctgttgcggctgcattccatttttcccagagaaaaggccaaatgtcaggggcctcctaggtgcctgggaagatgtccagctgcccaatggactagtctgaccccgacaggctgagagcctgtcatcgggctggaggcatccaggtgaagtggtccacggagctggcatttcgtttacacttatgtgaggcctttctttgagcctcttagacagttagtcctgacaacatctgggttgaaatacagatgaggttgtggcatagcaagtcccctggcccagatatagtcacggtttgctgttgatccagttaggagacctccgctttggccatacagccttcccttctgagctgggatggtccaccaacttttggagccacagctggtaaggagacttcctatctgaggatgcccccttctctggacccccagatcctgacaccaagccaggccaggccaggccattttggtgttgcagaatgtgtggtggggagtaagagcaaatttctgttccagaggcagggaggggacacagagcacaatcctggctgatattccctggggtaatgtccaggcaggacggagaccggccccttcctctctttcccctcacaccagatggctatggccctgccagacattggggctgtgggctgctcaggaccctttccccagcaccccgcatcacgacgcatctagaatgtccaggacacgattctcctgcggactccgatggccacccccattccccctggggctgagagagttccttgccgtgcagatttgttttacactcaggatgtattccttggtcagagatgggagacggttttctcatttctgtctctttttaagagaaaaagtggaaaaagacatccaagcactttgttcgtggaccactttcctgcctgtggagtcgtcacctggcatccttgcttctgggctggtagaaaccagacgcaactcattgctctgagttggtgcgactgcttgaaaggccggggcaggtgctgatgtagtttcttggtgcagagtgatgcccagtagatgtccatggaatgaatgaataagcaaagaatgaacaagtgatgtttaatgagtagggaggagggggtgcctctgtggggtgttggagttccaggcacagaatccactgaaggccgggctcccctttgtcagaggtgacgtctggatgggcagatttgccaaagttctagggtctgaacatagaggccaggacttattaaaatctgctcctttccttaaactagcacattctagctgttatcctggtgccatagaaggatgaaaaatatttctgagaaatcagacaacttccagtgactaaagctagtctaaagaatggtgtacacacacacatacacacacacacatacacacacacactctctctctctttctttcctgttgggtgttttcaggccatttctgtggctctgtaggccaaattctagactctagtgaaaaacccacagacctgagttcgtgggctggcaagctacacgtttggctcatctgaggtcctggagggtgcaacgtctgggccaccatccgggttcctgggctctcctttccatcctcaccaggctccttgggatcccccagtgccttcctttcccatcccaggctgctgctgctcctctcattcccagatgtttctatctctctagacaggtttgggagaaggacttctttgaagttcctgcttccttactgacctcagagactcaagaatggttcattaaaataattttgtcaaggaggtggtgggtggaagaggtgggggtaacaaatctggggaagttagaggagtttaagaaatcttggcggggcatggtggctcacgcctataatctcagcactttgggaggccaaggcaggaggatcacttgatcccagaagtttgaggccagcctggacgatataccgggaccccatctctacaaaagatttttaaaaattagctgggcacaacgatgcacacctgtagtcccagctacttgggaggctggggcaggaggatcgcttgagcacaggaggtcgaggctgcagtgaactatgatcatgccactgcactccagcctgggcgacacagcaagaccctgtctcaaaacaaaacaaaaaaaatgaacaaaagcttatgatatgatcaccgtcgtggtacccttgtttcttaagccttgttcgaaggatgacctcttttcttcttaggggaactttgtactatttatgcctgaagcaatcagggaatcaggtgtgttgaaaatagaatagaaatggtggtatttattgaactttttattgtgttgggcacttatgcttagtgctttaaagatataataggatctaaatctcacaaaatgctgagaatcagatgctgttattacccttgtttagagaggagcaatctaaggctcagaccacacggcagatgtgctgaggaacccaggtttcagcccaagtcaccaaccccagcctgggcagccgccacagctgcccctagaccaggccccagatcccttgggacttctggcgtaacttttatgtgcataacctacaggcctgtgagtcttaagtgggtaatttgcatgatggggaccttaagactggcaaaatcctttcctagggggtggtatgagtatgctgtggctgccataacaaagcaccacaaacaggacgtaaacagcagaaaccaactgactcacagccctggagcccagaagtctaagctcaagacatcaatagggttgggctctcccgaggcctctctccttggcctgcagacggtgtcttcttgccctgtcctcacatggcgtttccgctgtgcacacggctccctgatgtctctctgtgtcctcatctcctcttcttgtgaggacaccagtcatattggatcagggcccacactgatagcctcattttaacttagtcacctctttaaagactgccgtctccaaatccagtcacatgccgagatgctgggagttagggcttcaacatacacattttgcgggggacacagttcagtctgtgacagttcagtcatttgcttcacataggcggggtccccttagggtggttgcttttctgcctgtacacgtgtcttagaccccttgggaaaagcacaagcccagagctgccagtgcaggcgcccctgaggtgctcacggccctgcggcttcctgtcccttgactttttgccccacctggagcagcagacattctcttccgattgcggaaagttttgaggcctcttgtataacataagacaaggcttctgcattgaaattgttcaagaattgggttccaatttcccaggagcacggaaagcgttgccaggaaagcggagttgctggcgatttatgtcggtttttctgacataacgaagatttccctttgtttttttggaaccgactggagcgtgcttgccaaaagagcggcctcaggaggagcagatcattttctcttgttcttcctccttctttttttattccctctcaatttattttcaggtcagagcttcatgaggtcgctgaagctgtgaaatctgacagactcaccatctgagcaaacagactgtccaggaacaggttttatttggctcgctgaggagatgtgacagtctgggaaaatcctcggtctctgtattttgtctttgcccaaaagagtttggttcggtttgacaaatgttaaccaagctcccccctccacgccaggggcgatgccaggcactgagacccggtcctgcccggagcagagcagagccgctcacccttgaggggtgccctgtacaactccacaaatacgtgtccaccgtcctgctggtcgccagcgcgcacagttgctaatccgttgaaatacctctgtggctgctggcgagcgggtgtcacccgagcttccagtgcccatgctgcgctggcctgcatcattctgagtagcggcgtctgtgccagaccagttgttaaacattctgaatgtcacacctggtggagggtgtgtggatgagaggggctcggttgagtaccaagtgttggggaaggccttttggagaggtcaagaccaggccagattttgagcaggagctcagcagacaggccagggaggaacaggcagatattcactgtcagcggcggaaaccagctgtgcaaaggccctgaggcagggagagcagggtgggtttggtggggtggtggcggcagaggagggggtggggtggcggggagaaggggcagtgccagggtggagagagaggctggagtaggggcagtggcagcagagcagggggtggcgctggcagaggagggagctgggaagaagagcaggactcccttggggctggtgtttggtgccaaaggccatgaagagtgagcagagggctttaatttgacggtgtatgaggtcctattatattaaattttatttttttgagaccgagttttgttctttcatccaggctggagtgaagtggcacgattttggctcactgcaacctccgcctaccgggttcaagtgattctcctgcctcagcctcccgagtagctgggattataggcgcccgccaccacgcacggctaatttttgtatttttagtagagacggggttttgccatgttgaccaggctggtctcgaactcctgacctcaggcgatccacccgccatggcctcccaaagtgctgggattacagacgtgagtcaccgcccccggcggtcccattatatttttaaagtatatatattgatttatattccacctttgtctagaatgggtttagattcctgagacatagataatattgtgtcatgagttatatatttagggtaaattataaggaaacatagattacagtcagctaatgtaaaagtttttagtgtaaaaagtgagcaagaagaagatagaatgaggcaggatcaaaacacagaatgagtgacagggaatgggctgcccagcccgggggtgagtctcgagcggccggtgccaagaaggttgcacaatggctgggcgccggggagaggtgtggagaaaggggctgagggcttacacggacaggcacaggctccaccgagcagccgcgctaaggagctgtggggtggggagccgtgggcccgggtgtgggggctgcagaagacggagggttgcagggcgttcgtttactgccgtctgcctcagccatgaagtcccataaattgggtggctttacccaacagaaatgcaccctctcatagttcccgaggcccgacctccaagtccaggtaccggcagggccaggcttccgctggggctccaggcggatccttcctcgcccctcctagcgtctgctattcactgcctgcagctgcttcactcccgtccctgctccatcttcacgcggcctcccccaacctgtgcgtctctgttttcacgtggccttcttgcagagacgtcaatcacattggattggggcccatcctactccgttatgacttcatcttaactagatgacatcgcaaagctcctatttccaaataagggcacatgcgtgggtacaggggttaggacttcaacatatctttttggggaacacggattcatttttctcacttccctaacaaaatataaactgcaggaggcagaaaacgtcgccgacttactcaccattgtgttcccagcatctctggcaggatgctgatcggataaccagtgcccgaaaaaatgtggttgttgaatttgctcccactttcttcaccccctaacatcaggtcaaatccggcctagaattcctagtggaaagacagggacgactcttccgcaacacctctcagacccgtcagtgtgctgaggcgcagcttcccagagggaggtgtcatctgcagcgctttgcttacccgtttgaccacgacaccaccgcacctccctgccctttatcttagcagggcatctctggagagaatgttccacggagcacacctcgggaaacactagtttagctgcattgcagattggaggcaggggcagactaccttctagacagaactttccaactcttgaaagatttcttctgaagaattatggctatatctcctcccctgtagcctcccctgctctgccctctgcttttggtcttaaagctattttagatctgaaataccttccctggacctaccatttgcatttggacttagattattagacattttcttcttataaaaatcagcaagttgtacctacaaagtgggagcaaattcaacaaccacactttttcaggcactggttgtgcgattagcatcctgccagggatgctgggaacacagtggtgaataagttggggacattttctgcctcctgaagttcatattttgttgggggagagagaaaaataaattcatgtactagtctgctcaggctgctgtaacaaaataccatagactgggtggctttaacagaagacattgatttctaacagttctggaggctgggaagtccaagattaaggcactggcagattcgattcctgatgatggctctggcctggctgccaggtggctgccttctcatatggtgggagcctttgccttcaccttctcctcctcctcctcctccttcttctcctccttctctccttccctcctcctccttcttcttctcctcctcctccttctcttcttccctcctcctcctcttccttcttcttctcctcctcctcctcttctttctcccctttcctcctgctcctcctcctgctccttcctcttgttcttgttcttttcttcctcttgttctctctctctcactctctccctccctccctctctccttatgaagccattaatataatcatgaggacacctaccttcatgacttgtctcatattaattagcttctgaagatctcacctccaaataccatagcattgggggttggggcttcaacctattaattttggggaaatacaattcagtccatagcagtcagtaaatagataaagcgaatttccctggtgggaagtgctgcagaggaagaagtgctgggaggagggtgatggttggggagggagggggtagtccctgaggaggcagcagtttaagctgagatgggaaggaagagaggaaggtggccagtggagggccaggaaaggaggattttgggtgaagagaacggctacagcaaacagatgggaaagactgaagcatgtcccgggactgaaggaagtgggggctggagtccagagattgcagagcatgctggtactggagggtgggggaggtggcaggagtcccattcggggcatggtgggggctgtaggaggacagaggagtccatggatgtattctgaggtcctgttggtctaggagctggttgggtgactcctgctgccatctaggcaagacatggcagccacttagatgaggatctgggaggggagaagaagagaagaggacagcttggggatgtccctcagagttagaaccaacagagtttgtaggttttcagcttcagtacctaggtcaccagcagtgtcatctaccgagaaggcaaagcctggggaaaaacaggtttgaggaggcaaataaaaaaatctctgttgcacacgttacatgtgggatgctctttatacagccaaatggggaggccacataggctagcagatcctgggccaggagctcccagaaggacctaggcttgagacctgagtttgtaagtcatcaacaacatctggcagggctcaggcacttagagggcaggggaaggaggaggagatggtgatggggcagaggagaagggggaaccagttgttgcaggaagatggacagcccatgaggtttcccagagggcctggccactgagaagctgagataagagaatggcgtcattggatttggtgacctagaggttcagagtggccagcgggaagttttgtagtgaatatagaggagacgaaaaagaatggggatgggaatggaggaaggagagagggctggaggaagaaaggaagagaaactaattttgactgggcaactatgcagaagaaagcccgctttaggagtgaggtcctggaggaggggacaggagatgggatccagggcgcagctggagggattctacctggagcaggtgggggtgcttatttcatggccataggagggaagagagaggagacagctgcaccttgttggagtccatgtcagctgattggaagaatccagaaaagggagatgggtccgtggataggtggaagccctaggtcaaaatatctgactgcagaaaagaccagtcagggaaataatgatttttctttcaacctggtaaaatagttttcttctgtcaaagagcaagtggcctttaaggcatgtttatctattcccttacattgtgaaagagtaaagcagtcttaagactgggtgtgaaatggagaagaacgcagcactggcttaaacttgactgtgccattggcgcttgctggcagcagctgagcctcaggcaccctgagcaagcacaaggcggagaaatgagacctgctggtgcttacaccagaactgactggcaactgggaggggctgagcctgggatctggggccacttgagcttgacctcatacctgtttatgtcctaattgcttgcttccagttcagcccctcttctctgagaccatcctctccgaggggtcttttctctctggccctttgatgctctacaaatcgtctcctttctagtggttccctcttcttctcccagggcaacagcatcacaggggcatccctggctcctggggctgtagctgttggccttggcccatgcttagggccttcccaccctcagtgtctcatctcaggtgggctggctatgcaccaccccgggatctacagtgtgggacaaggcacacacacttttgattgataaacagggtgtgtcatttaaagaagttgagacagatttttctggtccctggtcaacactgacttagaaagatctaagaaaatctatagatcagattttactgctttcaagataaacgtgcttacattttcgacacagagcatcagtaacctctgaaaatgaaatgcttcccctctttcccatgttctggatggatttggtagaacttgcatcaggctgcaaagtgcatgaagttgaagctgactccttgcttaaagagaaaaccttaaatattaaatgtccatttgtctgttaagtaaacagttgcattctttcagaagtcctgatgctaacaacatctgcgacacgggacggtcagcttcccaaatggctgtgttagccccatgttcagggcctggacttttcctgaataataggtaaagccaagggaaggaaagttttacttcctttctgggctaaattgtcatctgggaagcatcataggctcagtttagaggaacatggcattgtcctttacccaggtgactgtatttgctattttacattggcttgattagatcaaggcaggacatttgttatcgctgactctcagcctggaagcagcatctaatatgtaagcagttgactcctgctggatgggcacataaactgggtgtcatgttattaagatgtggtgaaaggtagacaccttccctgtgcttggaatgccccagtccccacacggggcacccccttacccatagcactgtctcatcagaagttggctggagtgttgggaattggaagggcagggaggttgttggtagggctggtaaatctatggcatggaaaaggtggaagagttatctctgcttcctagggacgaaggcctctcccggggctgggaagttcctgtcccttgtactcagggtctctcttccctggacagtgctagacaaataggactcctttaactccttaggaagttccctgtctttaagcattgtctttctttaaacaggcttcaatgcaaccaattaggttcttacttgctgaattcttcttcttcttcttctgcttctctgagatctgagggggatttgaatgatcttgactctgttcccaaccagcctcttggtttaattccaggattcattcattcaacaaatatttgagtatctgctgcatgctgggaaccatgttccttgcaaggcatacggcaaagaacaaggtagataagttcctcgcatttattgtgtgtctatttgtctattttaacccagaacatcttctgagaggatcagttttaccaggcaagggcaacttttgatggtttccccaatagcattcccgtcttatttcttgccgacaggaccttgactgtgttcaggtgtcagtggccaaattcttggggagatgccagggccctctccagtcccaggggataaacctagatccgtctaagcccatcatggtcagtgattggtttaggggcggcctgtaactcagttattgccagtgagatggctaggcacttctaggacaatttcctggctcttaaaaaagggtgtatgatttctgtcttctggactttggaaaatgtgatggttatgggaggccgctatggtcaccttgcagccatgtgggtccagcccaaggtcatagcatggttgagccgagagaaggaacccagctgacatcaaccctacctccagacttcttgtgacatgagatggtacattttccttcttctttaaggtaatttaggttggattttctgtaattttgcagcccaaaatatcctacttgaaagcaaaagacatctgccctcgtattcatgcagcggtgtggtcgctttagcctttctccaggctcattgtgttgtgctcagttttgtacacaagtacgttcttttctaaatggcaagacgcttaagatgcttggatttcctcttccaccgcctctctccagcacagcactgagcttaatatcttgtatgtcgtgggatatcaataaacgcttattgagttgaatttgagttttacggacatgagtttaaatttggtgactacccacgggcttctgagaaattattgaaagccaatctatggcccaaagagaggacggcctgatcaaggcatgtgctgttgggccaggcagaccacgatggggatgaacgtgccctgtgtgaggtgccagagaaaatccatcatgcatcccgagctctgttttttattgaaaaatccatttataaataatctggacaaataaagtaaaaggcactttattgggattcagaaaaattcatggctactgaacatccggccaattcagctcccagctcccaattagcctgccagggcctctctcagtggcaggggccctgccagccactcgaaaggctgccctgggactatgagtcattttcttatttcttagcatgctgggcgtgaaaatcttctttctctttcttattacatgctagcacttaccgggtgctttggccaagcagatatatcagcatgtttttgtgcagataattgacagtggagcaggaagacactctcctctaagttgctccctctctttgttcactcgcttgctcgagaacccagggacggtgggaggaatggccaagctggacgcaggcctggcctccgcagagctggcgagcaggaaaggcaagtttcagacacctcctgccatgcccttgaccctgctgggcccccggtatcctaggagtgttttcccatttccggccatgtctttattttatgattgttcccttaacccaaaggcaactgggaaagattgtcatccttcaccacgaagaggccgttgtcatttagtgagtacctactgcatgccacatgctatgcagaaggtggttgttgcttcgtctcacctagccctcccagagaccctccaaggacaaatatgagactcagagatgttaactgacttgcccagggtcacacagcttgtaagtggtggaaccagaattagaaaatgcaattcctttttttggagcctcacctccttccatcgggatcacagtgatcatattttccaaactgaaaatgggatgcagggggcctggcacggggcaacggggcaatcagtagttgctgggagaataaacacacgaattgagccaagggtcagccaacgggacaggtcttttgtcagcggaccgtttgggccatctggtcccagggaccacagggtctgtctgcctctccgtagggtgggctgtgggtagtggggtgcccgtgaggggagaggaacaagagagcctggacagcaggctctgggggtgctgtggcctctgagagtggagtgggaacaggggactggcagaggagctggtagcgagggcttgtgtgtggctgctaactggatccatttgccaaatcagcaaagtttggagctgagactccagacttaccctgggcctaacttgggaaaatattacgcagtacaaaataaaattaaacagtattaaccacaggcccaaattgcacctatattttaaaaagcattgtgcagctgagacttataaagcccggcaccagcgtgaggccatcttggttaatgagagctctgcgcctgctactccttgccgcggcctctggttcacgtcctctcgccctcctccgctggggatgtgcggggcctccggtgagccgcagctccctcggaaggatgcaccctttgctctctggagcaggacgggcttttctgagaggcggggcccgaagtgtccggagccgccagcctcaggggctgcactggcctctcctttcctctgcccacacagagaacagcagcatcagatgggggcgggctcaaaagggcttcataggcgccccgacatcgcagctacggaggggccagaaaggaggcgtggatattgtactgcactttctggactttcacgggaattcatgaaggagcctgaatatgcagcagccacatctgggtttatttcagcttggacactaattcatgttgggtcccgtagtaaatcatttttcattcagttacttgtttttcctcacttgaaaaatgggcgtgatactggtggtcgctgttgtcttcccgcagcgatagaatgaggctctgcagtgatttcttttccttccaaagtcgaaagctcctctggctttgcacaaccttttgagcacgaccttctctctcatcacggtgatgcctgttgccccctagtggtcaccagcaaagggagtggttgagccgacgatcccaggttgcaactcagacccaggcctggccctgaacccaggtcttcctgctggttccgaggcatctctgggcagggtgggttatagggaggggaccagagagggagtcctcccagtcgcctccaccaggcagccctccagcttgtcaaactgtcgccagcagtgttttctcagcatggagattgtgtgtgagtgttaagtctagaaaaatcactcaggcaaggcaaagacttgctttggtgcaggggactggaaagcagatgtgctttttctggctctgaacactgaggggaagtgagctttggaagagaggcgctgacttggtgtgtgttttggggcaagaggaagtttaaagagggacagtctgagcttgctctttgcaggggcttgcttggaggcccacaggctggctgagcatgagagagagtgtgccagtcagagcccgcagactgatggcttgcttaggagtatggactggagcgagcctccccctcctcctcctctcctcaaacaaggtcatcagtgacaaatgcacaggagatggtaaaggtggattggggaggatttggacgtgtttcttctgaccttgatggggccatgtcccctctatttgtaatcttgagctagaacaactgacaaatggcctgataggtgacaaaagcaaacaatagactcacttgaaagatacagtgaatagaatttaattgaattttttttggtacagacattgatttcaccctgtaagatgtatggagtaaatcattaggggaattaatatacattaaaatgtagtttattatcatgaaacttttattgtgcttgtagttgtgtttttaattattattttaatgactttctatatttcaaatcgtgataaatctattttttaaaaataaacggactatagttttacaaggtgatgtgtagtgcagagctgttgatgaatattgctccttcattaatgagaaccaacagattagaaagactaaaaatggaccgatttacgcactttttaaaaagccaattaatatctaaccattaaacacaaatgttatagattagtctcactatcttatctactctctgggctcctattggatcattcagagattgactctttaaaccaagtaagtgaaggaggctctaaaagtggaaatgcctgggaccaattaaaacaaaggatttgggccataatgtgctgaaaatacccgtgtcctcctgcctggggggccattatccaaatgagcaaagaggacggaggtgtttgtccaagctgtctttgagggatgaagcagaggttggctctgctggtaggatcagggttttgggtgatttccccagtggtgaagatggactcgtactggcttttctgcattgcatctcctgagccttcttggaatcaagggcaaatgcttgttctgtgctttgtggggctttgtgggtaccccgctctacatggaaatcagccctatgaccactctcaatgctgacctatcccagctgagctgaacgacacgtggttttactgtcatggcaatatgtcctcagttttccaattcaaacatcttatttcagatacttggttccattagccacatgggggcttataccatcttcctccctggctgtgtgctggttggctatttctgacttttgaggttgtcaggcaacatgtctgggcagccagaggcaggggagtatggatgcgaggtgtgtgggctccggaggcacgcatcccaaatctgaaacctggcaccagcatttattgtgcgaccttgaacagatttacttgctcattcattcatttatccattcatttcttcattcaatatttatgaaatctgggtgctgttctagggattggagatatagcagtgatcaaaatggagaaaaatctctgcattccagtgaggactagagaaaggcattcaacaaatagtatagcaagatgcagagtacactgcagaacgtcaggcaggactatcgactgtggagaaaaaagaaagtggggtggagggccaggcagtgtgtcaggggatgttgctatttcacagggtggttagggaggccttacccagaagggaccatttgagctgtgacccagaggaagtgagggagtgaaccgagtaggattctgagggaagagtttcttctaggcacaagggatgcaggtgcagaagccctggggcaggagcctgctgtctgttcagggagtagcaaggggactgtgtggctgagtggaaggagtagatcagaggaatcctggggccagatcatgcaggacagataggtcattgggaggaccttggctttgagtctgggtgagatgggcactcctttaaagggtccccctgactagtgtgaagaagcaagagtgtaggcagggagatccaaaaggcagatgcagtcatctagatgggaggaggtgctggtagcttgaaccaaggcggcagcaattaagatgggagaagtgttggattttggccatattttgaaggtagagtgaacagatttgcttctaatgtttccaaaggaaaggggacaaggatcagtctcagatgtctggccagagtcactggcagggtggtgctgtcatctactgaggtggggggaagctacagaaagaaggggtgtgagtgtgggtgtgatggtaggttcatgtgtgaagcatgtaaagtttaagatcctagaagatatttggatggaattgtttaataggcagctggatataggagcctggagttcagagggagaagtttaggctgaaaacataaattttggggtagtcagtgcagagatgacgtttaaagttctgagtctgggtgagatgactggggagggagtggagatggtgaacaaggcccaggggagatttggggcaatctgatgtttagaggacagggggatgaggaagaaccagcaaaggaaactgagaagcaacagccagagaaagcagaaggtcaagagagagtgagcttgttagaggctaagtgaagatgacgtttcaatgaggagagagggttatcaaaagatgctggtagggcaagtaaaattaagattaagaatttgccatgggctttggcaatgtggaaatcattgatgaccttgacaacagttgtcttgatggaatagtggaggtaaaaatctgataggaatgggcttgggagagaatggaaggagagaacttggaggcaggcaatataaacactctgcaaaggaagtttgctttgaaggggagtataaggatggaatagtaacgtttcttaactcttaaaattctatttcctgatctgtaaaatggagacaaagacaacacctctatcacagagttaccaggaagattaaatgagatgttattggaaactcagtgctcaacacatagtaagggcttaaaaggtttgctggtactgactgctgcctgtctgattgaggagtgggcaggaggatctgccctggtgtttctgtgtcctgggtttttgaaggtaatctctgttactttaccctcctggggttggaagtcaatcacaagtttgggtaaattccccattttggcagttgtgaaatgacagaaagatcagaaagtcagaaatcccacactcctgctaagtggtggcttatctgtatggctgtgcaaatgaagcacgctgcttccctcattcctgtattcagttttattgcttgtcttgcaaaatggcacatttcaagattaaagccattttgactttgagttactgtctttgaagtataggatttcctaattataaaaacacatactaattgtagaaaaataggaaaatagaagaaaatatgcagaaaagaaatttatctaaggcctcctacccaaatccaactgctgttaatgttttagtgaatttgcttccaatacttttatgaactctttaaaaacatatttgagataatactgttatatagtgttgtatcttgctttttctcctcaatgttgttagtgtaagcattaagttcttcattaatgtttttaatggctatgtgccagggaatctttacattttccatctcaacttatatccaagtgaaatggtaggaatagttaacccttttatagcattcactggattccaggccctgttttaagtactttacataaattagctcatttaattctcataactaccttctcacataggaacgatcattattcccagtttacagttagagcctttaacacacattaaagcctttcattgggtgtgaggaccaaggatgaagggacagacaccctttagcagacagtgttgccttccatgtgagggctctggtgagctggcatgcagtcatgttcttcttgaaacccctgtggagctggaagtagagctggagacatgcctcctacttcaacttttcaggaaaaatatccaaacagttttggtaactgttaagtgaaaacaataacaacctattcccagctctcccttcacaatctctttgtggttcttattctgtatttctcttgatttacatcttgtgttctctcctaccgctgattcttggtcacaactttggtcataattcctgcaaaaagtggtcgggagtcttcagtgtccaagggtagaaagaagaaactgggccctagagcaatggtttgccaaagctatgtccttagcaagtcgtcagaaatgttagttcatgttataacccagaacacatatacatatattcatttatgatgataatatctggacagaagtttcaggaaacaatgttacctatggtgcactttgatactttccactccactccgttccatttgattaaaacaataccaatttccactttaaattggtttcaggactcactggttaccacaaactgcagaagtcaaattgctgccctggagcacagcgttggttcagcaccaaggacagcagcccatcgctcccttcccggccctgtgctcttccttccctgctgtcacattttggttccttattctgacttctccagcctgtgttgacctggctcttctttgacttcccgtggtgcactttcaatctcagtgattttttttttttttttttgagacggagtcttgctctgtcatccaggctggagtgcagtggcactctctctgcttactgaaacctccacctccggagttcaagtgattcttgtgcctcagccttccgagtagttgggattacaggtgtgtgccaccacgcccggctaatttttgtatttttagtagagacggggtttcgtcatgttggccaggctggtcttgaactcctgatctcaggcgatccacacacctcggcctcccaaagtgctgggattataggtgtaaaccaccacgcccggcccaatctcagtgattttagaccctaacttaggtgcctggtcttcgtagatcataagcttattggagagaagacctaggttttcactatggcttatgttccctttaatgcttgacccagatctccagggaattagtggaactttaaagatgaggataaggataatgcatcagggttcctctcctgggagtgttgctggctgcagatctgctgggactgactttgtagactgtcatcacgttggacaagaagggcctcgttttattggaacctctttctttttcacaggactggaaaaaaaatttagtcctcctcctcttgctattgctctgttgtaaccctttgaaaagcaagctccctttttatggctttgacattattgcatcgctgaatcacaaggttttcaggaagatatatttgattgtgttttttccctgcagcccatgctgctcttcaggtgacacaatatgagcttttgcgctccttatctttcatcttactccttgataacattaacgagcaagagaagaggaataagatatctcttcttttctttctaataaaatctgaggttctaaggatagggcccatctggttaaagggaagactgatatagacttatcagtggtcagtttttttgacacatccaccaattttagtttgaactaagtcctcacgtggacccaggctcatgtctttgggaatggggcactggcgtgattgattaataatatgtgagtgttggagcccagtcccattctgctttcccaagcagtggcaacatagcagcgggtcttctgagtcatgtgtcagctaggagggctgtgttcatgcatatgttaaggtcttctgagaccgacctctactcctcttcaaagcagggtagaacaattacctctgtaaaattcatgaattctcctcctgtttactcttcaattccaaatgctcaaagctgggttgcttgtttgtcatgtgggattcatgatcacaggtgttagcaaataaaggtggtgactaatctgaacttgtcttatgaaggcaggttatgaaattcaaacactattgaaatccaaacacctttcatctattaatggccaccagtggcctataatcaagtcacactctgttagctacacaattaccttgtttgtttgaagtgtgaattaaggatttgaggcatttgctaatgaatcttacttgctccctactttggctgaaatccctgtgttttccaaatgcaggcagttctggaatttaaggaaaggttttttttttttttttttttggatcctattttctccctgtatgaaagaagcttctgttttgcttttgcacagatggaaagaagcaggctctcacaccctcctttcccactggactctgccttgatttcattctcagttttgtaactcgtggaaagtgcctccccgttgctgcagttctaatggctctctctgcttgagtgttgtaccccttgtatgggagcagaggggagtggtggagtctccccgtttgccagcctcctttgattctctctttgtgactcttctctggaacgagtttcttttgtagataatgggattccattatgggtgttagggcttctctggagctgtcagctgtgagggaagataggaggttttgatcaatggtttctgcttgtatcttggatgtgttaattttaagatggctggcttctgtttttattagttttattgggtttgtgttgggggaagggttaggatgagcatcggtgtttttctgcaaggaaacgtggttgctcggagttaggtggctctgctgtacttggaggctggaagggcctggagcgaggcaaaatgcccacttctgctgtgttcctgtaggcaccagagctgttgtctgctaccatgaaagccttttctgacttctttgaatgacttacgacccatttccaaagggctgtattggttaatgttctaaagcagaggtgttagtggagcttttcagcattgtgggtggggttatttatgggtgggaagagcttgcgtgcacacacacacacacacatacacacactctgatataaattcctgatttatttagccatggattcagaatttatctcaaagggacgtggctacacaaagaccaagtggatgcagcatatttttgcatagcttatcccttgtccttagttcttaatgggagttggcagtgtgtggctgtcagtgacactttctacgcacatagaatcctgccaaggttgaagaagaagccaaattcttgcaacactacttctgttttatattcaggtttatatcactgttctggaaggacttataacaacaatctgtgctcttttaggctcttctgattcttgaactgaaccttcagatcagcaagtctgcatcttcatctgggggtagaggtgaaggagggttggtgttaaggaaggcagaatcggtattgagtcgtcttcagacactctctctccctctcactttttgttatttgagaaaatctgtatctctacgggcttacgatagcctgtctctgagacaacaatgacaccctcaaagttttaaccctgtttctttaggctggctatgtccttcattgaaagattgctgacctctcaaagaataaaataaaagtctaaaaatttatgatgagacttttgccactggctgtgatggaataactaggactagattcatcctcttgctacaaacaatgataaaactggataaaacctgtgaaataaatattttcagctattagatgatcgtcagagtaggactgtggttgctaagagaagactgtaaaccatacaatcactttgtatttctgcatggaggcatttcaagactgtatcttcagggaggtattccaagaagagtacagtgatcttgttgagctgaggagacagatatcagagtttggagaggttgatacatctagaatttgcagggcagaatatcatacaggagaaggcctggcaaagaaagtgctctagaaacttttatggctctcctgggatgttctgttgactactaaaccattgatgagtgaggtgaaaccccacaaaactggacaaagtgcacataggggctataaaattcacagagctcatacaggactcggaggtatttgcattctgaccagcccgactggggagctgtccttgaatatttgggacattcagtagagactccggaaggaagaagcaataatagtagggtaacaacatttctggagtaaaacgtgctgtagacccacctttacagagattaaaaataagccttgagagggtcaggctgatccacaagtaacttaaataactgccagagtaaagcctaaagcctaatgctctttagttaaagatataattgctgacagttttccaaacttgacaaaagctataaactcactgacctgagaagctcaacacaccccaagcaaggtaaatacaaagaaaccacagaatggcacacacagtatgatcagatttcttcaaattagtgataaagattttttttttcttttttaaagacagaatctcactctgtcatccaggctggagtgcagtggtcagtcttggctcactgcaacctccacctcccaggttcaagcgattcttgtgcctcagcctcccaagtagctggaattacaggcacacaccatcacgcctggctaattttttttttttttaagtagaaatgggtttcaccatgttggccaggttggtctcaaactcctaacctcaagcgatcctcccacctcggcctcccaaagtgctggaattacaggcatgagccacagtgcccagcaagaaaaaatcttaaactcagctagaagaggggaaaaagacaaattatagacaaagataagaatttttgcagacttctcatcagaaatcatgcaagctagaagacaatggaatgggatctcttgagtgccgaaagggggaacagtctgtcagtgtaaaattccgtatagagtaaattatccttacatggtcctggaaattgttttacatcttgaatatggtgatagatacataatacatttatgtgttaacatctactggactttacatttaaaatggggtacattttattgtatgtaaattatatctccatgatgctgattgaaaataggttttaatccctgaaatatgggataacacaattgtagtaaatgaagtaatacctatagattcatggcacacattagaggaaactgaggcacagagctatcatgtgacttcccccaaatcatacaaccaaagggagatggattaactttttctattctaaaagaaatgtttttttaatctctcaaaataggtggattcaggtcttctcacaaactaaaaggtaggacatatattcctccagtgcctttcaaactatgatctggctggcatctaggaaacttgctataaagacctcaatacggcaatttgatatctcctcccaaatacatgctgcttctctttcaggtattttttcattctccctctaccttttagtgtgttttctaggattacacatcagtgagattgtaaacatcttcagcactgtggatttattattattattattatttgagacagagttttgctctgtcactcaggctggagtgtaatggcacgatcttggctcactgcaacctctgccttccaggttcaagcgattctcctgcctcagcctcccaaatagctgggattacaggtgaccaccaccatgccaggctaatttttgtatttttaatagagatggggtttcaccatgttggccaggctggtggattattcttatatcagtcaggatcctctcaggagacagaagcatgtttggttatttgaacagaaaatttaatatataaagactttctagctagtagaagggtggttgattactaatggagataaaagagaattctaagtgtttccaaaatatcaggggtaaagcagcagctgctatctctaggctgaggaaaagcagacaacaaatcaaataaggactagaagacccttcctgacattggccaaaattcagacctcttcaaagagtgcatggctaccaaaggaacaagctgcctgccaaagggcctgggctggaagtggtctgtagaagtggctcattgtcacttgcggatgtcaattagaacagagctggtctaaagcagcctgccagtggagggactgtctcctgagggtacagctggagctcatcttcatggccactggactccactctgaataatagtgatgattataataataatgatgatggtaagaggtctgcaagggatgtgtctttgccactgtcatcttgcaggttcacgtcgttgctgtctattgacgaagcttcacattctgctatgccagcaaaggagaaatatgtacagggtccagcttcagtatcacaaagaaggacaaagaagggtgaaattggaactcagagataataataaactgacgactggaacaatatcaaaatagaagttggggcagtcttggatctggcttcatcagtacatgtcactgtattaaggggcaatgagtgttctggttagcattgcactgttttaaaatctatttctttctggattgcctatattggttcatggtcttacagtgcacccagtttccaatgccataaatatcagagtaggggccccaaggtcaagggcctacaaatccaagccggccatgacagtggagaaagccagcaggttgaggtggtggtcctctggagctctcaggcccatccaaatggacagcagcttctcagcgccaagcagtggttgctgtgcagcatgtgggcctggggttgccagactttatttttcaagagaagctggaaatccctgaccttcaatctttaaacattggcagataagccaaatgggaagaagactgtgtggaccaagcaggcacatctctgggtggagtcagtccttgggccgccaatttgtgacctttgcttctgagatgtcctcactgcctctcatttccccagccatttggtttcaagccccatttaccttgcttttgaaaacattcagctttgttccattttccccactcccatggccttagtgcaggatcctattgcctctatcctgggctgtaatcatggtctccaatcagcggcctcttctctaccaggccaccaccagagtgatgtttctaaaaagcacagctagccagccgtggtggctcaggcctgtaaccccagcactttgggaggctgaggtgggtggatctcttgaggtcaggagtttgaggccagcctgacaaacatggtgaaaccccatctctactaaaaatacaaaaattagctggacattgtggtaggtacctgtaatcccagctactcaggaggctgaagcaggagaatctcttgaacctatgaggcagaggttgcagtgagccaagatcatgccgctgccttccagcccaggtgacggagcaagactgcatctcgaaatagatagatagatagatagatagatagatagatagatagatagatagatagcacagctctttgtgtggctcccatctacttaaaagccttcccctggttcttcgggataaaactccattgcctggcattgaattcctccacagtttggtgcctccccctccacctggctttgagttctgcctttctattccttgtcctgcggactctcattactttatattactcagatttccctgaacacatttgctactcccattttcctgctttcacttatgctctttcccttccctgataccttgaccacttgtctgctgggcaacctactcactcgtcaagacccagttgaaatgttagctccttgacacaacccttccttctcttctcagtatggacacatcgtccgtgctgctaatttggcactccttgtctgttttgcacttgaatgtgatagccctggatcctgcaccccatctgtcttcccagctgtatttcccagggccgttactcatgtgtctttgtattgttagggcctttcatagtgcctggcatattgtaggtgctcaataattcatcgaatggttgaaccaatgagtagataaatgaatgaaagaccgggtgaattgcttctttactgactctggctgtggatgtttctgtggtggctcattgtttcttcactgattggtaatttgatagtcataagaatgctttactatgtctcaataacagacagccagtggggccaggcttcatttcagaagtccaggctgttaggaatttattctgaattgctagttaccattttgtagacagtcctccagacacccttggatccttacagtcttaaccactgccactttcataaactgtcagagtagagctacgttgcattccatgcaaataaaaaaaatataacccatttttctatatgctaacagttgatggcaagagttggtcattttgaaagcaagattggggatgttggtttagacctgtgggtggggggtccgggatatcctgtgcagggtgttggcttggccagctgggtgcttgggaagtacatcagtggacagggacaggaatgttcagacgggagccctgccctgttggacctgggttggactatttatcatgggggagggcccgtcggcttcatgcacaggtgccctggagaaagccggtggggaagatgccactgggagagggcagggcctggttatttatttatttaaattaaggccaattattttttgtcaagtgcagcgagtggtggattctgggaaaacttgctttcaccgtaaacatattggttagaagtcattaatatgacattcacacatccctaataaagtacataacacagagatctggcaccactgaaatacccagaggacattaagtatgagtcttaaaaccaagaggattggaaacaagatatttttacttctcgtttgggagtaatataattgcattttgtggctctagcagatgctggggccagctgctaggggagccttggctttttttttttccctttattccccctcctcagctttggtcccttacagataaaacccttatgcagaactctcataaaaaccaagctttaagaaattatactttggttgaaaatccatgtttctatgtgcaaaatatatctgagactgtatagactatagagagatttttattagttgaactcaggagatatttgtataaatacatatatatatataaatatatgtacacacatatatacatttgttgttttttgtttaatttgttacagtgagcactaaagacctttctccctccctgacattgagcctgtatcttgaagacagatggaggacggactgtctgagagacctatgggggactctgctttttctaagggctgctccaggggaagctgtgggaggggaggctgatctctctgggctggacccttctatggggttgagacaaagcacagcctgcagtgcatagctccttctggggagggagtgggggcagcagagagagccggggctgagaagttgaggtgaatccagcccctctgagaattgcgtagccctccctgcacagacgggagcctccccacacactggaggggacacggctcgtcacctcagaggtggaccgaggggggcagggggccctgctctccttgaagcgtgtgctatggaacagcttccttcacatgtgggacgcggagggtgcagcggggtggctgccgttggctccaggaggcatatgtgtttgcgggttcctgtgatgtctgcatctagagctggccatccagtacggcggccatgtgtggcatcaagcacctgagacacggctgagcccagctagaggggctggctgtccgtgggaaacacacagggacttagtagggaaaagagtatgagatagcttgtgactactttttaaaaaattagtaaaatcatactctcttggatatattgggttaaagtataaaatattattaaattttcttctcttttaccttttaaaatgtagcttctagaaattttaaaaatctttttatattttacttttaagttctgagatccatgtgcagaacgtgcaggtttgttacgtaggtatacatgtgccatggtggcttgctgcacccatcaacccgtcatctaggatttaagccctgcatgcattaggtattgcttctagaaattttaaaatgacacacgtgccttgtgttgtggctcaggttctatttccattggacagtgcaactctggcactcacagattggccagagctgcctcctgaatgaggggcacttagaggaacagtgctgtgtgacctctcacgtagggcccgagcctcgatggcaactggacctttgtgcatgggagcctcaggcatgggctcttgaggtgacatcctttggaagagaacttcacaatctctccttcagctctgctgtgtcagcagtcatcttcagacacaggaactgtacggggctctacagtgacagacggactgagacacacaccctccctgaagactgaaaaaccaggaagggagaaccaccacccacatagagctagcaagagaaagtctgagcagtgcagccattgctgagaacgttccagaagctgcagtgcactgtggagggagacagcaagggagactcccctgggaggggctgggcgatgaacaggacctgacaggttatgtgggcagagctggcacatgggcgctgaggcgtgaagggcaggagtcaggttggcacagcaatgcatgctcacctgccagcccccatggggcagcctctgccgtgaccctccagccctgctggctcccagctggctggctcctgacatgggctttgcagtcctctatcaaaacccatcagcttggggactggatggtgggtgaccattgcctctgggtggtggagatggatgcatggcagcacggtgtgtgaccaggcagtgacaccaggtgcagcatcgcagtccccagtcctgcccaggcctcccttcctgatgtgtcttgtttggggccttggggaagggcccacctgcctccctggtctgcaggcaccaaactgtatctgctgaacagatacagaggggcctgtctgggaccctgccagtttgttctccaaagcccctgcagcacatagacgccataccttggcggccgtttttctacttgaacgtccaaaggacaaactaaacatttaaaatctgcaagctggacagtctttgctttggagcctgcagcaaatttcttcatcttgacagtcgagtcattcttctcagcatcgatgtggtatttaggatccgggaggaggaggaagctaagggagccagggcactggggaggccgccgggcacgcacacacgtggtccttagggctcaggggctgtctgcgtgggttggatggctggaatttccttccccctaatgccacatctggctggatgttgatgcctccttcttctttttatttttattgtggtaaaagacacataacataaaatttaccatcagtggtcattagtacattcatgaggatgtgcaaccatctagctccagacattttcatcaccccagaaggaaacccgacacccatcagccataactccccatcaccctcttcccccaacccttggcaaccactaatctccatgctgtctctatgaatttgcctattctagatatttcatataaatggcaccatgcaacacagggccttccatgcctggcctcttccactcagcatcatgttttcagtgttcattcatgtagtagccggtattagaacctcattcctttctatggctgaataacatgccgttgtacgtctgtgacacattttgtttcttcattcatccatctgcagatacttggggtaggtccacctcttggctactgtgagcgatgctactgtgtgcatgtgtctgtgtttttgtttgagcacctgttttcacttcctttggccatgcttttgccccagcctcctatgaatctttcaagccagacttgtgtttgaggggctgcaagtgcaggggaaggaacatgcacgcccggagagtgaggagtcctggcctggctccgccatgaacatgctgagcttggacaagtgcttttctgttctatacctcggtttttttcctctgtcaagagagatagaccagacctgtgttttcatctgccgcctttagggtcctaggtttgtggacctctgggggaagagagagaggccagacaattgagctaaaaacctttcttttcacaactccttcccctcgtcggcgggagcatctcccgctctgtgtgttgctttttccctgcttcctatgatgttttaagcaaagggctccatggagacaaggaattttgcctatcactgaagtcgaggatcttatgagttgaactaggcttttggggtggcaataagcttgatcctgctggaaggagagaatccccctgaaggagattcagtctggactcctcctggtccactgaagggaggtggggctgggaagtgaccctgggtcagtggggagcagggagctgtcagcctgggctgggaaaagttcagttcctcactcatccaagcacactgtggctgtcccttctgaaattcagagcagtggtgcagaatgtgagccttggagccattctgcatgggtttgggttctggttctacaggtactggccatgtgaccttaggcaagtcacttaaccactctgtgcctcagtttccacacctgtaaagtggccatggttcctatttcatagtttgttatgaagattaaacgagatggtcccacataagtcctagggcagtacctccaccaccttagcattggtgacattgatggaagcaatgacacagatggtgaagtccttctccccacaatcactctgaatttggatggcttttacatggctccatgccatttagcaccaaatactttgtgtggttttcgttctttagcgaatctccccaaacgagttcctgagcttttgcagggcgggctcacctgtggtctgcccatctggtgagggggtggcctggggaagggccatgggctgggaaggctgggcaacaggggcctggcattatacgggtaactcagacatgctccacccagccaggttcatgcagcagcatgggacagtcgatggcgggtgagtccatctttggggcccagccaacctgagcacaacagagatgggagcctgggcctgtgcatcagcttcctcggaaaggcttctctcagaggggctctgtgtgggaggtgtcctggattgggagaagcaaaatttacctttggggtggaggagggagtggcgggtgatgtaggtagttcttacatcagcgtgatttcctgggacctctgcttgcttgagagaagctcattaaacatgacgtgacccctgctaagtttggccacagaggtgaccccgtaacagcacttacacacactatcatgttgacttgcctgtacccatcgctcgactgtgagctctttaactgcacgcttcaaagtggtcctgttccctttctggtatacagtagatgctcagtaagtgtttgtagagtaaacacagaaggcagtaagtagtgccaggagtttttccccttcggcgggccatagcagtaggaagccctgtcaggctggggtgagcgttggctgaaggatgcccatgaaagtcttctttggatgtccagggttttggaacaaatcacatgtttagaggttgggatccactgcacctcccatcccctgggccactaagggtcacttctctcagcatggtcctgagcaggggcatggatcagggggttccagctggcacagcctattcctctggataccagatctcctgaagttcaggtagataagctgatgcacgtgacaagtggcttagtaaatccacgtactgactccagccgcagtgtgctctggttttgtgaagccaaatgagaaccaattgacaaaccaacaactctgaacggtcattccgatgttaccattcattgtctgcaggcgtgggcacgtggtgctgtccggggtggtggaggtgacagatgatgattaatccagcagtggtggcagcctctgacctggaccattttggtacctgtgaactcatcgggctgctagacaggtggctcacaccacgtagatcttataacgattcatggtagctattgtttggggcttgtcctctgccagccagtgtatttagaatgatcattccttagaactgcctcgtgagctgatagtctcccagtttcataggaaactggtctagacagattaggtaatgtgctcaaaatgagacagctaataagaggccgtgctggtacccaaagccagggcattgtttgcttccaatgcatgtgctcttaagtgtgttactattttgccttcctacagtgacatagagttaattaaataattggcaaagttttagtcaggaactgctgcattttgctgcttttaagctcctgtgtcaactatcttcagtgacacacacacactctctcactcacgtgtgcatgcatatttacttctgccatgcacgtttttcctagccccatcccatcccatcccatcccatcccatcccatcccatcccatcccatcccatccatccggccatctgtctaacaaacacttatcaggtgcttcctatgtgcctcaggacactgttaagtccaggggatgtgtcagcgataacgtgttccttatccttctcatgctacagtgggggatgttatctgagtaaacaagcaattagaatgcagagtgataaatcctgccaactgggggaaggtgccagtgccacccaggcaagcagtagggataactgacgccatcatgaatagttagggagggccagccagaggaaggatctatctacagtgagacctcagggaaagatttttctaaggagaggaaataacacgtaaaaaggctcagggatgagagaacaatgtgctggttgatcagctgcttatttatgatttcttcagctgcagtcagtgatagaaacttgcacagtgaagcaactctatttttgctataggcttctgcttcccaggttctttgtcaggtccaggcttccggacagaggtggcttgggctctcagttcccaatcactggctgccttgtggtggccggctccatgggatgtcaggccttgatctccactcttggcctgtggtgtttggactgcatggcatcaggggcattttctactctcacctgctctgcttaccgggcttctcttccttctcaaggccaagtttagcatctctggtcactggtgtcaactccattatgtcccagctgaaagaggctgctcgcctccaggcagaggggctgctaccttcccaggagccctctaggaaccccggctgcagagagagctgaggtggaggcctcccctctgaattttcctgatagtcagggcaggagctgcgtgttgtagcatcaccaagatcaagggagacatgtactagtccagccttaatttaacttacaatccctgccaatttcatgttagcagatcctttcggaggtggaagtaatgggccatatcatgcctcgagctggagcaatgacttatgttgatgtcactcactggctttttatggaaattattaataaatcagtaattctatctgcagtgatgttgttgtgtttataaatatttaatttgccttcagatgcccacattttcctcatctttaccttaaactctgctgacgttgctcttcttttggatgtgccgctcactagatttaagttatcagtagtgggaaaggttaacttatttctccccgtttcctctctggaatatggctttatcgtgtcttttctttttaatctttgtgtgattttggctcagggggttggggatgaagctgagagaatgcgacgtctcttgtgacagagatgaaagattcgtccagcttcagaaaaggacgaaactttccaattatggtctcgcatcgtggagaattgttgttgttggcatgtgtttttccctccctaaattaatgacatttagaatctgaaatggtgtctgatgtcttcctgccacagagaaatatttttgtccttgccaccgactcatcttttgaggcccagtgctttgattactaccgtgtgacaggttgaatggaaaggccttaaaaaatcaaaatagaaacagagtccaagtcgagtatttctctagcagggatggagttccaggctcgcaaatgaaaacagcagctgggaaacagcaaaaactttcttacctctcaggatccaatgtgagctaattgttgttattatctttttattcttctgtttcaggaaattgcagcttatttaataacatttgagaaacacgaagaatggctaaccacctcccctaagacaaggtaatgtcccagatcttgcagtttttcaaatgtgtaccataagtggattgatttgcattgattacctgatttggccagtgaattcatgggcaacgagttgaaaatgccatgttgtgctggatggctttcgacactgaggtctcattcattgacataagactgtggcagtgaatacgatcagatggattaaaaagagtgcaagtgccatccgccagttggaacttttaacctgacggctgcatccttcagccgggtgcttggaaggcttcacaggcaggagcctcaggggaagtttattttgggaaattgctcgcctgccactagtgttctctagaaacgtgctttgaaaaaagagaaaccagcttaactgcccacttttatctcaacttgtctacaaactgaaagtcaagttcttgattggtggtaaagagatccccccaaatcagaagcaatggctaagctcgcagtttattatgcagtaaatgtccttgaacctgctaactgccgcaaacacttagcttctctcaccacttgggaatagagggaattagtgaaaatatagctgacctgcgttccgccagcaccagtgatgttaccatcttgtgaacggtgatgttgggacttagggttgattttaaaaggcagcctcttttggtcctccccaactctaggtttttatttttggaatgttacaatctagagcttcggaaatacatggccactctcttccaattgccgtaagttttctgttagcagtgacaggacccaggtgtttattagctggcggggtggtagctggagtgtggtttacacaggatgcctggactgcaggcttgaactgaagtggtggaatgtccagttggtttcacgttggacagaagccccagagtccccaggtttgttaggaccagggaagggttgagtgtgtcctctgtgcccgtggcccatcagcttgacctgttcatccttcctgagtcatgggaaaggtcatccttgggaatgtttattccttctagaaggtattttaaaataccacattattaggctgagatatttactggttagcatcttttaggtgagggcacaatcctcccctttgaaggaggctagagggcattgtggaaggaaggttagttattgaggctcccttccccaggtggctctgaatggttcacctctggcctgagaatgggaggagagtctgtccgcaggagtccccaaaacctcagcctgctggaaccatggtttttcctttgctataaaatcaaataatttatatcagtcagcttttgctgtgataattctgtgtaagaaacgacctgcaagcttagtgactttaaacaacaaatctttattttctgctcatgggtctgtgggctgcctgtggctttgggttgaggtcaggtctgctgtgtgcatcattttgctgtgggacctaggctgaggaagccccctctgcctgggaagttggcgtctcccagaggagggcagaggcttacaagcccaaggcagttgatgcaggtgcagttgaaactcctgctcagatgtggcatcatatgtcatgcctgctgatgaatccactggccaaagcaagtcccctggccaagcccagtaagaatggggctgggaaggacatccctccacagagtgggggcaggggtgggcggtggagaggatgggaatacagtgcactatttggtgaatacggccatgttaaactagagagcctgacatgctcatttcccctttcttctgcggcatcttcttggaggacatcattctcaaacttgagcaggcatcagaatcagctgagggctcattaaaatgcgggccccaccctagggtttctgattcagcaggtgcggtgcagggggcctgaacatgtgttatttctaacaagctcccaggcagtaggatgtggctggtctgggactgtactttgagggccactggcctagttttctgggggagaaggaggcttatctgatttctgcctctggaccatttcctgacttccaagggtggcccttatctcaagcagccgccagcctctccttgcgcccttcactctccgctgaaacactccttgaatctaagtggaaagagaagagctcctccttagccagagagggagcttctctggaatgcgtcctgggccagacatctgatttcagatacgcagacccgtgctgggtttcagccaccctttgacggcagaacagtagaacatttcaaggcagcggttttacctcgagtttcagcctttggaatttgggttacaattgagaaggggatgtcactcagggtcatgcctgactcgcatgactttctggaatatacatagagccaagagaccccaccccgaggcacagggtgtgtgcctggcagaagaaggaaggtgggtttcagatgtggtcaagtccgggtttgagtcctggctccgtcactcagtggctttgcgactgtgaaaaggtcatcttagctcctttaaaagccctggtttttcttcttcatatagaaaatggagttgctgttgatcccacccttgctgggtcacgatgaggattgaatgtggtcacgtttctgattctgcttcccatgccgtcgggtctgtccatgcacaggtgtcactgtgcctcttatctgtggggcagtccccaacctgctggatgctttgacttcgacaggcgtctgccaggatttctctgggtttggaaggacgaatttctttcctaaaggcagagggtgaagacggaaggtttcctattagtattataatatccactccatgtttacacttgaaagcttcttgtcccaggagaagcaaaacttgctgtggttgttcaaggaccttcctaaattagttgttgagttgtgtttggatccccacccccaccccatctctagtattgaaattaattggtgcagttaactgctgagttcatacaaactggcctcctggtattaaggaattaatgacaccaatactctgctgaatgagaaggcaatacaacttctgtttgctgctgccgccgccactgctaatttcattttagaaaattaataaaaatgaattgcaccactgacatttatagagtttcctaataaaatgatacattgtttgtgtggaggaatccctattaaattaattgttgtaatcagttcacatatagatgttggtatagaagctgcagaggggccccctgcttgtctctgtggcttgctgctggctgggggttataaatatagtccttgctcagatactgccctaattacagagaaggccccgggagccccagctcacctgtttaataatgaggtgtgctacacggaggctcccagggctggggaccctgggggcagccgcggtatcgcaacagagctgaatgctgaacgttcaaacagcccgtattgtactctcagcaactgggacctccggtttgaaaaatcaccctgcggaacgtgtttttttggcacttgctgtgtgctcagtgtgataataataccatttggagaccccagggaacttcatgctccccaccctgccaggtgaattgagaatcttggaaagaagagtgtcctctgtctagaatgttctcccagctcctcctgcaggccttgactgggtgtccctttctcggggaggtgtccctggccatgcagtttagtctcacccccacccccacccagccagccccctttcctcctttcttgttttacgtttctctggagcactcatcgccttctgacacactgtgtctgtcgcagttgccttgcctaatttatgtattcattacttgacccactccaaagtgttagcacgaagaggagagggatttttagtggggcttgttcatggggcacccccagctcctagaacagtgtggacacctcccagaccctcaagaaatatccataaaatgaacaaaagtgacatagaaaggtgagcctgagtgttgtgaaggaagggacctggttttctccacttcagtttttcgggtatttctagtcccaggattgtccggttgagccagcactgtgttctctcacaccgcccatgggctggatgctgtgctttgaaacccttctggcagctctgccaggtatggaaggtacgtgccctcctgggactgcatggtgagtccgtgctagaactggaacttgaacccagtatgatctcactgcaaagcccataccctttgcttttgtgcctgtgaaggttcccagggagcccgtcaatagctcctctattcctctccgcctctcactgccgtgaattccaaaccaactaggagaaccaggctccaggcaaaggttccctttgtcagtaagcgtggctcatacgtgccagccagaagggtgttctacactgccctctgaattggagttagccccccagtcacaggcagtgtggaagagtggcacaccactgcaggggagcaggtccctttcaccagagggcagggaaccgggctgagcccaggacaggcagacagctgcaaaactgagcaatcccaatcatttattcctgctcccctgggaaatacgcaaccttccctggaagccaggaacacacaaagctcaagattgaagtaagagcatgtccttcccaggaatcctgtttatacccgttagaaagaggctggaaaaggctgttgattatctaattaattaattagattgatatagatagcacctccacatggaagcactaagggtctcataatagaattttcctatgatgaacactaaatgccttttggtcaataagcaataaaacagcccagtagaaggagggggtctagaaggaaaggaggagaaaagtgagccctgagtttcaaaaagactccagtggctcagagagagcttccactctcctcctcctggtttcctgaccccatccgtccattccggcttcaaatgcccagatctttccccgccctgatggtggtggacatcaaactgtgatcctctgctctttcttcccacattctcccttgtggggctcccaggactccccgacaccatggtctcaccgtcaagtctctgtggatcattccccacatccgactctgtctccccggcacctgcatgacgtattatgatctccagctcgccatcttctcccctccttccctgactcccactctgctttccatcttctgacttccctggttctagaagagccacctcgtttgtggagatgccagagcatacaacttggactccaggtggctcctttttctcctttgtcccctgcatctcattagccaccaactccgtcagtgtttccgactgtaattcacatcctcattttcgtatgttttcccccaggttcagctgtgtcctcactgccactgttacgcttggagtattgaaatatctcctactaggtttccttctctaagtcgaactcctcctccccattggtttgcctgaaatattgctttgattccatcgttattctacttgggagcctcagatacttcctgggagctgaggttgactctccagtgatgtcgttaaggccattcttctgtctcaacccacccttttccgtttattttccttgacatcccacctctaggtactgctacaactggggagctgctggctgctctctgaatatctttcttgtcccccactttggccttcacttggcattgccctcacctcgaatgccctcatgtccaatctggtctgcctcttcctgggagccttccccaaactcaccaactcagggcgagccctcttcccttcctgctcccgtagctgcacgtgctttgttgtcggttgtttgccaattcagctgtcatgagtgagtctttcttccccagtggggtggcgggttccccaaggacaaggtcatgctgtcccttttatctcttcacagcctgtgtgcagggaggccagggctttgatggggtggagttgggggcggacagagtgtggatgcattgcacagcagcaagtttgcccaggaggcaggagtgccagtgcctgccatccatggggttctttgtcctagacagcccttggggtcccggcatggtgccagcctatgagctgaggcctctgcctagaaagtcagtgttatcaggccccaggctggtcctggtgcagtggggtttgtctttgttcagccccattgtaagacccctggcagtgacctgttggtcacctttaaggcatctgctctttgggacagacagaggacttttctaaggaagcccctattcctggtaaggctgctcgagtgactggaatagaattgcaaaaaccatttaaaaattcccagagctgaaaagaaatgcaattctgacacctgctgcaacctggatgaagcttgaagacgttatactcagtgaaataagccagacgcaaagagccacacattgtgtgatgtgctgactgagggatctagaatagtcagctctggagatggaaagtagatggtggtttccaagggctggggtggagggagggagaaatggggagttagtgtttaatgggtacagcgtttcagctggggaagatgggtggcagtgatgatggtggcagagcaatgtgaatgtgcttaatgccactgaacttacacttaaaaatggtgaaagtggtacattttatgttacctatattttactacaattaaaaaaaaattcctggagttgcctctgtagctcttcctcaggtattcagctgggcaggattggctggggtggacgaattgtgtgtgtgtgtgtgtgtgtgcacgtgcgcgtgcgtgcgcatgcgtgtgtgtgcatgtgcagggggtgctgttggtggccagagttcggaagggcagttttagatttagagcattttaggactctgcactttggaactatgcaggaaaaaggaaactgggtcagcagtggtttccacgtggtaacctttgcattatgcactgaaccgggaacgcacttcaaattaacacagagacgtgtcacgttaggtgcgtgtcagcatttttgtaatgtatcacaaatccttggccaaggccattgttggccaaagggcaactgcagggtgagggagttggcgggtgccacatctgtcagagttcccagggagcctcctgcccgaggacttcctcgcagggtacctgtcacgtagttttcatttgtttccgggggtggggaatgagctgtggcctgtatcctgatggagtgtctggcggtgtctcgacagtggtagggaagtccccagtctctgcatggaaataggtctgccccagattccagttatctttatcctagttaatcccagaataccacatgtcaaagcaggggcaacccacggaggccactcctcacatcccctccgtgtctaggaagttggccgtggcgggggcactgatggcctggtggggtattgtcacatacactgggctcctgatcagaggacatgtgagcctcatgtgacttcagtgggcttagccacctgttgaaatggcagcaccagtccagggctcatgtccctggcacaagagctgagggttggcctccatcccacccctcctcacttcttggggccaggagtgcaagttcccggtgtcctggaggagccaagagggaagtgttgatgtttgtgtctctgattcctccctgggttagacagctacgacctgtggctcctgcccaccccgccacccccatgctttttaaaaaaattttgatatggagtctcgccatcagccaggctggagtgcaatcgtgtgatctcggctcactgcaacctccacctcccaggttcaagtggttctcctgcctctcagcctcctgagtagctgggattacaggtgcctgccaccactcctggctaatttttgtatttttagtagagatggggtttcaccctgttggccaggctgctctcgaactcatggcctcaagtgatctgcccgcctcggcctcccaaagtgctgggattacaggcatgagtcagtgcgtccggccctcccttcttttatttttataaaaattatacgtgtacatagtttagtatgtcaaatggccctaaaaaacttgtaagaaaagatagcagcctctgcagtacagctcaatcctgtttcccaggggcggctgctctctggtcttttggttctgatatttacctccagatttctaaatatgttgactctgctgtttcttgatttgtcaattttagacatcatcttccggcttcctcagatgctaactgaggatttagctttcttactgtgtccactgcctggctcttccttacctgggggaggggctggttaatggagggagccagctttctgttggtaactctgaggttcagcatctctacattttttctctggaaccatccgggttctcctgagaaggactggtcgatgtgctgcctagtttgagctggcctggctgctggtggtctgggagccaagcagggcgaggggctgggaatgtcagcattgggtatgagagctatcacttaattctcccagtttatagcctgtgtttcttgcctctcttctgctgtttccgagttcggagtctttccagactccacctcttcagagaatcaatgtgtctcccgctggggcagaggccagggggtggttgcctgtctgctcagtgtagacgtgggaccccgggagggtctattgccccctatacagatgtgtgagctccctctgcttcccaccccattcctaacttctgccttccgtggcacctactgcttccaattcacgagtcttctaggggcttggcaggcgggttagcgtgttgttcctggggtcccctgcacggcacttgggtttttgcttcctagattcagctgtgtcagttaccaaccctgcatctgcttcccgtctctccggaatgtgttggcgtctcttatccacactcgtctctgttcccctttggcttttcctttgtggatttatattagttttcattcctttactgtcactggtgaagatgagcgatgcttagtcctccctgtgagccctgtttcttcctcactggcctttgcccagagtcgtgccgagtgggacccactccccttgttttctcattcttcctctctctcctcttcgtttcctgctcactctcaagttaacttgctgtttcactctcttgcttttttctctttttccaagtctttttcagtctgcagaaagaaatgcctcaaagtgcagtttggaggtttctaagtgcgcagctgctcagggctgggaaatcctgctgctgacatgcacacatgcttcttgtgtgtgaggccccaggtgcgcagcccgacccacaccaagccccggcgctggcctcctgtccaccttcttaatgcaccattcttagtttagagcctttcctggcattggcacaggggcgtggtgtggcctctccctgagcagaatttcagggatcttggggacggccagggccatccactatgctgtgcatgtcccctaacagtgggatctcgatggcttttatttttacatggttctgcatgtgtcttctttggattttactgggacaaaagccttcgcggcagaggcttcgtgccagggtgcctgtgatgcacgttggggtgctctgacaccccaacaggagactgcccgcccagggtgacccttgccagcatctctaagcaggacacctggcagtgaatacttccgagaatggaaaagccccctggcactgtgcccacactgatcgataagtatttgcatgccctgtccgtgtccatcgatggtcattttgttttgtttctggcgccccgcaggccccgcagtttattcttagcatcttcagccctgtctccttggtttggagaattaggactgcctggtatttctgtcacgggcgtggattggcatctgtggtgtttcctctggatcaattctgatctaataaattgttactcgctgcccatggaaagggaaagggagttggcctgcgggccttgtggcattatgagataggaaggcgagttcttggaataaaggactttttgcaattcataagtttctgtgtaatgagtaatcaccagatcatctgggggttctgggctggagattctccccctgtgctgtttggctaggaggtattactgtctttgctattcttagattttccacagtccttcattatggagctttctaaaaaaattaaaaataaaccaaaaacaaaggaaggaaatcttttctggttctccaactctgctgcatatcccactttcacttgagcttttgctttgcgttgtgtgtgtgagcttacacacatgtatgcacatacacacacagcacacatgtagacacatatgtgcgtgctgtggcacatagaaccatacacgtgcacatagatacacaactacacatgtacacatgacacatatgcatgaacaaatttgtaacacacaatacatgtgtgcacacagcacaaacacatatacacatgtacacatgtaggcacatacacacatatgcatgtgcccaggcaatacagacacggagcatatacatgcacatatacacacaactacacacatgtacacacaacacacatgcacaagcaaatattcaacacataatgcatgcatgcagcacagaaatacacatacatatacatacatgtacacacatgcataaatacacaacacacacacacacacacacacacacacacacacacacacacacacagcttcctgtattggtcactgttctcttgtaagaagtctctgggaaaatttttcttcgttatgtgtcttagcgagttgaaattttttgggtagaggaaattttctcctcgaagaaaaaattaattattctatactggctactcctgacctcacctggcagggaatttattgttaattaagctgtttagtttgaggtgactctggtggggaagagggagcgagagtccaggacggggcagccacgtccgggaggggagggtcctgctctgctgaggacaggggagctcactgaagcattggtggctggcgttgtgacttcccatcactctctccaccgggatgatctgtaggaattcaggatctgagttttttattttggcctttacctgcgatggaattgaatttgcatgtagaatggcagctggtgcctaggccgagggatcagagaagtcagcccactgtcaggtctggagaacgacgtctaggcaggtgatgaaattatggaaagaacaaatgtatgcgcaaggatggaggagggaaaacagatgagacacttttgcttctccccaggagcacagcctgcaccgtgaaatgtgctatttccacatattttcacactgaaaatccacggcccttccacctccagtgtcatgggctcgctctaattaattcagttcaccagtgttgggcgatgctgcccttctgatgctgggggttgaccgtgctctgtttggggaatgggtgtcatcttctccctgggttatgagcgagcccttttattcctgagctgcgtgacaccgaactgtcaccttctttagttgttggttggcacccactcttctctttactcggtgaataccttccgactgcttcctgtgtgccaggcattgtgctgggcattgggacatagtggtggtgaccaagacagatcatttataagaattgcaactttggggagtgctacaagggtcaagtgcagggagaggctgcccctctagtgcatggggtgggggaggttgggctgccttccagaggggctgcggggtgcagtgggggttcccagcggggtggggggtacccttgaacagggtacctacctgagtagctattattaacacccttgcctggttgccctagggatggacaatgaactggaagtccaagggtgaaagtagaaagaacccgggagtgctcacatgccaatgtagattccattttacggatgggaggactgaggcaccgtctgtctgagaggcacatatacacacaactacacacatgcacacacaacacacacatatatacacaactacacacgtacacacaactacacacgcacacacacagcacacacacctacacacactacacacatgcacacacaactacacacatgtacacaacacacactacacacgtacacacaacacagatacacactacacacgtacacacaacacacaactacacacatgtacacactacacacatacacacaacacaactacacacatgtacacacaacacacatgtacacaactacacacacgcacacacaactacacacacgcacacacaacacaacacatgtacacgcaactacacacatgcacacaacagatacaactacacatatgtatacatgacacacatgtacacaccacacatgtacacacaatacattacacacatgcacacacaacacacataactacacgtacatacaacgcacatatacatacaactacacacatgcacacacaactacacacatgtacacacaacacacatacacacacacacaactacacacatgtacacacaacacacaactacacgcgcactcacacatacacacaactacacacatacagcacacacgtacatacaactacacacacgcacacacaacacacaagtacacacatgaacacaacacactacacacatgtacacactacatatgcatacaacacacacaactacacagatgtacacactacacagatgtacacacaacacacatacacaactacacacatgtacacacaacacacataactacacacgtacacacaacacacatatgcatacaactacacacatatacacacaacacacatgcacacacaactacacacatgtacacacaacacaactacacacgtgtacacacaacacacatacacacaactacatacatgcacacaaaacaaatattcaacacaatgcatgcatgcagcacagaaacacacacatatacatacatgtacacacatgcataaatactcaatacacatacacacacacacacacacacacagcttcctgtgttggtcactgttctcttgtaagaagtctctgggaaaatttttgacttatccttgtcctgttagctgctgtcagcaaagacgccgtggagtctgaccttctgagtgtggagagccagaggagctctgggggaactggatccccagaggctccaagcaccaagctttggttccccttgaatgccagctgctcagatttggctgatgtcagacccacctgtcccagtgtcccctagcactgtgctccttttaaactttctcccactcccatctctgtgtgctcagcccctccccttccaatcagactgtcaactgaggcttcaggagagaaagtggtctccagggacaaggggtcgtgctggctgtggcagcttcacatcacgggcccatttacatgtgagaaaactgttattgatgatgatgatggtgacggataatggagagactgcatggggggaattattcttagatataattgccaaactttgaattcttttttagctgtgatacagaattccaaggtgagaaaaaaaatctctcccttcactttatgagtaagtgatttggttctgctccttctagaaaaattccagccttaaccccatctatcccatcagtgtgtgtctgggaatatctctagttacgccatttctctggtgcttaatttctttacccagtgccagagggtctgcaaggatatgtatgagttttgcagtttattaattttgcattaaataattaatagtaaagttaattgatgaattattcaattttcaggtaaaatgggatgataaatattcataacttattttattaagggaatttccatttcttatgtcattaaatctagattaacaaaggctgattttaaatgaagattgaaaacaattgtgttttggaattaatttaccaagttaaggtcattgctttgtgagtttaccccctgccagaaagttcgggcttatcatctggaaaggtatctgaattcgcagaagtcacattgccatcagttaggagaattccccagatctgctgggaacttcccatgaagggcatgacaggcccacggtggggtggctcggaggcagaggcggatctgcggccttttcctccgttccactgagcactgggctgttgctttgagctgtttgttgtcttctcaggaattggaacacagtttattattaacattagttcatacatcccagggaaggaatgataaggtgcatatgcctcaaagttgattttaaaataactttggggccagacacaatggctcacacctgtaatctcagcactttgggagactgaagtgggcagatcacttgagcccaggagtttgagaccagcctgggtaatatagtgagaccaccgtctctacaaaaatacaaaaattagctgggcatggtggtgcacctgtggtcccagctactcgagaggctgaagtgggaggatcacctgagcccaggaggttaaggctgcagtgagccgagatcacgcaccgtactccagcctgggtgacagagtgagaccatgtctcaaaaaaaaaaaagggtttccccagagttttaggaggtgtatgaaatgatttcctatccactaatgctcttagtcaagggttaactacagtttcagtttttatctgtgttttctagttatcttatttcttttagacctggtttatgttaatttgtaaaactgcttagatcacagacccacagagtggtggtgagaagtttctgagtatcttacaggctgcttacaacttgcaaaacccttcagatctgggatctcaatccttttaacaacctgcaaagtaggtaatgcctggggatacactgagggagggaggaagggagagagagagagagagaaagaaagaaggagaagaaggaggaggaggaggagacgaaagaggaggatgaggaggaaatagaggaagaagagggagcaaaagagagggagggagatggagggagaaagaaagatccagagtaagccacatctcacattcagttttctttctcctgtccggccacttccctccactcacggatgaggaaactgagacccagaaattatgtgacttacccaaggtcacttcagctaattaggtacagaagttgggaccagagcccagctctttctttttcacatttgagtgcttttttcaacttcggtgtctttcttagcgctttaaaataatttttaaccgcccccgagtagtggagcgcttgggagtatttatagccccgtggaaccgcgtttctctgcttcaccaagtgttcattataattttccagtgaaacttgtttgctctgaggaagttgatcctacggtaggccttcatttcagaggagagcatttgatgttgcatctcatgaacctgctctcctaaaattatccctaattggcttggaaagtggcttccaacaagcagatggcttaatatcttgactttctggtgtgactcagggaggcaccaggattagatctggcttgagatagtggtcttgttatttggaggatgagatgctatcagtaatgtgcagactggagtggcagcctctggggagatgtcgtggaaaccgccagggacagctcgtgtcatcagggatgtcagatggcaggtggggtggggagagggggcctcgaaatgcaattccataatgtctagcgttagtcaacaagccattattgagtgcctgctgcgtgcataggtttgtagtaggcactgtggggttacaaaggcagtggaaaacatggcccctgatctaattggaaagacaagtcacacatatctgagataactagagagaagttcccagacggcacacgcaggagagcctggtgtgtgtgcatgtgtatgtgtgtgtgcatgtgtgtgtgtgtgtgtgtgtgtgcgcgcccacacacacagctgtgggaggaatgcaaaatggggccaagatcaattggattcaattgatttcgttgggaaaaacagcacagcagcatttgtacgggtgaatttcaatcagaaaaccgtgaactttggtggggaacggcatgccctgatagggtcgggagagacaatgcttgggcttttctcattcttaagccacacagagagcagattaattggtggcgttgacataaatgatgagaagactctggaggccatggaatgcaagaagatgggacaaaagccgagaatccctgcaggagccacctcccggaggggcgggtgctgctgggatgccttttttgtgcacgctctgtgggagcctggccggggctcagccaggcagagctgtctctcccagatctgctccctgagctgcagggctgtcctccagggcacagcctagcccccatttagtgagtgtctagatgggcactgcgaggctagagggcctttccaagcagggactccagcccatgtctgtctgttgaaagcctgtttgtcccactgcacccatcaagctaatgggaccataaatggaagtgtttacaaggtcaccctgatgggtcactggaatcatctgcctgctgacttcttcctacacttgagaagggtgcctctcaaccagagacacaaccaccccctcgctcagtccccatgggacatttgacaatgtctggagacatttttggtggtcaccatgggaggggccaagctgctggcatctggggtagaggctgttgatgctggaaaccgtcctatggtgcacaggacagagccctgcatgagggagttagcgagccccaaatattgatggcaagaattcagtgaagataattcctaccgaagcgcttggtggtcaagagccgggctctgtatatgaagcccagctcttccatttagtagcagaaaattaccttctcaccgtgcctcagttttcgcatctgtataatgggagtaatgatagtacatattgttgtgaggagtacatgagtgaagcgtgttaagaacttagggcttagtgtcattggtgtattcatgatgatgatctccccaggaatctgttccaaaccgcagacccagatggccctgggctctgtacgcacacagcccagttcttcctcacttctgcttttgtggttgtgcagaaggacggcctgaactctcacatcatcctcgactaccagaaacgattcaacaatccttggggtgaaaaaggttcagagaggaaataggggagaaaactcaaagagtccacatcacagcattcaagaaagaagagcattttaaataggagatggtggttaagagagtcaaatgctgcatgggaagccaagctaagagcccaaacttatttatttattcatccaacaaatatttattgacaatcgtattagttacctattgcgctaattttatagttacctaattgcctcaaaacttagtggcttaaaataacacttatgtatcattttgccctgtctgtcagtcaggaatccaggacaacttagccaggtctcaaggtttctctcggggctgcagtcaaagtgttgctggggctgcagcctcagttgaacactcgactgaggcaggatccactcccaagctcactcatgcattgtgggaggattcagttccttgtgggctgttgagctgagggctgaactcctttctagctgttggccagaggctgccctcagttcctgccacatgggcctctccaacagggcagcttgctttatcagagtgagttagcaagagactacgagagggtgagcaagacaaaagccagagtctttttgaaaataaatctcacaagtgacatcctttcattttgctgccatctgtttcttagaagtgagacattaagtccagctcctgtcaaggggagctgacccaaaagggtgtggcttccaggagcaggagtcattgggggctccctcagatgctgctgccgcactatgcattacacgaaagcactgataagaggggcaaagtgtaggaagaacaggccacaaactgggagttcatcatggcatcaatacgcactctctgggtggcactgggcaaagcattcttgcctttctggggctcagtttccttctccttacaatggctgaattggattcagggatggtgaatatgcatgatccattgatgcccagagcagacatcactacccatggtacaatcttctgtgagctgggtgcaccctcagaatccctcctaacacagctctcgtttcagacagacacgactcattgatcagagatagcacttgtgttgaaatccatctgccatccctgtgcaatctgcaaagagacattctgtgcttatggctccacagaccaccgatcaagatgtcacagtaaaaacgggcagatgaatcgtcctcccattggcctgagtgagaaagctgactccttagtgtttgaggactgggggtccttgttctgtacctcagcactttccttcccagaaagtacccagtgtctagatgggatgattcagaggggacgctgctgaggagcactcggggtctgaagcccatcgtgggattagcttgacctgatggggtgggcttagccccacatcttctgtttggtttcttatgggggcagatttggcctcagtggctctgctgcctatggtgagccgggaagtgagcatgggtctttctggaaatgagcccgaggtggcctgaggtgtttctgcattcaatttatctgagtttcaagtgattcatcctgttccttcctggatcgtgttcctgggctccaggtgatggcttaatttgcttctgaaatctggatcccacccattcactctcttccagtagctgctgggggcatcctgttaacaagaagcacagcacattttctgggccatgtaaccctttatcccaacccattagaattttcagcaccccccttcccccctttttttttaagtttcttttcctgaagggctagaatgttctgaggcagcttaatagacatcgatttgcaatgatttttagccactgtgcttcaggagagttgaggagctgatgattaatcctcgcaacagctcttcccttttgttttaaaatgacctaatagctgaattgcccgagcaggccgggccagtctgacccagttcagctccttgccttctgctgcttcatttaaatgaatctgcgatgaattattcagccctgctacgggggagagtgagtgctcctcctgtaatatttaatcagcaacctgggaggacagcgtcatctttacagacagctgctgctcacttagaggcagatgaatgagtgttcttagaagctgggtcggattcctgccttttcaaggaaggtggcttgtcctctgatctcagagggatggcgctgctcctcgggttcacccgtgatccctttggtcggtcctctttctatgtcagcagaaagcagcccccagggcctcccagtttagggactctgtgcgacctcgattcccaaatgtgcccccttaactgtagtgtcctctcctctatgtaacaaaccactgagaacttaattgcttaaaatgactggaacgcattgtcttacagttctgtatgttagacgtgtgacccaggtctcactgagctgaaattaaggtgtcagaagggctgcgctccttctggaagctctgggaggagaatccatctcttcacctcttccagcggctagaggccgcctgcattctttggctctgggtcccttcccccatcttgagagccagccacggagcatctctctggctctctttctctgacctcctctcctgagtcccccttctacttctaatgaccttgtgattacattgagcccagctgggtaatctgaaatcatctccccatctcaagatcagctgattagcagtcttaattcaacttgccaacttacttcccctttaccacataatctaacatagccacaggtttcggggattaggacatggacatctggggagaggggtacatgattctgccctcccatacctaccattgccctggcttcatcatccctggttttatagaaatttctattgagaagaaaacctctgagaaccttcctgagcacgctgtctaatccaatattaagagcatgggctctggggacagacaggcttgcacccatcttaactctgccatctgtgagttcagagaatggtgttggacacatgacggctgatgaacagtggacaggttgcttcacctctcggagctcctgtaaaatgggtttatggctggttggggtggttcacacctgtaatcccagcactttgggaggatgaggtgggcagatcacgaggtcaggagatcaagaccatcctggctaacacggtgaaaccacatctctactaaaaatacaaaaaattagccaggcgtggtggcacatgcctgtagtcccagctactcaggaggctgaagcaggagaatcacttgaacccgggaggtgcaggttgcagtaagctgagattgcattactgcactccagcctgggcgaccgggcaagactccatctccaaaaaaaaaaaaaaaaaaaaaaaaaaaccgaagactgaactcccagggctgctgtaagatgaactgagctactgtgtggaaagggagtggctctaggaagcagcctatgagtggccaccgtcactatggctgtcacgtatctctgtttctgagtgtatgggtctctctctgtccagaagggggtgttggtatcttattaaccccttatctggagcctttgtaggggaggctgtgtgggtcgccggtgcatttgtccagtggcacgtgcatttgttgcaggaccgctgcgtagagctgctggctgctgggctgtcctctttggtcacctctcacattgggcttccttcaaacccattctcttacttttaggacattggactgtatgacccttagagacatggatggacttttttctttgtatccctcacaattcctgtgggtaattttaataacacccatatttccattagttttccttgattcctcaaagagcttggccattccaccatgtttttcttcactataagtggttaagattgagatgattttccccattttacagacagaggatgaagcactaaatgagctgcccaaggttccatggctgaccatggccgagccgaacaccagccccagatctgactccagatggaacgctcttcccttaagggtctagctccccactctgacagacacccagcggatgttggctactttggataagccttgaggcctcctccctcccgctgtgtgtccctctccctttgtaggagcacattctggggccagcagcctcccgctcagacttgccattgaacacaagggcagggttacagttacacgctgctgaattgtcccttctggcttgtgtgtctcaggggccctgggtctcccaggccctctgtctgcctctctgacatcaaagatcaggaggtggtgctttgatcccacgggccatttgtttgtttcttccactttccagatctcacttccttgcgcggaggtggggctgctttgggctcaggcttcttgctttttggggctgccctgttgaatgcgttgatgcattttctcatgctgcttccttcaccccattggtggaaacctttcccggcagcctcacgtctgcttttcaggtactctggttccatctcttccggcctttgcatgtggggctctcagtttaccctcagaaagtgtggcatcagcacgagaagcagcaactttctgaaatgcaatgtgtgcagataaattattcagtgaaacccagtctaactttattaaggccagaatcatccttttctgtcagaagccacagacagaggctggatcaacaagaggccccaggacctagacagcaccctggggccagaggatcgtggttggccgtgggctggtcactgccatgtgggcttgggttggccttcccgtatgtttgcttggccacgtgcctgtgtggccattctgaccaagtggggtggacggcagagacactcaggtggagaagccagatgcggcccccttggagaggggtcatctttacttgattcccttggtctggagagaaggatctaggggccagagtggctcccggtcagtgtctaggaatggagagggaggaaggagggtctcgggcaagacctcccccaacaggcagaccagggcagtgcctatttattcatggcatttcacatcataagagagttaaagagtttgtggcattttaaatgctttatagattaatttatattctaacatggtaatgaggaagcggcttttgtccaagaggtgagatatgcaaaaataacctttaagtttcccataattaacctttaatgatattctctcactttagcaatatattttgtgcttcaaaaatgtaacagatagaaaggagtgagtgcttcttgcatccaagtgcctggcagaaatgaagtcactttggtgagtgaggttttacttctccgtcctttggtccaaggctactgggagggtcagatggtgaaatacacacaggaaaccttggctttgtggccgtattggtctttctttacatcatcggcaagccactgtttcggattcttcagggctggccttccctcttcacagcccctcccaccactgctgtaacccacgagcctgctgcacgcagggcccaccccccatcctctctccttggactttggtgagatttgaccttgtaggttcattgaccttttgtcaaagtcctcttctgttgattctgcagagcacctaacatgtgccaaggccctgagctgctgccctcagagttatgtctagtgggggcctcagacacccagacccagtggcagcagtgggagggaaggcaccactgctgtgacccagggtaccctgtattagtcagggttctctggagaaacagaaccaacgtgtgcctctgtgtgtgtgtgtatgtgtgtgtgtacatacatatacatagaccacgggtgtccaatcttttggcttccctgggccacactggaagaagaagaactgtcttgggccacacataaaatagtctaacactagttgataagccagaaaaaacaaaaaaaagagaatcacaaaaaaactcataatgttttaagaaagtttatgaatttgtgttgggctgcattcaaagccgtcctgggctgcatgtggcctgtgggctgtgggttggacaagcttgacataggcaaagagattttttataagaaattggctcctgtgattatggaggccaaataatcccaaaatctgcagtcagcaaggtggagacccaggagagctgatggtggtgttccagtgtgagtccaaaaacctgagacccaggagagctgatggtggtgttccagtctgagtccgaaaacctgagacccaggagagctgatggtggtgttccagtgtgagtccgaaaacctgagacccaggagagctgatggtggtgttccagtgtgagtccgaaaacctgagacccaggagagctgatggtggtgttccagtgtgagtccgaaaacctgagacccaggagagctgatggtggtgttccagtgtgagtccgaaaacctgagacccaggagagctgatggtggtgttccagtgtgagtccgaaaacctgagacccaggagagctgatggtggtgttccagtgtgagtccgaaaacctgagacccaggagagctgatggtggtgttccagtgtgagtccgaaaacctgagacccaggagagctgatggtggtgttccagtgtgagtccgaaaacctgagacccaggagagctgatggtggtgttccagtgtgagtccgaaaacctgagacccaggagagctgatggtggtgttccagtgtgagtccgaaaacctgagacccaggagagctgatggtggtgttccagtgtgagtccgaaaacctgagacccaggagagctgatggtggtgttccagtgtgagtccgaaaacctgagacccaggagagctgatggtggtgttccagtgtgagtccgaaaacctgagacccaggagagctgatggtggtgttccagtgtgagtccgaaaacctgagacccaggagagctgatggtggtgttccagtgtgagtccgaaaacctgagacccaggagagctgatggtggtgttccagtgtgagtccgaaaaatctaagaaccaggagagctgatgatgttgttccagtctgaatctgaaagcctgagacccaggagagctgatgatgttgttccagtctgaatctgaaagcctgagacccaggagagctgatgatgttgttccagtctgaatctgaaagcctgagacccaggagagctgatggtgttgttccagtctgaaaaccagcaggcttgagacccagaaagagtcaagtttagtctgacttcagaggccagaaaagactcacgtccccatgcaaggcagtcaagcaggagggcatcttctcactcatgggaggggcagcttttgcttttatttgttctattcaggtctccagctgattggatgggcacatgaggagggcaaccttctttactcactctgctgattcaaatgttaatctcatttagaagcaccctcatccacacatccagaatcatgtttggccaatatccaaatacttcgtggcccagttagattgacacataacattttacccctcacataagatgacccctcatgtaacatcaaccctcatgccctcctgagtctgcaagcctctctccttattaactttatgggttttccctgtctttcctccttgccttctaccccatgccttcaaccaccatctcttgacgggtaacctccagttcttcaccactgactcagctaggttgagtcattaatcagttaattttaaaaaatcacttaaagtagggaattgtacttgtaggtacataagttaaaaatttaacttaaaacctataagtgagtatggacttaccaatctttcgaggcagggcaaggttttcttggttttccttagtgtggcctgctgtttgtgggtgagttctgtctcttttcacagatcaccttgtaagaccttgcctacaacttctcatttagatttcttcaacatggaggggcaacttatggacacactggtgaagcaatcagagaatagaatccttctagagttttatgaaccatcccccccaatattttacagctgaatccacccactttaatttcatagcattccttaagcaactcactttgagtcttgctaagtatttgacttagttttcttttctttctttcttttttttttttttatggagtctctctctgtctcccaggctggagtgcagtggcacgatctcggctcactgcaagctccgccttccgggttcacgccattcttctgcctcagcctcccgagtagctgggactacaggcgcctgccaccacgcctggctaatttttttttttgtatttttagtagagacggggtttcaccgtgttagccaggatggtctcgatctcctgacctcgtgatccacccgcctcggcctcccaaagtgctgggattacaggcttgagccactgcgcccggccaacttagttttcatagaaataactacttttttttttgacagagttttgctcttgttgcccaggctggagtgcagtggcacagtctcggctcactgcatcctccacctcccaggttcaagtgatctcctcctgcctcagcctcccaagtagctgggattacaggcgcccgccaccatacccagctaatttttgtatttttagtacagatggggtttcgccatgttggccaggctggtcttgaactcctgacctcaggtgatccgcccgcctcagcctcccaaagtgccgggattacaggtgtgagccaccacacctggcctatctttctttttatactcacatttcactattttctatattttttatgtaattacaataaagagtacagccagcacagcacgtttggggataaacagagctgattctcagtacacatagaactcaattgatgaagcaagaagtgcatggcagcctggagagtaatgagcacctgtggcccgtgtgctggtgaatgctcagtggtggggagaagggttgctatgtcctagcacttaccagtttccatggggtaaccactcctgccatggatgacttccagttaccagtgattaaataacctaactggctcaaaaccctgaacgtttaataactggctcccccctagtgggcacgggtgactctagcacaccactgcctactgccttccagtgttgagcagaggacggcctctggcgctggcttatgcaactccttaaagaccagttaagggagtgtctaaaaatcagcatatctcagccataattggtcttcactcagccaccagctcctcctcctttgtgtttctaattcctgctccctggggatggcggactctctcgcttcttccagccaattcccgttctgctgtggtcatcctgctgtccctaccaggcctgcccactcaggcagcccttttaactctcctggctttttattcttcctacagaactcctctgttctgtgtcccagccctttcgggacccactaggcttttggctgactaatttaatcagcattttcagccgaggtgttggcttacaaaggcttcattacctccaagcctggaggacaggctgactcatgtgggcggtttgggtctcagagcatccgtcgctcaaatcctcatgcctgtggttgtctctattgatgggtacagccagctctgattgctgggaaaatagtttctagatccagccactgttcttcttgtcacctgagggcattgcctgatggagggactctagagttgggagtacaggagtggcaggggtcagagtgggactgcagattcttggcatccttttttttttttttttttttgagacagggtcttgctctgccacccaggctggagtgcagtggtgcagtcttggctcactgcaacctcgatctcctgggctcaagtgagtctctcacttcagcctcctgagtagctgggaccacaggagtacatcaccatgcctggctaattaaaaaaaaaatttttttttggagagttggggtcttcatgtgttccccaggctgttggcatcccacaagagtgggatggctgttggctagtaccattctgacgcacagcagagaagtttgtctgagctttgatgcttttgattctactcaaaaggtggtttttggagtcagaaatgtttatgactgtgtctctacacatcgtttgaaattttttattgttaaaaaatgtgtgtcccggtgcgctagatgaatagcagcctgtttgcttttgcaaacatacactccacaccctgagtggggaatatggtttggtggcaccagaaccatttgtgtgtcagggactgaggcaggagaccttgatggaagggagggaaacacaacgggaaccttgccattgagaggctccgaatacaaacccatttgtataacaagctgtgtttgtcagaagacgagctgacttcagaagctgatttttatgctgaagagtagcgtgcggcatgtgtaatgaacagagtttatctttgtgtgggatgagaaataatttgctaagccagtaactcctgtatttcccggatacccgtgcagttcacatgcagcctggggtctggagagcaggaatcgccttaattcacagagctctccaaggacccctgatgtcagttcagatttcagaaattaaaggattaaatgctttctgtgttctctgaagacttgctagcacttgatctgtttcattaaaacgactcctttggtgcagtctctccccaaaaccaatcaagagccactgcggcactgctgaaaccccacctttctgtccagctgttgtctaagcccgaacccagatgaacaccagtgcagagggtgttggagaatcctcaagaggtcaacatgagtattgtattaaacatgagagacacaaaccacagggctcctaacctccccatacccctcctcttgccgaaactaatataatccctggaaaggacagcagtgaacagcggggggcatcatttttatttctgtcctgccaaatcggagttctggatagttaacatggaagaacccctgagccgaaaacatacagaagaatgcttgttattggcaagaaatcctgttgttattaagttactctgcgatctctcttctgggctaattggtgggtagagtgggcaggatgaggaagagggcttaggagaggcctcttgatgccagactagacaagactgaatttctacctttggagaatcagggcatctgatataacaatacaacagtaacaaaggattcagctgctgttaatgggagacttccttgcagactttctcacctggggtttcataagagaattaagccgtacagaaaatgatgtgcgtggccttttctcagtccttctgaggatggtgcatagctagtaccattctgatgcacagcagagaagttagtttgtcaccatggatacctgtgggccaagttagggctgaactcccccaaggaaccctcatgagaacctttcgaccaactgtcacatttaatccttacaaccaccccgagataggtataattattatcaccattctacagatgaggaaaccgaggctgagtaactggctcaagatcacacagatggcaaatggaggaatgaggaccagaactcagatctgtctaacttggtgttagttatctgttcctctgtaacaaattaccccacactgagtggcataacacaacacatgatccttatctcacagtttctgagggtcaggaacccaggcctggcttagctgtgttctctgcttcaatgtccctcatgaagctgcagtcaaagtgtcagttgaggctacggtctcataggaaggcttggctaaggcaggactggtgtccaagctcacataggcctggcagggttcaattcctcacaggttgttggacaggggcctcagttccgtgctggctgtgggtggagaccacctttagttcctggacatgtgggcccttcaaggtggctgcttgcttcatcagagccagcaggggagagagagcctgctagcaagatggacgttcctgctggccgtatgtgaacaaatcacagaagtactatcccattgcctttgccgttctgttggtgagaagcaaagctcacattctgcccacatttgggggccaagggactgcaccagggtatggagcccaagaggtagggataacgcaggggggatcttaggctctccccaccacagatcccaaagcccatgctcaggccttgctgcctccctttgtggagtaggaaagacccaactggatgatgattcaaggatcctccctatgggtcaagaggtttaatcgcactgcctgctttgaggtgatacagttttcattgtctgctacatctctgatgttatcagggatggaattaaaatctcagagccacacttgtgattaaggtatcattaatcatttcataaagttatctttcaaagagagtcggccttcagcagagatgtcagggccagggttgttttgcagaagtgctctcacttgtggcaactaagaagagccagcaattctgccagtggtatctagcctctgtactgcctcctaggggcctggtggccacaaatggaggaaaataaaatcttccaagagaagctgcatcaaccacattacctggaggatcgaatatggcatgaagcagagctctgtgtgcatttctggccaccaagtgaccctggctttttgccagggctggccgaggactgggtttaaatggaaaggaacatgagctatgtgtgtaactgaaagaacatgagctatgtgtgtaattgaaaggccccgtgggatcccagtagggcattctgatgggtgctatagacagtcataaaaaataagttacaatttccgatacacaatgggtggataagatggatcaaatcaaactctaatgtggtcataagtgagatgttccagtgaagggaatgttctggttgctagagaacagccacacactttcccacagaaatggtcagtcacaaaagaactggagaactcttgcggtcatgggtgaagtgcatggaggcacacataacaggagagctgtgataactgaccattactgcacttttctcagataattcagtaggcactgatgggctatggggaggtcagatcacctcagtgcccagggggtctctggaaagaacaaggcagggttctgctcttccactgtgcctgctgaggtagggtacacagcccgagacgggagctggcacggcgagttctggcagccctccagagcattccctagacttggctgttggtgctgaggcctggctggggacccacagtggagcagggagagccgcgaggggggtgccacgtggctctttgggagtgactctgtgtcctgagtcttatgggcatctggcagggtgagaggctgggttctaggggagggcactgcctttgaccctcttcctctctctgatgtcaccttctccttggggctcctatggcttgtcagtcactccccctggctcctcatccctcagggcataggaaaggcccttgggaatgccggcctgcagagcagggatgggcttgaggctgtttccgggaaaggccatggagtgttctgggctctgtgagtgtccgaggggaagctggtggtactgtgcacgctcctctcgccctccctgtccctaaacaggacttcttcctccttccacccttgccctgttcttcttttagaagcatattaacctgtccccactgtccctgtcatccctgtcttcctcttgcccccgccttgagctttattgggacatgccagattatatttgcacagccacgtgcaccccagggatgagtgagaagccacccccacccctaagagctccaggtctggaggaagaaatggagacagctcacggagtgaaatgtaaggagtgtgcatattcgtagggggtgcctggcgatcagagcactttaggggatatttgaatggatggtccctgaaagtgcagtggacagacgggaggacacgtgcccctgagggatggcatgtaacaagcagcagagcaggcaggcacttcgggtgccgttctgtccaccagcatgccgtctgagcataacttcccctctgcaacagggcttatttcctagccaagtcagctctcaggaaagtgtctgcaggtaaggctgatggaagctcagggcttccttcctcagggctgttgttgctgagtgtggctccacgtctgatgctggagtgcaaggccgccccaccctgcgcctcccatgcccatcttcactccgcagcctccctgctgctgaagccagaagcttggtgtcgcccgagtctcctctctccctccatcacacctgcctggatgctcttctgtcttgcagacatcacagtggccctcactggtctcccttttatacccatccccagccattctccctctagaagtcaaggcgctctgtaaaagtgtgtctgcccatgtcacattcctgtcgaagccctggaggactcccagctcttctgggatgaaactcaagatccaaacgtggtctgcaagccctgcacacacgtggggctccgggccatcttgccagccagcatgatggttgggcaccacgtgagtttccaggagctgacctgacaagtttccacatctgggtagcttcaacaataaccatttcttgcctcatggttctggaggccagaagcctgtttccctctttggcttgagaaggaagctctgtttcatacctagcttctggtaccctcaggtgttccttggcctgtcggtggctgtctctttctcgtgtcttcatgtcatcttccctttgaatgtgtctgcctccgtgtccaattctccctctccataaggatgccagtcatcttggaatagggccaccctaatgatctcgtcttgtcttgatcatccgcgaagaccctatttctcaatgtcccattcacaggtactggggtgggactctaacatatttggggacaccattcatcctatagtaggtgccacgtctgctgcgtgcccctgccctctccacacctgctctctgcccttgtgtgagtgtgccaggctctttctcaccgctcgccttcacccaggcacatgtggcagtccctctgctttggataagccctgggcacccagcctgggtagtaccttggcccctctgagccctggtcactgccctcactcccgattccttcattggggatgcctgttctggcccttgacttgtttggagagccctgttgtcacccccacagcccctcaattctcctttgtggtattttcctccacagcctgacccattcactgccaagtccctttgagggcacagtgagaaccaaggccttgcagagggagaggtctgtggggttgcatccaagtccaagggcagccaggggaggtggctgtgggcttcacggggaaagtgtctcatggggttgacccaagggagtgaacttgggctggacgttcccatgagaatgtcaccccacagcttctcagctgcaggaatgcgtcttggccagaggtgggttgggcttgggggcacagatgtctcacctcgcagctatagtggtgtttccaggtagcctgctgggtgccttgtcattctccgcatttgtcactgggtcccagtgagtgactctactgagtgggagagactgaagcagcgtctcaggtctgcccttggcaacaagctgttctggctggggccctcttctgtgttctgtgctcttttccctctcctgggacgaatctcctccctcccagacacctgtcccctgttgcgttcccaccgtaggtgctaccgacgggtgcagcatcctccctgcacacacactgtccctcccgttgtggaagcaaattccctgctagaatattctatcccgccttcgaggcctggatcaaatgttacctcctttctgatgcttttctccacatttgcaatcagagtacgtcattccttctttgccaggaatgtcatgcgccatgtggatggcccttctgcaatgggaactcgtgccctagacgcttatcctctatctgcccctcgcttgactataaagtccttgaagtcaggactgatgtgctgatcaatactttatattccagatgggggatgcccaatggatttgctgactgatctttctggctctgccgtcaggaaacgttaagcagattccttgaagtttagggtcatgggtctcgttcttgagtccccacggcgaagcacggcgctgacagcaggagatggcttagtaggtgtgcatgggacgaatgaacttgttagctgagaagatttaacgtcgccctccccaagttttctgcaatttagtggtgaactcttaaagaacaaagattttaagcactagataaataccattttattcgtggaagcctagagaagtgggagtcaggaaggggaagggaggagattttgtcgggggaagttttcccagtgcccttaaatccactctaagtgccgtctctgctctgtcctcctagctgtgagcacccagggagctccgagcctggtttctgtcatcagattgaatatctgatttgtaagaagtggaaagtccccatctgttgtccctgctccctgagtagagttccaggaagcaacgcctctgcatctacaccgtgttaagatggaggagggcacgctgagccaagcatgggaatcaatctctgaccacttgaatggggctgcccttcctccaggtcaccctcctccacgtcagcctgggggacactagaagttcaaatggatctaagggagcagactgtattcattcattcattcactcactccctcattcatccattcatcaggtgttggttgagcccctcctgtgtcccagatgccatgctgggtgatggggagacagaagtagataggaccagttcctgcaatgtgaaagttcggagtgattgcaatagagccaaacagaccgtgtgttcaaggtcagcccagagaccatgatgggtggcataaaacatggcagttgcttacccatccataggcacctacggaaacacttcctggagtaagggacaaataagcagaggccccaaggaggagtaggaactcaccagccagtgggaaggtggaggagggacaagggcatttcaggtgggaaacaggattgcagaggctagaggaaggagagctggccccggggcgactgggggctggcggttcagcaggagcagcatgtagggtgagaggggctgaaggttgagggaacaggcccctgagggcctcatacatcacccaacctgaggaatttgggctttgacctgaagtgaaatcacgggacagaggttccaggggtccctcctttccatctctcctccccaaagcctcaaagccccaacgcccagtgtgttagtccatctttatgctgctgatagagacaggcctgagactgggtaatttataaagaaaaagaggtttgaggttttaatgaactgacagttccacatggctggggaggcctcaaactcacagtcatggcagaaggtgaagagagagaatgaggtaagagagagaatgagagccaagtgaaaggggaaaccacgtataaaaccatcagattccatgagactttttcactaccatgagaacagtatgggggaagctgcccccatgattcaggtatctcccactgggtccctcccacaacactggggaatgatgggaactacaattcaagatgagatttgggtggggacacagctgaaccatgtcacccagcagtcccgcaaacctaacaaatgcctgcctgtcttcacctcagatggaacggccctgattcagctttccccatccgtgccttctaccccctccctaattcaatctgctgcaagcctctttccaggcagctaatgacacaagggtgtttaattctgaactctgcaatctcaaaagattaaataatggattttgtgatctgccaggctctttcctggatagaatgataagatatcaattggaaaaatttaaatattgatgagttttaacttttgtattgattgggcagtgacatattttaaataatgattcacattaaaaatacaagggttcctattgatcatgcagcatctggttgtattaaaataatgaataatctttagaacttactatgcttttaacattttgtttttcctagtagctgaagatccaaccaatgcatagcttgcaacacctatttggaacctcatgcatctgtctgcccatgcttttctgtcgctgctcaggactgccatttcttttttatgtttttttgagaaggagtctcgctctgtcacccaggctggagtgcagtggcgtgatctcggctcactgcaagctctgcctcccgggttcatgccattctcctgcctcagcctcccgagtaactgggactacaggcgcccgccaccatgcccagctaatttttgtatttttagtagagatggggtttcactgtgttagccaggatggtcttgatctcctgacctcatgatccacccacctcagcctcccaaagcgctgggattacaggcatgagccactgtgccgggtccaggactgccacttctttgtagggtcaggcagcatggggcctgggagacagggggctgagcccgcagacgtggggctagccgagcagctgggcactatgcaaccccaggggaattctctgattgttcagctttttctgggtgcttgtggctccaggggtgaagggaaggccagaggggctttttttttttttttttttttttgctagccggaagccgttcctttaggatctacgatgggaagtcttcaaccgttgcacccagggaccttgctcaccctccttgaagtcacctttactcctcttgcttggacttctgaccatgttgtctcaaagtttccaggctgtctcttcatctgcactgttacaatcctgactttcttcactcatcgctaaaaatatttccctagggccctcaaggagtctcaagactcaggcagttaatgggagtggaactgccacctgctggtgttgatatgtgccggtcaccttgccagcctcttcgcattcattcaccctgcatccgtcattcattcacccagtgcagatttattaaactgactccgtgccaagcaggcacgatgcttgtccataggaagcttagaatgtagaaggggacagatgttaacaaacagttaatgcttgactattaattccaagtgtgatagaaccggcacaggaaacaggcaagaggacctagcctcatcaagggtgacatgcaggaaaccgctaacctagcaggcctgttggttgtcctcagaaagccctcaggcctatccttaggaaggcctcttgcaactttggctcttggctggtgtccaggaacttgattggtaaaccgttctctattctgacataaaaccttcactaaaggattagagcggctcacagtgcctaaactgcttgtacaaaccatgccgtttatgccgagcactggctttccttcttggggtgtggaattttggtatgtgctaagcagaggatgcctacatgacccccagcagagccctgggtgccgagtctctgatgagcttccctggcagacagcactttgtgagtgtatcacaccctgttgctagaggaatcaagtgcgtccggtgtgactcccctgggagagtagccttgaagcctgtgcccggtttccccctacctcgcccatgtgcccttcccttggctcatttttctgtctccttttgctataataagtcttcaccatgagtacaaccatgtgctgggtcctgtgagtcctttcagtgactcaccaaacctggggatggtcttggggttccccaacacgggtggccagggaaggcctccctgctgaggtgacatttagctaacaccttaaggaacagtaggtgtgagatagcaggtgttagaaagcatccttggcaaatccaagagcttgtgcaaaggccctgaggtagcaacagaaacagggttgagtggtcagggctgttggtttggaggattcggtgtgagatgggctaagaaaagtcagatcatgtcaggccttttagccatggtaaggaatttgggttaccttatttctaacttttacagaagccctacaaagtagaaaggattagccctatttttttttttttttaagatgaagtcttgctgtcacccaggctggagtgcagtggcacgatctcagctcactgcagtctctgcctcctgggttcaagtgattctcctgcctcagcctcccaagtagctgggattacaggcgtgtgccaccacacccgattagctccccctcctttttttttttttttttttttttttttgagacaaggtcttgctctgttggccaggctgaagtgcagtggttcgatctcagctcactgcaacctctgcctcccaggttcaagtgattctcctgttcagcctcccgagtagctgggattacaggcatgtttcattatgcccagctaatttttgtatttttggtagagaccacctcactatgttggacaggctgatcttgaactcctgacctcaagtgatccacccacctcggcttcccaaagtgctgggattacaggcatgagccaccacgcccagcctagccccatttttaaagaagaagactataaggtcacttgcccaggctcccacagctggtatgtggaaggacttgccatgaatttgggtccatctggcttctattaggttggtgtaaactgtgattacttttgcaccaacctcatagaaagcctgggttctttccatcagaccttgttacagaccaagacaggacttgagccttcccgagaaaggttaccgagaacactcaagccaggttgctgtctctctctccttttcctctgggtctgctctgtctccaggactcactgctttagaatagtaccatgttctgtcaccactgaggggagggggagcgttttgtgaccaagagtcttatcccaggtgtcagaagttctgcgctggaatcttagctgtgtgaggttcttactccaggcaatacacttaattcctttttgcctcagcttttgtatctgtgaaatggagacattaatagtgcttaatttgttcatttatagttttatcaagatgtaattgatgtaaataaactgtatttagagtgtacaatttgatgagttttgacatctgtatatattcatgaaaccactaccacgatcaagatagtaacacattcatcaccctaaaagtttccttgtgccttgtgtaactcatcccttctgtccctctcccatctctagacaaccacttacctgttttctgtcactatggattagtatgcgttttctagcattttataagtatgatatcagacaatagttgttcttttagatctaccttcttttgtgtgtgtgtgtgtgtgtgtgtgtgtgtgtgtgtgagatggagttttactctgtcacccaggctggagtgcaatggtgcgatcttggctcactgaaacctccacctcccaggttcaagccattctcccgcctcagccccccaagtagctgggactacaggcacgtgcgtcactatgcctggctaatttttgtatttttagtagagacggggtttcaccatgttggccaggatggtcttgaactcctgacatcaagtgatccacccaccttagcctcccaaagtgctcggattacaggtgtgaggcaccatgcccagtcaaatctaccttcttataatcagcatagttattttgaggttcatacatattgtgtgtatcaaaaattcatgccttgtttattgctgagtagtattccgttttatagatatgccacatttttgctatctattcacttgttcgtgcatagattattttctactttttggctattacaagcaaaattacatgtacacatctttgagcatatacctttatttatcttggataaatacctaaatgtggagtggttgggttgtatgggaagtatattgaactttatatgaaaccatcaaagtattttcctatgtgatttttgtgtcattttacttttcttccagcagtgtatgtgagagttccctttgcttcacattcttgctaaccctggggtggtcagtttatttacttatttaaaaatttttagctaatctagtgtatgtgtggacgcatctctaatgacggatgatgctgacagtcctataaacacactcttcccatatatctgttctcaagagctgataatctctccaactgtttgtctgtttgctatccatatatctctcttctgcaatgaagtacatattccaatcttttgcctctttaaaaaattggaatgtattcctattactgagttgtaaaagttctttgcatattttagatatgaattctttgttggatatatattttacagatattttctgagtttgttccttgccttttcttttcttttttttttttgagacggattcttactctgtcaccaggctggagtgcagtggcacgatctcggctcactgcaacctctgcctcccgggttcaagcgattctcctgcctcagcctcctaagtaactgggactacaggcacgcgccatcatgcctggctaatttttgtatttttagtagagacggggtttcaccatgttggcgaggatggtctcgatctcttgacctcgtgatccacccacctcggcctcccaaagtgccaggattacaggtgcgagccactgcgcccggccgccttttcatttttataacagcgtcatttgaagagaaaaggttttaaatttcggtgaagtaaaatttgttgactattttttcatggttcatgcttttggcatcatatttaagaagttaataaaggaagaaatccttgtcaaatccaagatcattaagattttctcctaggtttacaagaagtttagtagttacctcttatagtcaggtctatcatagtttcaagttagtttttatgtgtggtgtgagatgagggtcaaggatcgtcttttcttttttttttttttttcttgctgtggctacctgattattcctgcactatttgttgaaatgattattctttttccattgaattgccttggccccttcactgaaaaccaattcaccatgtatgtgtgagtcttttcctaaactttctatcctgtttcatttttccgtatgtctctacttatgccaatatcatactttattaatatagctttacaacatgtattcaaatcaggggtgtacatattccaattttgggccgggcttggtggctcacgcttgtaatcccagcacttagggaggccgaggcgggtggatcacctgtggtgaggagtttgagaccagcctggccaacatggtgaaaccccacctctactaaaaatacaaaaattagccggcatggtggcacatgcctgtagtcccagctactcaggagactgaggcaggagaatcgcctgaacctgggagggaggttgcagtgagccgagatcgaaccactgtactccagcctgggtgacagagtgactctgttacacacacacacacacacacacacgcacacacactccaattttgttcattttcacaattattttggcttttctaagtcatttttcatttccatatacattttagaaattttaacatcagcttatcaatttctgcaacaagcctgataggattttaattaggattgctttgaatgtataggtgaatttggggagaattgacatcttaataatattaaggtccccttcctccttcccttctccttcaacagagtcttgttctcttgcccaggctggagtgcagtggtgtgtgatcatagctcactgcagccttgaactcctgggctcaaacgatcctcccacttcagcctcctgggtagctaggactacaggtgtgtatcaccatgctcggctgatttttgtattttttgtaaagacagggtctcactatgtttcccaggatgggggaattgacttttaattttacataattatagactctcaagaagtgaaaatagaacaaagaggttctctgtgaggccagggttggtggctcctgcctgtaatcccagcactttgggaggctgaggctggtggattgcttgaacctgggaatttgcaaccaccctgggcaaaaaaatagattctgcatgccttttatccaacttcccccaataataacgtattatatagctatagagtattatcaaaaccaggaaattgacattggcacaatactatcagctagactaaaaaccttactgagatttctgctgtgagtttttttcatgaatggatgttggattttgttgaatagttcttctgtacctattgacgtgatcatatgatttttgtcttttagtttgttaatagggtaaattaccttaattgattttcaaatgttaaacctacattttatcagcctatgttacattattatttttatatatagctggattttatttgttcatatcttttaaatattttaacatatgtgtttgagggatatttttctgtaactttctttccttataacatcttagtctggttttatatcggggtaatgctagatttagaaaattaggagtgaaatgtttcttccgctcctatattctggaaaggtttgtgttgaattggttatatataattgtttggtagcattcatcagtgaaataccagttatctgggcctggaattttctttgtgcacaactttttaactgtacatttaattttaataggtaaaggtctatttaggctatctaagtctttatgaataatcttagtacttcgtgtcttttaaggatttgtctatttaagttatcaaattcattgccgtaaaattattcacaatatttccttattacctacttaatgtctgcaataactgtagaatgtactccctctcatcccttatattaataatttgtgtcttcttttttttcccttatcagtttttctagaggtttatcaattttattgagcttctcagagagccaccgttaattccattgatgtttctgtcaggtatcactgtcctgcactgtcaatatgtgaaaagtcttgtttcatatagtttgtcctttgagaaaagttgtgtaaggtgggaaggtaaatccaatccttgtcctcccatcataggtagcagcagacgtcctccgtgattttcagggctataaaggagttctgtggtgagagagtgggagaactctgttagctctagctgaactgtgtcctttcctgaggttactactcccatgtggccctctcaaatggtggatgttttctctctcacactttttgttttattattagtacaatgatagagtcatagattatttggtaacagttttactatgaaataagttttttaaaataatgtcaactcttgatttagataccgagggtatgtgtgcatgtttgttacatgggtgtattgtgtgatgctgaggtttgggtatggatcccaccacccaggtggtgagcatagtgcccaacaggtagtttttccacccacacctccctccctgactccccccaggtagtctgcagcgtcaactgttcccatttctatgtccatgagtacccaatgtttagctcccacttttaagtaagatcatatgggatttggttttctgttcctgcattaattcacataggattatgacctccacctgcatccatgttgctccaaaggacatgatttcattctattttatggctgcatagtattctattgtgtatatgtaccatatttgcttttatttttatttatttttatatgttctgagacagggtcttgctctgtcacccaggctggagtgcagtggtgcaatcatggctcacttcagccttgacttcttgggctccagcaatcctccacctcagcctcccaagtagctgaaactacaggcctgtgccaccattcctggctaattaaacaaattattattattattattattttagagacaggtctcactatgttgtccaggctgattacaaactcctgggctcaagtgatccttccaccttggccttccaaagtgttgggattataggactgagccaccatgcctggcccacattttctttatctaatctaccattgatggacacctaggctgactccatgtctttgctattgtgaacacatggtagctagtaatcccattactgggtatatgcccagaagaaaataaatcattctatcaaaaagacacatgcaattatatgttcatgggattactagctaccaataatgagaatggtagctctgtcaacagagtaaacagagaatctacagagtgggagaaaatatttgcaaaggatgcatccaacagaggtctaatatccagaatccataatgaacttcaacagatcaacaagcagaaaacaaataacctcattaaaaatgggcaagcgacatgatgagacacttctcaaaagaaaacatacaagtggccaaaacacatggaaaaatgctcatcctaatgaatcatcagagagatacaaatcaaaaccacagtgagatcctacctcacaccaatcagaagggtgattattaaaaagtcaaataaggccaagtgcagtggctcatatctctaatcccagcactttgggaggccggggcaggcggatcacctgaggtcaggagtttgagaccagcccggccatcatggtgaaaccctgtctctactaaaaatacaaaaaattagccaagcggggtggtgggtgtctgtaatcccagctacttaggaggctgaggcaggagaattgcttgaacctgggaggcagaggttgcagtgagttgagattgtgccactgcactccagcctgggcaacaagagagaaactccgtctcaaaataaataaataaaataaaaagtaaaataataacagatgctggtgaggctgtggagagaagggaacaattatacactgctggtagggatgcaaattagttcagcccctgtggaaagcagtttggagacctcttacactcttggtgctgcaggacctggaggccatgtaggcatcttcctcccacctctttttcactcccaggccattgtcatccatctcatttcatcttccctgaaaaccctcctgctgctttgagcctcatgccttcaagcttctaccacctgttgccttttctcattgcaattattacagattgcctgatttgctctccctcattccttgaagattttagcacctggatcgctgtctctttctgactctctatctgtcgtaattcatgatggtttttaatatccacacagagatcctttcaaaacccaggagtaccagcgacattaagtaacactctgtgctgttacaaaccaacctggaaatctcagttgcttaacccaataaaagatgatttcttgcttgtgccaaatccaatacacctctatggtacttacctggctataccccatgcctgttcaaagccaactttttactttctgaaggcttatatctcgcagcccagtgtggctggagaaaaacaggtacctgtgctaactggtcttattttaaatgtatgatccctaccccaggccctggtgctataagattccacacactactctgtccatacctgtgccaaacaatatcatgtggtctcctctttcagacagctcctcttcctcctccacactctcagcttttggccctgcttcttatttctctgggggaatggaacaaatcagaagggaatttctgcatgctcccagcagcatggctgcccacccctctgtgtctgcacccacacggcagccttccttccagttctgtggatgacctgtttgtcctggctgcaaccacccctttccttgtgtgccagatcacattccttctcttttactcaagggcatcactctgcaattattccctctccctccttcaaccttagatgtttcctgtctattggatgattcctatcagcgttcctattgttcataccctatctatctgtagtattccctatcttgaaaaaaaaaagcctttcttattgctactgcctgtctctctccttctgtctgcagcacaacagcttagatgtaccacattgtcttattcattttttctggttactcccctccagttcactcttaagctgtctggcttttgcctttactctgtgggaaaagctcttgttaaggctgccaagtgcaatagttgagtatctgttctcatcttactggtcgatgagtggcatttgacatgactggctgcctcttcctcgtgaaaccgctctgtcctggctggctccttcctcagagactgctccttctttgtcctgctaaccccttaaggctggagcgcccagggttcggtcatcatcttctccgtttctctacccaaatgctccctggtgacctcttagctttgcacactttttacatgctgatgacctcaaatgtgtaattctagccctggctttcccctggccttcagatgcatctatccacctgagtgtcagatatctcggacttaagcgtctgaacaagctgttgattcatcacctcttaccaagctgctaccctaatctttcctgtctcagaaaatggcaactctaacctgccccggtgcctgggagtcatcgtttattgtattttttcttctcttccctcctttaatccatcagcaaacttgtggctccaccttcaaaatagatacagaagccatcaacttattcgaaaccttcactgctttcactagagtctatcccaccctcacctttctcctgaactgttggtagagccctcttttaggatttctttttgacattcatcaccgaatcgctgaaagacccccaccagctcctgttctactcaaagtctagaagaccctgctgggtctggctcttgccacttttgtgacctcagcccaacagaccttacgtccagcagcccagtgtggctggagaaaaacaggtacctgtgctaactggtcttattttaaatgtacgatcccccgctccaggccctggtgctacccagagattctgcacactactttgtctgtacctgtgccaaacaatgtcacatggctccctctctcgcacaagcatctcctgctggcctgctctgctccagctgaagcttgaaccctgcactcctgcctcggagctttggcacttcctgcttcctctacttggtatgccctttcccctgatatcctgaggctccctccctcgtttccttcaggcaatgcctcaaatgtcaccttctcaaggaggctcaactcagccaccctacaaagaacaggacccctgtccccacatcccttctctccatctccctcctctccactgcccggccatctgggggctgctgtgtcttccctgctggaatatcgggcaggtatgtggatgctggttcactgccatgctccctggagcatagaatcatgcccagtttgtcatagggactcagtacattttattttatttatttatttttttgagagacagagtcttgctctgttgcccaggctggagtgcagtggcacaatcatggctcactgcagccttgacctcctgggcacaagtgatcctcccacatcagccacccaagtagctgggaccactggtgcgcaccaccacgcccagctaatttttaaaattttttgtagaaatggagtctcactatgttgtccaggctggtctcatctctaactcctgagctcaagcaatcctcccgccttggcctcccaaagtgctgggattctaggtgtgagccacagtgcttggcccatctttgtagcatgaataccttttagctcatatcctcgattagtgacatagaaataccctgccacagtgtagcattggcatttaaatgccctcctttaatattacgtttcagaaattaaatatgatgactaaaaagaatcacaagatttaaatatgcatttttatggataattagaaaacagtcgatgctaattttgaaaaattcaaactctacagaaatgcataataaaaagtgaaagattgtcttttccatgttttctcccatcccgcctcccacaggcatacacgtcttttgatgatgttgtgggcatcatttctctgtagagataaaacacatacatgccaacatttttaaaaactggtatcttgttttgtatctagctcacctttttttacttacttaaaaatatactgaagatctgctgggcatggtggctcacacctgtaatcccagcactttgggagaccaaggcaggcggatcatttgatgtcaggagtttgagaccagtctggccaacatggtgaaaccctgtgactactaaaaatacaaaaattagctgggttttgtggtgtgtgcctgtaatcccagctactcagtaggctgaggcaggagaattgcttgaacccaggaggcagaggttatagtgagccaacatggcaccactgtactccagcctgggtgacagagcaagactctgtctcaaaaaaatatatatatatatatataattttatataaatttatatttataaatatatatttatatttattatttgtttatttatatttatttattatttatatttatttataaaataaacaaaatatatttttataaatataaataaacaaatatataaatataaatatatataaatatataaaatatttagaaaattatatttataatatttataaaattatattcataatataaatatatatttatatttataattataaaattatattcataatataaatatatttatatttatatttataaaattatataatatatatttatattataaatattataaatctatggtatataaatattttatatatagatatataaatatatctcaaagatctttctatgctggtgcctctagaccttcagaaaaccctctccgaggctgtggtgggtgcccagcagcgattctgctttgcccctcctcctttttccaggggcatgtttgcttattaagctcgcagtttaagagcccctccctggaaagtctggattctcagagcctctgtgacattgcccacttcacacccttcacagaacttttccacacagttttccctttcctcctgtctgtctgcagccttgctgcttgtctgcctgattcattggatgacatattccttggcgactaggtagtgtgtgtcttttgtagtcttgtgtcctccatagttgtgggctcagcggatggttgttgggtggatggacggataaatgggacaatgaaaagatgagcttctcttctgttttctccctgagcagcagttcgcaatgcttcgtgactcaaattgtgcaggtttgctggccgggcgtgagcctttttattttagtccatcagggaaagtggctggctcattcagccacagtgtagcattggcatttaaaaatatatcaagaatgacaataaagattagttaccatttattgagtgtttactctgtgcctaaatgctttatgtacattatcttctttactttttcaacaatcttgtttgaattaggtcctattattatctccattctgtagaacaggctcagagaggtgaagtactttgctcacaaatgcacagctaggtgtcatagggaggtagctaggtggtagcagagccaggattcgaaccagggctgcttgatccacagtccagcttctcaagcccaaccttgtacttctgtgatggggagccaggtttgtgtggaattttgtcttcctatagagactggctgcatttttaattgcagaaaacatgcaacctgtgatgaatagattaacatggcaacttttttttcccctgagaaagtggtactttaatttgcacataacattaatagtgaagagactgtctccagagtaagtagctcccctccacccctcccccaagcccttataggacttcaaaggggtcaactccagctctctcactgcttgatttctttgactgcttttctgctttagcagtgagaaggcaatgagaagatggacttgtgagaattcacccaggagaataagcaactgggtctcaagtgttttgttatgtaagcagtaaacactgtggacagcatcatctactgtttgtcaaactcagccctgggttctacaaaactgagtttaaaagaaaaaaaaagctatctgtggagattttgttaaaggttccacttggttagcatgcttgcaatgcacactgtaacaaagctttaatataattaaattttaaattccatgtagaatctagtgggtaggcagatgtaccggtatgttaaactttatgtcgcttgaaaatggttttcaagtacatcagagggagaccatccagctgtaaaattatctgctttatgatgccgcatcacagctctgatctttttcttttaattaaaaatgtaccttaaagttgaaccatccccactctctgctaccttttcttcctttctgtctaccgacagaagatgaagtagcatgactgttctgtgaaccttcggggatgtttatgcaggaaataacttttcaattaaatattaatttttgtggctcttcagctggactcggcccctctgcaggccaaagggtagctccctctgtatatggtgctgtccaggttgtgaggcctttggttggtcataccttctaacctcttgcagccagttccagaaatcaagagtcatagaaccttgcaaaggtgaaaaggtgataccccctgggctcttcctgacttgccaggtgtgaccggcttcagaaggcatctgttctcacagtggcatgtcagggtcctgctcctgtcccccaaacacctttcttactatagctttctaatgtctgatttcttttcctggagaatgttatctctttaatttgaggtctcattctctgttaaaatatggaccactggtggacagcactcaccagtcattatccccttgtcatggctaacgtctccagatcgcccatggaagatattggatgctggtgcccaggaaatggccttggcagaggggaaaagacatagaagggcacactaggtgcagggattccccagggctggctctaggtgtggctaatgagcagtcgtcagcatcagcacactcagcgttacttttcaaatgagatcagtcctaccatgcacctactctggagtctggcacgcagcaagtgctgggtaaatattagctattattgagattatgaatattttattactctaattataatcagatcctggtaggttcttttaagtatccttctggaacctgccagctggcagaaggatgagagacaggcaatggttacatgactccgaaggcctattgactggtcatcagacgggaatggaacttatggatcatctcatttcatgctcctacttttgcagaacaaaaccaggggcttgtggtagagaagggcctcagttagggacacacagcgagccatggcagagttgggtcctctgacttcccctgcttttttcctgatgtcttggctgctcccacctcacgctagcttcctctgtgctgggaagggcccttgctaagctgcttggatccagctcttcctggtaccccttctgttactttgttggggtgagtgcccagatgttcctctgcagtcttggagagccctgctctactgccagcaccctcccaggctgtgggcagaatgaatggccaaagagggtgtccctgaaccttaaagaaccttccagtttccagcagcctctctgctttctttcaactctgctaagcagccagtaccattcactccctgtagcaggaaaggtccttttttcctctgtgctggaacccagttgtgatgagactatttgaaagcagtggtccacgaactgcaatgatggggagactaccacccagctcggcctccaggtctgtgatgatgggcaggtgatgtcccctctgtgggcagaaggtgctgctctagtttggatgtttgtactcctaaacctgttacaatgggatcctaatgctggaggtgggacctaatgggagatgtttgtgtcacggggtggatccttcatgaatggcttggtgtcatccttgcggtaatgagtgagttcttgctctgttaattcctgtgaaagttcctccaggagctggttgtttaaaagagcctggcacattccttctcttcctggcttcctctcttgccatgctggctccctttagcattcatcatgaatgggagcagcctgaggccctcaccagaagcaaatgctggagccatgcttcctgtacagcctgcagaactgtgagccaaatgaacctctttcctttataaattacccagccttagctattccttttaagcaacacaaacagactaagacaggtgccttccctgaaacacgagaggctggacccattggctttcatggtgcttttgggccacacacattgattctaatttggcattttcatgcctgagctgtctcagtttctccagtctaaggttcacattggggaacctggatctagacttctctccctccaggtgaccccagagggaagacaggctgctggactaagtgcaggcccctccagggaccatgaggagaaggaacaggtagaaaactgagcagagaaaaccacggggtgcagctcccatggtggaaggtggggtcgtcagcagcaaggcggggtgggccgagactcaggcacactccagggagtgagtgtgaggagtgagcccagccctcagaatcctgggctaacagccatccatggtatacaggtagcagcctccattctcatcagatattatgtatttggaaaatgaatcttatcctcaagtattagtcactgcaagaagcaaaaaccttccttgagacactttggaatgttccagagtcaatgttgtttggagtaagatgtatgaaaccaaaattaatgacattttgcacacccagacaaactcctaagtgccacccattggctttctcccatctctgggtgcagcctgcttttctggtcagattattctttcgggcagtgcaggatctccttccgccaggagctccttccaataccttccaacctccaactaacactgaggttcttctcccaaaggattcaggatgccctgggtattgtgtcataccatcttcttaccttttacagtgaggtcattgcagaactactcagctatatagcaaacactccctttcctagtgatgggataaaagtatttatggtctacctgaaaatgttgacttttagggattcagataaagtagttaaatgtcaacttatactaagtgtactaatttcattgtatgaacgcatataaagtcatatgtctatacactaaagtatttgtagaaatatggcttttttccccatcctttaattctgtgaaatagtttctattcaagttcttcctgtgcgtgttgtcatccacaaagccactctgtgtgtcatcaaacacaaggacatttttacttctctgttgtttgagatacaccactttttgaatctaggtatgcaattttaattgcatctgtcttaagtcaggctgccgtaacaaaataccacagactgggtggcttaaacaacagacatttattttcttatgttctggaggctggaagtctgagatcagggtgccagcatggccaggttctggtgagggctctctttctggcttgtggacgactgccttcttgctatgtcctcagatggccttttctaagtgtgtgtgtgtgtgtatgtgtgtgtttgtgtgtatgagtgtgtgtttgtgtgtatgagtgtgtgagagacagcaagagacagagcgaaagagagagtctcttttcgttctaaggccaccaattctattggatacagaccctatctgacctcatttaaccttaattacatctccaaatccctatctccacacagtcacactgaggccactgagggtaagggcctgaacatatgaattttgggggacacaattcaacccctcatgctatcaggaccgatatatataacactaggcaggattagaagatttgccttgtcggtgtagtttgtggcttcagtgttgtgaggacttactctcattttcagaactcgttacgagacttgtttatacagatattaggacttgcaattgtcaggtcacaccactcagaataattactaaaaactgtgtcaaatgtatttgcttccttctaccagtcctgtctggtaatctctataagcatcccaaactagtattgattgacgtcattttggctaatgggtcttctccaaagagtactttattgtttaaagtagagccattgagaatgttccctataatttgaacaaccctaagaattcaactttaagctggtcatttgtcctccacaactacctggtgaggcagcacttgctttttcttcccatgttacaaatgcagacaggaaggccgagtaacctctcaagctctgcagcggttgggaggctgagctggccttgacctggattcgctttcttctagaattgggtccctttcggtgcctcactctgctctgggggaagtaagggagtgaggttcaatgacgtggccaagatctttcaggggacgaggggcagactgagtcctctatccagggcccttctcaaagccatcatggatctcttggaagtattaaccccaaggggtggagatgccgcctctgagctcctgtcaccttcccaggcccgggagggagagcatctttccgcaccgctcctctgcggcttatgtgggattccacgtgcctctttatcttgcattaaataatggttttagtgggctgccagcttattcatctattgtatttatggaaactactaaagacttcaaaaaagggtttaattcaatgtgaggttctatctttgaagaaatttgtttaatagtgcagggaaaattgggcttttaatacaggaggagcagaacctgctctgtaacttcagagagaaaatggaaatcgagacgggaagtaccagagaagccactgggcttggaaggagggtgacttgggaatgagctggagctgggcccaagtaaagcccttcctagccttccctcgtctctgtctgtgtagggaaggcaaagacacaggaaaatgacagcttagtgtccggaaccctggggtcactgcaggagctggactccagtctgattgcatagagctgtagtaacccatgagtctgtgagcacagaggggccgggacgattgcagtcatccgtgtctcccgaaagcacagtgcctgtggcttctaggctgcaagcatgaagcctcccattgcagaggggaagaggctgcccttcagcgaaatgtggagtgggctgaggggatcttgggtacggggttttaaaaaacgtaatcctgggttcaaatccctgtgctgccctctatgacctgtgacctgggtcagtttctttatgtccctgagctttggccttcttgtctatgtagcagagataatctcaaccgtctaggtggtggcatgcatgaatgatagcttctatttactgaacacttactacgtgcgtggcactatgcccagtgctttaattggatcttttttttaaaatgggatgattgtaaaggccgggccgaggatctcccctggggatgggcagtcatggtgcttccccgccctgggcagctgcttattccagaaattgccgtgggcctgcaatcctgcttgcaacacccctcgcagcaggagcttggcagcccctgaacccggtgcctgctcatgagccagtctccctcttggcttatgtagatcaaccagagccttgggatatgagaagttaatttccacatatcctggagggggaagaagcacgtatgaaagaagtgaagagataagaatgtgtaggaaggttatctttcaattaagaagggcagtaatgcttcccatcaagagtcctgtcggggaaagtctgggaatatctgtttcggtgctttgctgagaaccagttaggtgaattctgtgctggtggacactgccgcccagcaggacactcatcaccatggccttccttgaccccggccacgtcctgccggctcctcctccttgaacaccaaccatcaggttgccaggacctgtcccctggggctgggtcctcactgcttccctgggaccggctgtgtaggggttgatgtgggcagtcagagggggtagggagagaagggtttggcgtattgcacacacacaaacacacactcaaacataaaccatgcacacacacacacttgagcatcatgcacacatatataccacacaaatatacaccatgtgcacacacaccacacacacatataccatgcacacacaaacacaaagacacaacatgtacacagacactcaaacatatgccgtgcatacacatacacatcacacactcaaatatacaccatgttcacacacatcacacattcaaacatatgccgtgcacacacacagaaagttacagcacgcacacacgcactcaaacatgcaccatgcacacacactcatacactttgcacacacactcaaatgtatatcacacacatgcacacaaaaacacactcatgtacagcatgcacacacacaaacacacactcaaatatataccacacagccaggcatgatggctcacgcctgtaattccagcactttgggaggccgaggtgggcagatcacaaggtcaagagattgagaccatcctggctaacatggtgaaaccccgtctctactaaaaatacaaaaacaaaattagctgggtgtggtggtgagcacctatagtcccagctacttgggaggctgaggcaggagaatggcgtgaacccgggaggtggagcttgcagtgagccgagatcgtgccactgcactccagcctgggtaacagagcgagactccgtctcaaaaaaaaaaaaaaaacaccccaaatatacatcatgcacacacattcatataccatgcacacacaaacacactcaaatatacaccatgcatgcacactcacacactcaaacatacactatgcacacgcaaacacaaacatacatcacacacacgcactgaaatatgcaccatgcacacacacactcatacatcacacacacactcaaacatacaccacaaatacacatactcaaatatgcaccatgcacacacacattcatacaccatgcacacacacaaactcaaacatataccatgcacacacacactcatacaccatgcacacacacaaactcatataccatgcacacacacaaactcaaacatataccatgcacacacacattcatacaccatgcacacacacaaactcatataccatgcacacacacactcatacaccatgcacacacacaaactcaaacatataccatgcacacacacactcatacaccatgcacacacacaaactcatataccatgcacacacacactcatacaccatgcacacatgcatgcatagaaatatgcaccatgtacacactcaaacatacatcacacatacaccacacactcatacaccatgcacgtatgcacacaaacacacactcatacaccatgcacacactcaaacatacaccacacacacgcacacacactaaaaatacacaatgcatacacacacgacacaaatgtacaccatgcacacatgcacacacatgctcacatatgcaccatgtagacacacactcatacatcatgcacacacacaccacacactcacacatacaccatgcacacacacaaacatacaccaagcacatgcatacacatactacacagtgaaatgtatgccccccacacacacaccacacactcaaacatacactacccacacacatacacaccacacactcaaatatgcaccatggacataccccaaacacacgaatccaccccctccccccccgccacgctccccgccatgctccttcttctccctgtgctgggcttttggaaagagccaggggtctgcttttgttctgaatccccatcctgctgacttgccaccggggtgtctttacctatggggggagtgggtccagtccccacgttgccaccttctgagtgagcaccaaggccctcccattgcagttggatgtggccagccggcccattcagtccaagtgcccaggagcccagtgtgcccttcctttggctctagctcctccctcccccatcaggggaccactggggcactaagtgtggtggcagagggcaccatgtgggctgtgaccacctctctccagcagactggggggtgcctgcagagcactgactgccagtgggcaacattactctctggcctgcctcaccattgggctgtctgttcacttgcttctcccagctcagttgtggtctctgaggtaggtcagagcctgggctggcttatcaccaggtcctgggcacctgctcaggatggagcacagagaaggccttgctggcagctgtcaggggtgcgtgtgtccagtggagtggggcttcctgccctgtgggcacattcccgaggtacgggggcctggtgtttccacaatcatccactcccttccagctgcccagggattggggtgtcggggcgtaggggcttctctgggggtgggtacaagtccctacttgccattccccagctaaactgccactgagtggagagggcggctttccccgcagggaattgggagtcccagatgtctcccttctgcgcttgggaggggtgctcctccctgaaggacagggtttttgcttctgagcacatgggccttttgcttctgagcaggagaaagactttctggcagggcaccgtggttcacggaaggttctgaccctgcaggtgggcttcggcgagactctcacgcaagggactttgctcattttctgcccctctgctgccatcaaatgtagcagaaaaaaatgtgtgtccctctccagccccttgctgtaggaatgccagcttcggctcaggctggtagtctggtttcgtaacggccgtgtggccgcgggtcaggtgcttcacctttgggcctgggataatcatgccacctcctggggctgctgggggatccagtgagctgatttccatgaaggcggaatgttggcgatgcgagtttttagctagtccccgacacacactgagaacaggaaacgagccactgggtgctcagctctccaagcacggccgtccctgagtgctgggggatgggcaggtccagccatgttcccggaataactccggcctgggcggcggccagcaggtcagagctgggccagaggtgccgacggtgcccagggtaaggggatgccgggaagacgttgaagacaaatgtgtgcctgtggggagcagcatgtttatggcaaataaaactcctgataacgattcacgaatcctggcagccctgccttccttgccgtacctgggggcttgtactgccaggggaggcttcgtctcatttccttcactgctggggaaggactgcccaggactcaaacaggaaaactgagcctcggagacgttcaactccaacagggagcagcagccgctgctgttcggtcgcccagcggcctccctggaggagagtccctcagtgatgcctcttcaaaggctctgcgtgctgcccactgtccgtaaggagtgaggcaggtgtggtcagagtgcctggacccgcatcgccctttgcctccccagctgcaatctcacttgctcacttggggggctttggctgagctttgcaggttggcctggaccggcaggtgggcacaggcccattgcacctgactgggtgtgattaaggaaacaggaatggaaatgcttctccaactggaggaagtcagaaagccacagggcatcctcagacgaaacccctgcttcctccatcagagcgggggcaagcagatggggaggggagatgcttttcctcagagacaccaatgcctctacacccaggcctctccatgcaggtgttatggacattccaggctggataattcttcgttgttagggccatcctgggcatggaagcatgttgaacagcatccctggtttccacccactagatgccaatagcacccccgacaaccaagtgtgtctccaggctttgcccagttcccttgaagggcagaatcacccctcaccgagaaccactgctccacccaatgcaaagatgtaactctcggcatgtttaggaccaagtattgggatgtgcagaaggacgcgcaggacgtggaaccctgtgtgcttgggtcgtggccgtgccttccggatgcttcgagggaaatgacctggctcctggtcagacataaaagtgggaagtgtattttccctctgatgttgtcactactggctggtgccgcagacggactcagaaagcaccgtttcattttgctcgagtaaagaaggcaggcgcagagtgctgctcatatattgattgactcatcaaatgatctgctgcagctgcctgcatttgtttacagggcgaaaattaatgccacagatgtttactgtataataggatttgaaatctgttggggggagcacccgttgaaaccattgggccaagaatgagaaaaacactttgcataaaggaggatttggttcactaagtagcacacggtgcttgctgtcaaatgctaacaagaaacatgggcctcctctcccttggccagcgctggcgttcgcgcctggctccctggctttcttctacactgtgctttgatgtggcaccttccaaagtgttttcatgatggagagggcttcctctgaaatgtagcacccgagcctaattaactgatgcgtgattcttcattagcatctgggcaggcctggggcccccagttccctttccttcctcggcccctctttgcagcgggcaaccctggattgcccagcgaggctgcctggcccttgggtgtctgtgtctggggttcccctggtgaccccaccagctcctgttgtgtccctgccttccactgcctggagccaggtctctgaatgaatatagccatcctccgagacgggagctgctttttcttggcacagcatctaagccctgcaaccctgagtgtcttgacggcacagccaattcctcgctatgcccaagggcttttcccaggcatcagggcagacagggacccccagtgcttcttagagcctcctccagaggaaatggctttggggtgtgtctcccagtcgaggacggaggacatggcaggctgctggtgctcctggtgaccattgggaggccctggagggagcctccttcccaggaagtttccttccagtgggttcgagtgtgcatactccgtttgtattttcactttccttatgtttttctcttcagccagctctgattggattcaccacagattaacattttccattatacgttataatgtgtttttttaaaaccaaatctcccttcacagattgctgtctttataatataggaattatttctcagtcactttaaaagtcctgcttcattagcttggtgactgtttggtaatttgcaaagtcactttcgcaagttttaatactgcccggttgaggatcacagcaataaatgtattaggtttgaatagtgttatgattctgtctgaagtgaaaaaattagaatcagtcattagctctgacctcagcatcagcccacaccgtgcaggagatgatgcagatagatgatgcgatcacagcctccgccatgggaagaatcctgggtaaggccttggagccctttgtctcagctctttgccaagactcgaagcagtagctcctacatctccagtaccttccacgtttctgttctccttagagtggcttaaagctcccccttccatataagtctctcatgtctagactcagccctccagggaaggcaaatggagactttgaagcccccaaccttgggctccccctccagcttttttgacagatgatggtacctgctgagagaatgtgaccagaggctttcattgggattttgggggccattctgttttcttcctcctcctgtgttgaggccatctctgagccatgctgagaaaacagggaggttgccaagggcagagatgtccagcccctgctctgaggctgtcaagtgcctcctcagggagaaggggagggtgcgcattgctcgattttgctcaattcccagcaggcttctccacctcccaggaggcgcctctgagtccctcccagcccgagactctttccccctggaagagagggtgggcaggctcggggagaaccccagagcctcatgtggccatgtcgtgtttcatttgccctgattaatttggcatctgtatgaaccagagggagtggtgctcgaccctaacctttcacagatgttccaggccgaggttttctggcaaaatcgattttgacattttgataagaaccgttttgctgtgttctgtattttgaatctttgactctaagctgttctgaaaaccagctgtgaagctaaatcttgtttgtaaaatctgcatactgcatcagcagcagaaaacgccagagcctcgaggtcatttcatagacacttgaagcaagttaggtgggatgcgaggatattgaattgcggtggtttgtcagacttctgccatgggaagcattgtgagagatgcataatgaatgtcttgaaccctcttctgtctcttgcagtgtttggaatgcaaaaaaaattagacctttaatggaaagatttggtattcatgagaaagacagagtccctactacttaggaaacttggttgccttgtaaaacagaacatctgtatcaggagcacggtgatcttttgtcatttggtataaggaaaaaaattaaacattggattggaaacatttgaggtcactgtgtaaaaggcacacacctgctgtccaaactgaagttctcatttgcaagcgttatttgagggggaaaaggagtggtttccaaactgccttagcttccaaagaaatggcttgcttccctgcctccctgcgtacctgcactcagaaggaggctctgtttcctgcttcactgtcggagacctcctgaagaaataacacaaaccgacggggacaagcagagtatgcaaggagaaaggtccagagcccaggcgggagggaaaagatgaggcgagtgaccggcaacctcccacctgctctttctcacagcagacagccagtgggaggtgatctggtgggcggggacattgcagctgccctagggctgcctctgacatgagggccactgcaagttcttgaccctctttgtctttcttccaccgtgggtcccttgcatgacagggacgcattctaggtcttgggagcatttcatgaatgacagtggacatgctgttaaaaggctggatgtggcccctgagaaggctgcatggtgacaccaaacaaagaccaaaggaaccaggagccactaggcctgggctccggccacgattctgctcctggcttcctctgtgatgtgggcacagccatctccctttggggcactgggtgtcctgtgtgtacctggggacagtgggatggatgagcagggccctggaatttccgagtgcctgtggcaagccattgttttctctggagcatcactgtacagttagggtgggtttgtggcaggtacttagagaagtcctagtaggagacagcagatcaaaatacagggagatgctgggatccacccactttatagttaaggggtaccctttctagagtcagaagatgaacagattgaccctggaggtaacccccacccgagactcccgtctgtaggtgttgaggtttgcatttgatagcaggaaaaggtgctattaagatcctggagtcattgataaatgaggggtgcatcagtgaatgagcctgtcttagatttcctctctttttcctttgtgaggtcgatggggtttatcttcagctctccaggcctcctcctctgtcccctttccaaccccgccatcacttcccatctctgggcacttagatctttcactgctgtccacatccctttctggcaggagaggatctgagaaattgactcacactaaggcaataatgaatttatgtgtaatctgtcctgtgcgtgtgatacttgctctaaagaggactggatgaagagagtacgcttgcctgaagggaaggggtgctgatggtggggttccaggcatgtgacacccacccgagttccgggatgccctcctgtcccccacaccagcccggaggctggaagctcttgggaaaggagactggtcaagggcttgtgggcagtctctttgggtttattggactccaaatctttactgtccaggagttaaaaggtgatattcttcctctcagctcctcagggagtccatggtttggctgtggggagagcaggtctgtttccctgcagagcccctccccactccagccgggcttgtgggtgccagcatggagcctgcagcctctgcgtgtgcacatccttcattaaatatctctcctgtcctgtgggcagaacatcccctgaccagtttgcagtctgtccacactgggcccttctccagccaggatgagtaaaaggtacacggctgaacatcagtgccagtgagtgagaggctacagaggcacggaacaggatggtggcagagaggtccctgggaagcctgtgccggggcagcaggggtgtggggggctgtgggccggaggaggcagcatcactgtggacaggcaggaaggtggcctcggggggaaggggacagggcagaatgagcctttcccaaaagtgagacactcaaagcctcgtcatgccgggcagcgcccatccctgcctacctgtcccttttgctgtctcggagggagcctgtgggagggaggtcgagatcccagcctctgtgagggcaccgttgggggggggattgggcagggaaaagagtggcgcccacagagcaggacacggagaagccttgagctggaaataaggaggccaatatctaggcctgacctgtcattaacgagccatgaggcatgaggtctttttttttttttttccaagagatcctcccacctcagcctcctgagtggctgggaccacaggtgggtgccaccatgcctggttaatttttaatttttttagggaagaggtcacaccatgttgttcaggctggtcttgaattcttgagctcaagtgatcctcctacctcagcctcccaaagtgctgggattactggcgtgagccactgcagccagtgagccatgaggtcttgagcaaggccgcccctctgttagaagtccccttctctatgcctcatggttccacagcctggggtaccccagctccaaatgacacatctccctgcgtttgctgtgcacgtgcctgggtgtgggtgatgctgatttctaatgcatttcttcattcattcagttccacatttatggggcatctcttctagagctagctctgtgccaaaaaggaggtataaagataaatagagcaggcgcggtggctcacagctgtaatctcagcactttgggatgccgagatgggaggatcacctgaggtcaggagtttgagaccagcctggccaacatggagacatgtttaatagagacatggccaacatgtctctacaaaaaatacaaaaaaaaaatagccagatgtggtggcacgtgtgatcccaggtacttgggaggctgaggcaggagaatcgcttgaacctgggagacggagattgcagtgagctgagatcgccccactgcactgcagcctgggcaacaagaatgaaaactccacctcaaaaaaaaaaaaaaaagataaataggagagggtctctatcttcaaggaacccccagcctagtggtggaagcagatagatacatgaatggtgaaagttaaagtaatgtaggcaggacagtgagagagacatgtgggatcagagagacaggcgaccagctggcctctgagggccagagagggcttctcatcagggaggtgatgtctgaactgaattcccttcaaaatgagctccctctgacctgcactgactattcacagatattctagggctcctaccttgtttgcaagaagctgagccacacgccctggtgaatacaaaatagggtaaggaattttttggccagttgcctgcagctttgctaatcctgattgagcattcttcataccaagaccaagacgatttcagaagtatctgtagcatgtgtaacttctgtccttttgactgttttggggacgacatttaattttatggcaagcagatcattcattatttcagatgacccggatgggctcatactttgaacagtttagacagtcttgtcttcactgctagccctattcctttcttgctaagtcctccactaccaccgccatactcaccctggcttgctcctcttactgtcaccagtgggttataggccagcagaaactgtaagagacgggctttcagaacaaaaattcccaatcacctctctgttcccaagaaaatcagggatcagaaagaatttttatgcagaaaaaagtatttgacaacacttaacacaaaaattaataataaaaacttttggccgggcgcggtgactcacgcctgtaatcccagcactttgggaggctgaggtgggcagttcacaaggtcaggagatcgagaccatcctggctaacacggtgaaaccccatctctactaaaaatacaaaaaaaattagccgggcgtggtggcaggcacctgtagtcccagcgactggggagactgaggcagcagaatggcgtgaacccgggaggcagagcttgcagtgagctgagatcgctccactgcactccagcctgggtgacagagtgagactctgtctcaaaaaaaaaaaaaaaaaagcagaaacaaagaaacaaaaaacaaaaaaaaattttttagcaagttagggatagaagagcccattcttaatctgataaaaggtagctatcaaaagtctgtagcacaggcaaatggaaactgaaaccagaatgagatataacacacccaccctactggtgaaaattttaaaagactgaggataccataagctggcaaggttgtggaacaacaggaagcttcatacattattgatggggatgtagatggtacgaacaatttggaaaagtacctggcagtttcttaaactaaatatacatctattgcatgacccagcaattcctctcttggacatctaccaagagaaatgaaaacatatgttcacaaaaagacttgtatgagaatgttcttggcagttttactcatagtcactgaaaacagaaagcaactcaggggtctaccaacaggtgagtggacaagtggaggtatttttgtacaacagaatgctgccctgcaataaagagaaacacattttgggggccgggcgcggtggctcacacctgtaatcccagcactttgggaggccgaggagggcggatcacgaggtcaggagatcgagaccatcctgactaacacagtgaaaccccatctctactaaaaatacaaaagattagccaggcgtggtggtgggcgcctgtagtcccagctactcgggaggctgaggcaggagaatggcgtgaacccggaaggcggagcttgcagtgagccgagattgcaccactgcactccagcctgggtgacagagcgagactctgtctcaaaaaaagaaaaccaaaacacgttttggatacatgccacacacatggatgaatctcaaaaatgtcatgcagagtaaaagaagccagaaacaagagtacatgttatatgtttcatttatatcaacttctagattaggcaaaagtaattggtggtacaaaatgatcctaaccatggcttcctctgttgtgggtgatggtgtctgcaatttactgggaaaagacataaagtaactttcttgagtgagtacaatgcctgtatcttgacagatgttggattgcacagtgaggcgcatttgtcagatgtgtcccatgatgcatttgagatccatgcatttcactctgtaaaatttacttcaaacaaacaaactgcaaacaaatattgaactctagctaatgatatgcctttagacttgtactgatgttggcaatttactctgaaatgcatcaaaaaataaaatggatcgatgaatgcacaaaaggatggctggatggatagttacgagatagagcaaatatagcaagatgttaattatagaatccaggtggtggaaacaagggtttcctctgtaaaatgctttcagattttctgtatgtttgatagttttcatagtaaaattttggaggaaaactgagcaatctatctttggattcatgcacatctggtaaaactagattcttaaaaatgatgggaattttatgcacaaagatcaggaaggaggtttccctttgggttaggcttgctaagagtggggctcaaagaaatacccacagtggcttaatgtggacgattctagttcctaagttggggtgaggtgggggtggggtaatgggtcttcttttatttaaactttgtgctttataaatacagaacacacatctttctatgtatgaagtgttacgtactattttttttttaattatatggctcttaagttgttttctttttttaaaggaaatagtggggtctcaggagtagggcagttctgtttttaataggctttaaatggtttgggcctaagatgggctgcctttcatcaccagggtgagctagagttcaggagaattttgaccttatttgattgcaaaacttcaaagtgatgggcattttcagtatgcttacttttcaatgtgagtagaaaaacatacaaaccagaacagctggaatttaaactctggtaacacagacctcaagtccggtcaccttcccttctccctgtcagccagtgatctcactttctacttctccagcccaaacagaagacaggaaatcagactgtcctcacccatgccccacaggctaccgacttccctgtgtgccttccgttctccacctccctgagctctggatcccaccattttttcctcttcatcttcagttttgttttcgttcttgtttttgtttttgagacagggtcttgctctgtcacccaggctgaagtgcaatgacacaatcatagctcactgcagccttgaactcctgggctcgagcaatcctcccacctcagtctcgcaagtagctaggcctacagttgcacaggatcatacctggctaattaaaaaaaattttttttgtagagatggggtcttgctgtgttgcacaggctgttcccaaactcctgacctcaagtgatcctcctgccttggcctcccaaagtgctgggaattacaggcatgagctaccacccctggccttctggacaaatgtagaggatcgccttgcccctccgtgcctacttcatagtattgttccataaagattagaatggttcctggcacatagtacactttcagtaaaaaacttagctgtggctgggtgcagtggctcacaactgtaatcctagcactttgggaggaggctgaggtaggcagatcacttgaggccaggagtttgagaccagcctggccagcatggcaaaaccccatctctactaaaatacaaaaattagccgggcatggtgatgggtacctctaatcccaggtacttgggaggctgaggcaggagaatcatttgaacctgggaggaagaggttgcagtgagctgagatcatgccattgcactccagtctgggcaactccatctcaaaaaaataaaagctgttattattaatgacttaactctccctatcatatatcctttctatatcttcagctttactccccctgtccctccccaaatgtcctgaaattgtccaaagtggctgtctttaccttgtcacctggcccccaccaacgacctcctggttgccatcggacgtttctcagtcctcgtttctttgactatctcggcagcattgattggacactctgagccccgtttttttttcttgaaacagactcttccctaggccctctggagtaccatgcttcctggctttccttccaactccctgaccaccttctctcttctctttgtgacctcccattcctatgctcatcccttctatatttgtgatgctcaagattcagtccaaggcctccgttttccttactttaaaaactttctttgggaaatttcatctatttttatggattttgtttcaatgatgacacacagttctctgtctacagcccaggtagtaccactaagtttcagaacagtaaccccatttgactactgaccacttccccttggattccccacactgttttcctctctcccctgacatgcgtttctcttgggttctctttctcagtatatggtaccatccatttgagttctcctccctgctccaatcagtcagttggtccagtcattcaccacttgtgttgactgtacctctgatacctggaagtcacttctttctctctgtccttcttaagcccatctgagttcagggttccatgatctctttcctgtattgctgcaaaggcttcttcctcttctccttgctccctctcttgccctcctctacttcattctataaacctcaattctgtgtatgtcattccaatacttaaaaccttttagtgcctttcctctgctctcaaacaagatccaaactcctgaatttgttcacaaggcagcactcatgctggctctagcctctttccccacattcctttcatctctctgtgcccttttcctatgggctttcaggtctctgttctctcttcctgcagccctccttctccaccctgcacagttagctcctgctcatcctctagtgctcagcttcacagtcacgccacccaggaagccttctgtgatctgtttccttcactcatgcagcaaatctccattgagggctgatatggtttggctgtgtccccacccaaatctcatcttgaattggaactcccacaattcccacatgtcttgggaggtgattgaattatgggtacgggtctttcctgtgctgttctcatgatagtgaatgagtctcaggagattggatggttttaaaaacaagagtttccctgcacaagttctctctttgcctgctaccatccatgtaagacatgacttgctcttccttgcctttcaccttctgtcatgattgtgaggcctccccagccacatggaactgtaagtccaataaacctctttcttttgtaaattgcccagtcttgggtatgtctttatcaatagcacaaaaacggactaatataagggcccattccatccgggcaccaagggtggagtggtgaaggacgggcaagggtctcattctcagagctgacagccactggggaaaggcagtaaggggcaagcaatgaatctgattggctccaatagtacaatagcaatgaagaaaacagggcaaggtgtgcaacgccaagcttactgtgtgtgtctctctgtgtcggcaacgtcagatcctctcgcctgagaatatctgaactcaaacttgaaggagatgaagaaactagccctgcaaagattagagggaaggacagccctggcaggaggaacatgtagaaggccattgggcaggggcgtttcttgatgtgttagaggaatagaaagaaggccagggcttctggagtatggtgggtgcaggagaaagcagggagctgtcaggtcccaacagttggctggggcaagaccatgtatggtcttataggtcatggtagggagctaggattttatttttggtgcagtggacgccattcgaaggttttaaccaagggagttccacagttggacataatcctcatataatacaattcaaagagtacaatttgatggtttttaatatatttacagagttgtgcaaccattgccacagtgtgtcttagaaccctaatcagttttcatcatccccaaaggaaaccctgtacccatcagcaggcactcccttttccccccagcccctccagcccagggcaaccacaaatctactttctgtttctattagactgatgtattgtggacattttatataaaaagaatcatacaatgggtggtctcttgcaactggctttttaaacttatggtaatgttttcaaggtttattcatattttagcacttatcagtaagtactttgttcctttctatggctgagtaatattttgtggtctggagggaccgtatttcatttatcagctcctcagttgatggacatttaggttgcctcctccttttggctaatacaaataatgtttctgagaatcttcctgtatgagcttctggatatgtgccttcccttcccttgggtatagacataggggtggaattgctgagccatgtggtgactccgtggctgatcttttgaggagctgccaagctgttttccaaaatggctatgccattttatgttcacaccagaggtttagttttgaacgttttggcagttccagatctctcctgccatggaaaatagattgtaggcagcaagcggggaggcaggaggacctgtgaggcactaagggaggctggatgggcctctctgccttcaagattgtgtaacaatagtccctgaaaccatgctgaggagaagagtgaggctgaacaggaatgatggggagtgaataaaccatgtggttggaagtcctgctcagcccgagaatgactgggtgatagtcctggtgccaaagacctagagccacagatgctggtccgagaagaggtttgcagtggtggtttcagaggtggtgctgttattggtggctggaggtgtgggtggccaggctggggtggggggaaaggtcactggatggggggagaccaaggagcgggaggccggggggtgggtgggtcatcatatggatgttgaggtcatccagaatagtggcaggggtggacctggagaggaagagagtgacccaggcctggcagaacagagcaggcagcacggccaggagtccacagatggcagtgatgggaagcgagggacggcagtgatatggaatggcaccggcttccagggaactggggttttgatggaggaagcaggagaaatactttggaattggtaacagggaacaaggaggacatcaatttagctctaggctctgcaatacttggggtatgggagaaaagatggcattttgggagtcctagagagatggggtccttggggaatggcaggtttcatctgaggcctgacctgaaagcaggtggacaacggtgaacagtatgtcaatgatcctctgcgggacccaaagcaacatggtcgaaggattggggagggtgcggggagcaggccagggagggacagtgcctgtgcaggaattcccactatatgctcttagcacctgtcacatccttatcaagctctaccctaattactggtgcactcgttttccctttagactgtacattttgtgttatagagagcatatctttttattccttgctgtagctgcagtttctagcacagatatgctagcacctactatgtgctcaaaaatgttggttgaatgggtgagagaatgctgagctcttcccagatgccatcacaatgccaggatagcagttagctgaggtttggggaggagggtgtatagatttagaggcttccccactcctcgctccccacgtttcttctcattctgactctagtgtagaagtcaagtccatcctatattttatctcagaagttttggcaaataacaaggcatgcaatattgactaagagcctccaggatcccacaggccccagtgggccccattaccagctatttggaagttgaggcagacagactgaattgggtcgttgaaggagtttgccagtttgtggtgggaattgagttgaatttattatcatttttgccagcaaccctttgccacatatttatttaatccaaggattctagagaaagctaggggtttgatgggcaggtggctggatgccagcgtggcccgtgtttgggctggcacccctcactccacttggcgctttattccaaagctgtggcacccctgcaacacacagcagccagtgtcttggggtctatgcccgtgcctaggactggcccatcctgtcatgtgcggaattgggcatctggtcagatctcacaggaaatgctgaatttatatttgcagctttgaaagccagggagaaacagaaatggacagatcatttgaaaattcaaattatttgttccttgtttttgcagcgtttcagccagtaaggtttgtttcaccttcataaaggatgattaatcgaactaagagaagagccctgtctaattgtgtgtgggtgtgtttggggcagtgtgatcattggaacaccaagagaatgatgcagacaaatatttatgccctctttgtttcctatttcaatggtaacatcatctgttaaagtattgctctttgcaggagtatcctgcattagaatgctcgtccctttgtccctttcggaattgtcacttttctttatgagaaagtgtttggaaaagcttcttaaataaaatgtagctgaaaaatgttgaaagcacgacagtaataaagtagacatcactgcctagaaaaaacgatctgcttttgaaaagaaaaactacattgaaactggccaaatcacttcaaatggctagattgcaaaatcatcccaggatggatgaatgttgtcaacatagaaatgagtggttggagatcttcatttgaaatgcattattaattacttcataagatgatacctacagacaagcatagagaataatgtaatgtacagctgtttacccaccacttagctttcttgatcaaatcttaccctttgccccatttaatttgatttcttaaaaagaaagaaaacataatgtatacacataatcttgatctaatttccttccctctggccccagtgatagtgtttttcaccctcatgcttcttttcttttcttttttttggagacggagtctcactctgtcacccaggctggagtgcagtagtgcgatctcggctcactgcaacttctgcctcgcaggttcaagcaattctcctgtctcagcctccccagtagctgagactacaggcacgcaccaccatgcctgactaattttagtatttttagtagatacggggtttcaccatattgctcagtctggtttcgaactgctgacctcaggtgatccacccgtctcgtcctcccaaagtgccaggattacaggcgtgagccaccacgcctggccacatattttcattccaaagtatttgcaatacttttatcacatatttatgtatttattaacaatacatggcattgttttgcagattttaaaagtttatatgagaccatccaatattctcttgcaacattgttcttaagtgttagatccttacagagagatgatagagagagataggggtgtgtgtatgtaataggtattatgtatcttacatatgtatatcataacaagacatacatatatttctagttcacttattttaactgctgtatagaattttattgcattaacatttatatgctagtgtctctctaagcgggggggtgtgtttacttggatactctctttttttttttgagatggggtctcgctctgtcgcccaggctagagtgcagtggcatgatctcggctcactgcaagctcctcctcctgggttcaggccattctcctgcctcagcctcccgagtagctgggactacaggtgcccaccaccatgcccagctaattttttgtatttttagtagagacagggtttcaccatgttagccaggatggtctcaatctcctgactgcgtgatctgcctgcctcagcctcccaaagtgctgggattacaggcgtgagccaccgcgtccggcctacttggatactctcatattcctaaaagtggaactgttgggtggtagagtacctataccttcagcgattatcattgctgtccaagatgtttgtattgatttatggtcccaactacaagtggagtgtgtgatggttcccatttcttcacattcccatcacagactttgtcttcatttctactttccttgctacagtgaggctgagcttcttctcatagagggttattggccatttgggtttcttctgtgaattgcccattcttttccttgctattggattgtctgtcttttagttattgattgatttgcagggattcttaatattttctagaccctgatcttgagtttgctctatgcattacaactgttttcttcattttgatacttttaagaaagtgttcctaatggtgtcttggtgggtagaaattcttagttttgatgcagtttttttttttttttaaattgagatggagtctcactctgttgcccaagctggagcgcagtggtgcaatcttggctcactgaaacctccaccttctgggttcaagtgattctcttacctcagcctgctgagtatctgagattacaggtacccgccaccccgcccagctaatttttgtatttttagtagagatggggtttcaccatgttggccagactgttctcaaactcctgacctcaggtgatccacctgcctcggcctcccaaagtgctgggattacaggtatgagccaccgtgcccggacaatgcagtttaatttaattttattttttatgttagtgcttcttgttcttgtttactaaatctttatcctaatccataaatattatcttctaaatagtttaggagtttggtttggctttcacatccaagttttaatctatctaaaattcattttgtgtaggaaaattctcctttttttccgtgttggaaagaggtgtcccatgcattggatgagtcatcctttccccagtgatgtgcatatgtcaagtctgtccatagatgattcctgtcttatgtcaagtagctgcctgtgcgtagatctgtttctgggccccttatgccatcactgtagtcgtcagtttgtctattcttgtctcagcacaccatcagttcagttgctgtagttcactgtagcttggaaataagtcttcacaggtggttgatcacattctcctctccctcctaccactatatatatgttctgcatttcacctattcttggcctttgctgtttcatgaacattacggaagataatcttgtcaaaatcctcaaattcctatggggagattttgattggaattacattaaatctgtcagtttggtgagaattgacctatttaggatattgagtcttcttttttaaattaattggttaattaattaattaattaattttagagacagagtcttgctctgtcacccagtctggaatgcagtggggtaatcatagctcactgcagcctcgaattcctagcctcaagtgatcctcccacctcagcctcccgagtagctaggactacaggcatgtgccaccatacccagctaatttttacctttttggtagagacagggtctcactatgttgcccagactggtctcaaatttctggcttcaaacaatcctcccaaagtcctgggattacaggtgtgagccactgtacccagctgagttttctatctttgaacagaagatctatcttaggttaaacactaataatttattcttataaactttagcttttaaattgcaattatgtgttattttaaaaagtatattttctgtttgttgctattgtatataaattaatttattttttgtatgttgaccttatgttaggcactttggtggaatcttttaatactttgcctctagattctttgaattctatgtagataattcacactcaatgaatattgagagttctttcttcattctcaacccttagagattttatttcttattcttgcattactgagcagattagaacttctgttgtactagacttctattgtattagaagttctttttgtttgtttgtttgtttgttttttgagacagagtcttgctctgttgcccaggctggagtgcaatggcacgatctcggctcgctgcaacctctgcctcccaggttcaagcagttctcccatctcaccctccctagtagctgggattacaggcgtgcaccaccacacccagctaactttttgtatttttagtagagacagagtttcaccatgttggccaggctggcctggaactcctgacctcaggtgatccacccacctcggcctcctaaagtgctgggattacaggcgtgagctactgcatccagcaattgtactggaagttctgatctgcacagtaatgcaagaacaagaaataaacttgaagttctaggacagagaacaagaatagaactagaagtcctagtacaacttctagttgagtagaaatattaatagcaggaactcttgcctcatgtctgattctaaaggagattcttctagtgtttcatggttaatagtaatatttgctgtaggggttttatttgttggttggtatagtataaactctttattagatcaaggaaggtttcttctattttagtttgctaagaattttaaaatcacaactggatgtttaatattattgaatgcttttaatgtcactagtaagaataatcatatactttttctcctataatctgttaacattatgaattatagttattttctaatattaatctaactgtaatcctaggataaacccaacttgttcatggtttattatttttagacattactggatttggttttctaagattttgtttaggagttttgcgtctatgttcatgatttataatggcttctatatttcttttctcatgatattcttgtcagacttaatgtcaaacatgagtttgaggccatggaataattatgctgtggaataatttgtgtaagatgatgatttggattgttacctgaatatttaattagaactatttaagtggtaccatcatctggacctggtaatttttatctactgcttcttttttgtgtgtttacaagaatattcaggtttttatattttcttaagatggtttagataagtttttttaataatttgtcaatttcatttagactttttttttgttgaatggagtcttgctcatgccaggctggagtgcagtagtgcaatctcagatctcagttcactgcaatctctgcctcccaagttcaagtgagtctcctgcctcagcctcctgagtagctgagactacaggcatgcaccaccacactcagctgatttttgtattttcagtagagaagtggtttcaccatgttggccaggctggtctcgaactcctgactggacttgagctgggctcaagtgatctgctctcttcaacttctcaaagtgttggaattacaggcatgagccactgtgcctggcctaagcttctaacttattgtcatgatatagtcatatatcctctcaataattttttaatatttgaagcttctctggttatgttcttttcactcccaatattatcctttttaatcagaattttgtcaactgtattgttcttttcaaagaaccaacttttgactttgctgtttgtatctattttagatttgtttcctgttttgtgaattccgtttttatgctgttttcctactttctattctttgaatttattctactttccttcttctaatttcttaagcaggagcattggttcattaattttagctttccctcttttctatatgaacatttaaatgaacaattcctttctaaatatgttttagcgtatgttccatgtgttttaacatgtagtagtttgattatccttcagttcgcaatgttttttaacctccattatgatttctgttttgaattgtataaaatgggtttctttttttttttttttaattttactttaagttctgggattcatgtgcagaatgtgcagatttgttacataggtatacatgttccatggtggtttgctgcacccgtcaacccatcatctaggttttaagccctgcatgcattaggtatttgtcctaatgctctccctccccttgccctccaaccccgacaggccccagtatgtggtagtcccctccctgtgtccatgtgttctcattgttcaactcccacttctgagtgagaacatgcagtgtttggttttctgtttctgtgttaatttgctgagaatgatggcttccagcttcatccatgtccctggaaaggacatgaactcattgttttatatggctgcgtagtattccatggtgtatatgtgccacattttctttatccagtctatcattgatgatcatttgggttggttccaagtctaaaacatatttcttaatttccaaacatatagggttttttctgggatctttttgttaactgatttctaatttaagttttggtctgtagttcacttcattgttatttggacaatatgatgctagcggttttgaaattttttgagacccagtattggttccagcaaatatggaacatggaatgttttccattttgtgggtgccatgttctaagtgtttgtcgaatcaagtttgttaatcatgttattcaaattttccttatttttcctgattttagtttcagtttgacctatactgagaaaagtgccctaaaaatctccccttttaatggtggatttgttcagtttctcctggtcttcccttcagagctttcctttattgactacttcacttttgaaaaatgttttcaacctgttctcctggaacgtgaggaaaatgcagcttgttccttgttccatttgtccagtggccagttcaagaaaggttggacccacatctatcatttccatcagcagtgagctgttcagagtatgtgcaattgccttggtttggagacatggctgcacacatttaggactctggctttgctcaagctgttcccctgcacagaatgcctttaacctctcccttttccctgccccttgttcacctggtgaactctttctctttccagccctgctcaaatgttacctcctattacgattatttgtttccacttctgcctcccccagtatctcagggccaacacagaccaagtggtcaacaagtatttattggactgaaatagtttctgctcttaagggactcttttctatgaattattctcccctgcccccaatcaaatccatcccttaaattttaaaaaactgagatgaaattcacataacataaaattacccattttaaagtatacaattcagtggcatttagcacgtccacgatgttgcgcagtcactgctacctaattccaatgtgctttcatcttcccaaagtgaaagcctgtacccacggctcaggcagtccctccctggtccccctcctacagctcctggcaggcactcagctgccttctgtctccatggatttgcctgttctggatgtttcatagaaatggaatcatataatatgtgaccttgttgactggcttccttcactcctcatgcagtttctgaggtttgtctgtgttgtcgcacatgtcagtgcttagttcctcttcgtggtggaataattgtctattgtactggaccacattttgtttatccattcatctgctgattaatatttgggtagtttcccatccctgttccatttttccttttctctcactcagccccatcattcagcattttgcttttcattgtcacgggacaggttcaggttgaatcaagtggaggtggagatcttgtcctgtgacttctctttttttttttgagatggagtctcgctgttgcccaggctggagtgcagtggcgctatcttgcctcaccgcaacctctgcctcctgggctcaagcgattctcctgcctcagcctcctgagtagctgggattacaggtgcctgccaccacgcccagctaatttttgtatttttagtagagacagggtttcaccgtgttggccagactgctcttggactcctgagctcaagtgatctgcccacctcggcctcccaaagtgccgggattacaggcatgagccactgtgcctggtccccaatgacttcttaatccaggagagcttctagggaggtgaaggtatgcggagcatgaacaacagcatgacaggccttggaatgatcatggtggtcaccaaagggggcagggcatggagcgacttaatgagcacagagagcctgaatttctgcacacacatctgatgagggatgcccagcctggggatgctctgtgatctttaaacaacggtctcactgggcagctgagcctctcagccagcctgatgttttcattcttgccaggctttccctggggagacaggaggacactggactcagcagaaagaaggacatttgcttgctaggaccatgcccgtgatggctggcatccccggggccctggagggtgaggcgtgaggggcagtgacgcaaatgcacgatctcctctcatggtgggtctttgcagactctccgtctgctatccccaaggtttgggagcagccaagtgtttaatgatgttctgcaccagcaattttagactctcggagctaaaattagatcccttcctggtgcctcggggaggatgggctggctgtgtccatccatcccgtgctggagcgtggctggggacaggctgtgcgggaggcgcaggggtgaggctccgaagcaagagcagccagacgctgcgtccctcctgtctcttcagctgcgccttcctcaggagagacagaaagagcctttggctgccctctgtcctcttgagggtcactatgtctatgtttgcatcccagctttacagcttcccagttctctggcctcaggcacatcatcctaaactgggcacgataatccccctgaggcggagttgtgagctgaaatgaacagaaggcagagcggggtgcagggcctggccgtgactgaggctccacgaacgctggctcccttcttaaatttttgtggaactgtgggaacacacagtttaatttttttttttaagactgattttcactctagtcatccaggctggagtataacagtgtgatcttggctcactgcaacctctgcctccagggttcaagcgattctcctacctcagcatctcaagtagctgggattacaggcacgtgccaccacaccaggctaattttgtatttttagtagagatggggtttttccatgttggccaggctggtctcttaattcctgacctcaggtgatccacccacctcagcctcccaaagtgctgagattacaggcgtgagccaccgtgcccagcccagagcttaatttttttttttaattatttctttctagccttctttacatggtccctggcttgactgggggttgggaggtgcaaggaggaaggtgacagttgactttccttcctacaaaaactcaacatggctcagtggactggaccccagcagaacttagcagaacccaaaaaggcccagtggaacccaggggacccacagggactcaacaggacccagcaggtaccaacaaaacctagtggaactcagaggggcccagcctttaccatgggttacctttgacaccaaggttcccccacccctacccttcaagatacctgggtacctttccttgtcattgtgactgtcaagccctctaatcagtccacacgagagcccctccactcctcacctcccacctccctctccctgaggaaaaacagctgatcagggagcagtgcaaagcaagctctctgggccttatatcccctgaaggagcagctctgtcaggccgggaaaatggttgtattattcttctgcagaacttattagattagaaacttagtacaaacagccccagctgcaaccgctatacatagtcactatcaacaaggaaaatttatgctttaaaaataaaaagaaactcaagtgcattagtcagagtgaggaagcgttcacgaaaaaaggtttgttctccaagtaaacagccacaatggaattgtaatcaaatttcttaattatttctataaatcttgggaacataaaaatacacaaggccctttttcaaaaagtcactgtttgcaagtgccttggatgagagaagaggtaaccgaaacagctctggcatgactggaagattccagaaggggtgaagccacgattcgggagctgagagcacattgcctcgtcacagaccaggagcagaggctggggggaccacttctgagggggcgccacgagagccgcatttagggcgactgcataaagaacctgagacccagttctgcagagctcagcttcctccagtcacgagaggccgtggacgagcaggaggcaggtggccctggggggcctgggaattgggaggagttagagctgcttctagggaggcaggagaagctgggcatcattggtgccccacggcccaggcgaggcagaggtgccctgtctgtcctcgtcaggcaggcagcttgtgggtctgggatggtttttccctgctgtgtgtctaaggcagaagagattggcctgacatccggatgtcccatcatgcctttccccaggattagggagcagttcttttataaactatgtttgaaactaatttagaaaattagaaacatagaaaaaaaatgtcataagttatcttggtacatcctggtgtgtgtgtgcgtgtgtgtgtgtgtatgtgcgtgtctgcaggtgtgtaggacaggaaagtacaggagtgggagggtcaggcactctggcccatgtgcccaagcacacacttggatgttggcacttttcaggtgtccaggtgttgcctcttgtcccagtggacactctgggaaggacaatagacagggtcgttgacatctggccacggtgcggctggcagttttaatgccatagaatatgtgatggagacagatgcatgtcaataacataataaagatatttttccatccacaaatgtctgatattggaattactattcttctgttttctgttctgctataacctgcttaactcttcaagaaagccagagtatcttgtttgaacagttggccacacgctcgcatgataacacaattccattaaaacattcataccttcagcagaaaggcaccccgccaaatgctctatgtgttgtattaagccataagcagaattaaagtgcggaatcccagcctttccaaatagtgcaggaattgcgtggggggctgcaggctggggaggagcaggcaactgcactgttaaaccccaggtccaaatcctgcagccaccccagccgcttgaagcggggtatcccctgggatcaaaccgttagtccatcaaacactgccttagtgcaaagccctgtccctggccgaggcttctcccctcccctctgggcagtcctcagctgagcagagcaggtgcccttgtcctttcagcccccaggtatttgcaggtcctggactgacaggctttgcctgaagccatgtgggtttcagaaaggctctttcctgccgatttacactgtgacttcacaaataagctattttcatggtcattgatcttgtcggtggtccctcacatttccccagatcatctctaagcaaactctgaagtgggtcagcaaagcagctccccccagggagggcagcctggagctgctgcagctcccaccacctgaccttggaggtatgcacctcacttgggctattctgacctcagattcctcctcttcggtaattggggtatagcggggatagatacctcttgattcatgttaaaacaatgtaatccttttgcaatgtgatgagctgcccctgctgcattttgtcagatcagagttttgcaacaaggactctcttaaagtgagatgcacttgtcactgcagctggatctttctgtccgagcaggaggagcagcgtgaaggtgaaactgaagggaagaagaacccacactcaaggcattctgagctctgtggtaaccagaagccctgggtgactggggtgcttgagggagatgtaggctgctaactccttccactttggtgtctgtacagagggagggaccttttccaagggaacaatgcctttatgttctggaagagttctgtactgagcccatagggtatccttaggcctcggagtcaggggcctacacatgctaaactccagctgctctttgagtctagacactcgctccagctccaactgcttctgattctacagctcgttcgcactttttcctggttgccctgggttagccattgggatagacagatgctgagggcataggagcactcacgggtttctactctggatccttccatagcatatttaatcaagacatttttgcaagaatagatgaattgggaggcagtatagtaaagcaatgacaatgtgaattgtagcaatggtcaggccacccctggctgtgccatcttgggcaggccctgtgaccagtgtccacaggagagattgttgtggaccaggcctggaagtggcatgcatcatttatgccacttcccactgggcagaagtgagtcacaaggccccactagattgcggagaggctggaaaatacagtttaaaaatgtgcccaggaagaggaggaggaaaccacattgctgagcatctgcataacggggtgcctggggctggctgggcaatagaccatgccccctcccctcacaaggcccctcctacccaccaaggctccttcccacagaggcccctcccacacactgaggcccctcccacccatggaggctcctcccacacaccgaggctcttcccacatactgaggcccctgtaacacatcaaatctcctcccccatgccaaggctcctccccacacagtgaggcaccacccacacaccgagtcccctcccacacactaagtccccttcccaacacgcaggctcctcccacatgctgaagcctctcccacacattgaggtatctcccacacactgaggcttccttcagcacatcaaagccctgtccacataccaatgcctctcccccaacacagaggactctcccacacactgaggcccttctcacacacacaagtcccactcacacagaggcccctcccacaccctgaggcccccccacacacactgaagcccctcccacacactgaggcctctcccacacacaagtccctcccatattgagacccctcccacatactgagacctccagtgcatcaaaactctccccataccgaggcccctcccatacactgagactcctcccacacactgaagcccctcccacacattgaggcctccttcaacacatcaaaaccctgcccatataccagtacccctccccacacacagtcccacacattgattaccctcccacatactgaggcctctaacatgtcaaagccctgcccacacgccaaggctcctccctacacacagaggctcttcccacacactgagccccttgccacacacagaggctcctcccacacattgaggctcctccccacacactgcgcctcctccccatacactgagccccctccctcaggcggaggctcttccgacacagaggctcctctccacacacggaggctcctcccacacactgaaccccctccccacgcgtggaggctcctcctacacactgagccacttcccaagcactgaggcctcattcaatacatcaaagtcccgctcacatgccaaagcccctcccacacattgacctgcctctcttcctgagaagtccctcctgaggaaaaggcttgaacacttaaaagaacaaggaggtccgttctcttttctgtatagcttttgttcctctctctgtgctcagggctgccagaactggtgcagagtgtagggccataggaaatatccctcactatttctccccaccatgctctatctctgccactatttttaaaatgctcttttaaagggtttgtcaacagttatcccccgtttgtctctgccctgatttatatttctagtgactattaattgcctaccaaatgaaggctcagcatttgtaattaggctggcaaattctacctgacatcttcggctctgtgttggggcaggaagggagcatgtgttaatggtgttgaactaagccacacccctcccccagcccgctgattaaccccaggttcactaatcaatgaagtctaactgattctctttgcatttacatcctgccttgactcttagccaagggctgagggctttggttccaaaatgctttctatgcccagagaggatgcctctctgccttgttcctgcagaaggaactctcaccctgaatgggtagggtgggggttccgtaaagagctagagggagaagggcacttgcggagtagccaagctgcagagagctccctgtagctgttctggagaatgaagccctcctcagcctcctttataaaaagtctgccataattcagctgaacacaacatggtaccaagaagccacaacctcagggatttccttggttttctgttctgttaatcttttcaaaacacgattggattggaagcatccattctcagccacagcaggttgcttggcagtggccgtggaggagctgtccaggatgctggctgtgtgaaccagggaacagcccaggattcatgtatacttattggcacaattggtgccctaagtgaggaacaccagtaccaacatcccagggtgtcttcatgaccaaggcgaagcatctctgtgcccctctgtggtcattgcttccaaatacatgaaaggacaaatgatgatatgggttctgccttgcccacagcaggtgctcaatgactacactcagaaaaatggctgctaataacaattcaaaagagttatatatcagtcacgaatatctatgcatgaaataacacaggaaccacctttataaagcagatactgcaaaagaaaccaggaaatgcagagaaaaccactaataatgggaaaatttaacataccacattcagcacaaggcagatgaagtggaaaaaaataacaatggaatcaagaagataggtattatggagatatagatatctttatgtatacatttatgccacaataatatagaatatactttcttctcaggtatacatggagcatttacaaacagttatatattagctcacaaagaaaatttcagtaagttctataaggtagaaatattataaacaatactttctaaccacggtgcactaaaactggacattattaacaaaaagatgaaaataccctatcatctggaaatgaaaaacaacctattaactcttggatgaaatggggaaagcaaattaaaaattaaaaaataatcataatgaaaacactacctaccagaatgtatgagatatatttaaagcagtgattggaaggaaattcatatccctaaatgcttttattaataaaaacacaaaaatgcaaataagtgaactaagttcttaccccaaaagctaggtaaagaaacacaaggtaaaccaaaagaaagcacaagaaacataatagtaaggataaaagcagaaaatagtaagatagagaatgaaagaacagtagacctgattagcaatccctaaatatgggtttttaaaacattaacaaatgaatgaaacccttgctagcataaaaaatggagagaaagcacaaatatatgaaataaatgacaaaagagacataaccattgacatagaagacatttttaaaaattatgagattaggccgggtgcggtggctcacatctgtaatcccagcactttgggaggctgaggcgggtggatcacctgaggtcaggagttcgagatcagcgtggccaacgtggtaaaaccgtgtctctactaaaaatacaaaaattagctgagcatggtgtcacgttcctgtaatcccagctacttgggaggctgaggcaggagaattgcttgaactcgggaggcagtgagctgagatcacaccattgcactccggcctgggtgacaagagcgaaactacatctcaaaaaaaaaaaattatgagattattttgtagacctctattaaaaatatgaaaacagtatcaatttggtataggaagcttaaagcttaaataaaccaatttccataaaagatctagaaaaaatcctgaaggaactaccccaaatgtcactagacttttttttttttttttttttttttgagaccgggcccccctctatcatcctgaagtgcaggggtgtaataacggctcactgcagcctccatctcccaggctcaagccatcctcccacctcagcctctcaagtagttgggaatacaggtgtgtgccaccacagttggctaatttttatattttttatagagacggattcaccatgttgcccaggctggtcttgagcaccggggctcaaacggtccatctgtcttggcttcccaaagtgctggtattacagatgtgagccaccacacctggtccaaactttcaaagaccagatattcttcattctttattaattgtttagagaatcgaaaataaatgaatgttttctaagtctttcttgaaagtaagtactacattgacacctgaatctgaaaaggcaagtaccaaaatgaaattacagaacaatatcacttataaacttataaatattgaagtaaaagtgctaaacaaattattcgtaaactaaccaataccgcaataagaaatcaatgcaccatgaccaaatggtgtctttttcccaggaatgcaaggttggttcaacatgaggaaatctattagtgtactatattaaggtatctaaggaaaaacataatgattatctccataaatactgaaaaccctttgaaaaaattcaatatgcattcctgatatatcattgaagaaaataggaataaatagatgcttttttaacctgaaaaaatatttgaatcctaaagtcaggatgcttgttgatgggaaaacactagaggcatttccacttaaagaccaggatcaaggcaaggatattcattatctctgctactatcccacaattgtactggaggtattagcaattaggtaagataaatcagttactggcatgaatattagaaaagaagaaccagaactatctcagtttgcacatgatatgatagtatactgggataaccctagagaatcaatgataaaagtaaattaaacaataaaatcattatggtagcaggaaaaatttaacatatagaacttattaactttcttgtacataaataagaaccacataaataaccagtttgaggacgcaatagcaacaaagaagatacttaggaataaacttagaaagatatgggcaaagccttgataagaaacatttttaagctcttctgaaagatgtgaaagtagtcttgaacaaatagaaagacatcccttgattttggatggattgatttaacatcataaaaaagtttgtcccaagttaatttatgaatttaacataatcccagagaaagtatcagtaagtttttttatggagctacacaactgatacttaagttcatatgaaaagacaaacatgcagtaaccacgataaccctgcaaattaagaactactgggaggaatagctctaccaaacattaaaatgaactataaagcctctataattaaaacagtatggtgaaattgatgcatgaatattcaaaatagcagtagaattgaatagaaagtcttgaaatagaccccaagttcatatggaaatttagtatatgacaaaggtggtatctcaaatcactggagcagagattaccttttcaatacattgttccgggatgaccaggcagcctttggaagaagataaaattaatgcataagttccagtatacacaagaaaaactccaaatggattgagatctaaatataaaaggtgaaatcataaaagtactagaagtggctgggcacagtggctcatgcctgtaatccttgcactttggggggccaaggcaggtggattgcttgagcccaggagttcgagactagcctgggcaacatggcaaaaccctgtctctactaaaaatacaaaaactaaggtgggaggatcacctgagcctggggaggtcgaggctgcagtgaaccgtgatcgtgccactgtactccggcctgggtgacagagtgaacaccccatctcagaaaaaaaaaaaaaaaaacactagaagaaaacatgggtgagcttttctgtaacatggatgtaagaaaaggttttctaacaatgactcaaaatccagatgtagttaaagaaaagattgacaagtttgattacaaaagtccatgataagcacagtcaaaatgcaaatgactttgtaggagaaggtatttgcagcatatatcagaagtaaagggttaatatccctgatatgtaaagagctgttatcattgaggaaggggtacttgatagaaaaaatgggcacaagacatgaaagataattcacatcaaggatatacaaatgtcctttaaacaaacgaaaagatgttcaacatcactcataattagagaaatgaaaatggctttgagctgtcatttttaatctgtcagattggcaaacatgaaaaagcaaggctgtgaagagacaagcaatcccacacattgctgggggactgcaaatgggcttagcccttttcaagggaagtgtggcgattgtactcgtctgttttgcattgctataaaggaatacctaaggctgggtaatttataaagaaaagaggtttgttttggctcacagttctgcaggctgtacaggaagcatggtgtcagcatctgcttctggtaagacctcaggaaacttttaatcatggtggaagggaaggggacctggagtgtccgatggtgagagagggagcaagagaaagaggaggaggtgtcatgtaccttttaacagccagctcttctgtgacttcgttactgaagggagagaccaagccttttttgagggatcccccccaatgaccccaataactcccatcaggccccaactgcaacttggggaccatatttcaacatgagatttggaggggacagatattcaaaccatatcagcaatatctatcataactgcttatacatttacattttgacccagaaatcccacttctgggaattcacccttgaagatatacctcaaaagtatgaacatccccacccacaaggttatccactgcagcattacttgcaattccaaaatattgggaacaacctgaatgtccaaacacagtggggtggttgaataagtgctggtgcataatgcatagtacatggcacagtggatactatgcaactgtgaaaaagaaagaggatggtttctatgaactggcatggggtgtatcccaggatacactagtacatgacaaaggcaaagagcggaagagcatctgtgggtgggagtagggactgaaggcaggtgagcatgaggacagttcttggtgtaatgctggtgagagttgcacactctatgctttcttaaatctcatcagactgtacacctatagtgagtaaatttatgatatgaaaattgtacctaaacagagctgttaaaaggacatctttattatgccactgtttcatattaaagaaagtaaaataactttatctgcagtagccaagatttggaagcaacctaagtgtccaccaacagatgaatgaataaagaaaacatggtacatctacacaatggcgcactattcagccataagaagagtgagatcctgtcatttgcaacaacatggatggaactggaggccattgtgttaagtgaaataagcccggcacggaaagacaaacttttcatgttcttgcttattcatgggaactcaaaattaaacaattgaacgcatggagatagaaggaggatggttaccagaaactgggaagggtagtaggggcagtggggatggttaatggctataaaaaaatagttggaaagaatgaatgagacctagtatttgctaacacaatagggtgtctatagtcaataataatttaattgtaatttagaattaactaaaagagtataattggattgtttgtaacaaaggataaatgcttgaggtgatggacacaccatttatcctgatgtgatttttacacattgcatgcctgtatcaaaatgtctttgtaccccatgcatatatacctactatgtacccacaaaaattaaaaattaaaaaaagtaaaaaagtaaaataagaaaacatacacagatctgtgtagtttagtaaaaaagaaatataggaaaggtgagttagaatctaatgagattgattactgatggggttgttgggaccagggttgaaaggatgggaggatgggaaggagacaggagacagaaagttagatttctctgagtatatctgtttatatgcttttgacattaataatcttgtcaatatttcaaactaaaaacatcatgggctagagacgaagcctaatgtggaataaaaacagaaacaaacgaaagcagccgtatttcaaatggataaaaagccatgctgaaagttgggggcagctccccaagtaacttttgggctctgtattttggccatgtaccaccagtctaataagaggaaacaactgtaaaagaaaaatatatggctactgtagtagggtttgttttttcaagtgatgtggattagcagttctgaaatgatttatattcaagattgaagaaatatgtaaatgtattataagtaatgggagccattttttcctctcaatcagtgaagggagttacacatatggaaaggtatagaaggctagaattagtcctgtggtgttgggttggaatttgaggtatcagtatgaacacatatatacacacagagagagttctagaaatataaatgcatgtattaatgtagcagtctgctaagatagcctagaggcaatgatgtctcagtagtaaacctaccaccctgatttttttcttaaataacttctccactaaaaggtagcagggtgatatggttaattctagggttagggcagagacagtacaaatgagcctggaaaaattttgaccagaaagtaagggagagctgacacactcatggagatgtggtaaaagacacagagccaggcaactactggtcagagctgtaataattgagcgtcaaaattaatataaataagtgaaaaagaaggaatagtgtttcttatagtagattgaaaatgtagaaggaatttacatagtcctgacatatctccccacaaagttcttactaatttcaaagggggaattacaattttacattgaagaaatatagcagacactacctgaatcaagtgatcaaaagtaacatcgtgaaatcgggacaaacacacagctgtggctctggtttgaagaatgaaggacctgacatcgtttctgtgatattcctgcccaaaatgtacaacctgaacctaattatgaggaaacatttgacaaacctaaactgagtgatgtctacaaaataattggcctgtactccaagaaaaatgtcaaggtcatggaagaactgttccacattaaaggaaactaaagagatacaaaaactggatgttcgcgtaatgctggatcggatcccggaccacgcgagtttgtgttcttttctttagctctcaagggctttataggacgcttggtgaaatttgaaggtctgtggattagataatatgttttatgtcagtgttaatgttctgatttttagggaatacacagtgaagaggtacaggggcatcgtggctttgccttactctaaaacagttcagaaaacaatgtgtatgtggggatatatttgtgtgcatgtctgtaggtagagagggagagcaaaagagcaaaagagagagagggaaggaagggtaaagaaagcaaatgagataaagacatttggggaatctgggtgaaggatatacaaaaattgtactatttttgccaattttctgtgtcttgaagtgtttcaaaataaaaatctattaaaaagtgggctagtataatatctttcttagtagtgttaaggattaaatgagataatacctacaggtgctagtgctgggacctggacataggaattaccaaagaaatgatagctttgatgatcaggagtgatggccttgagggtatgtgtgatgctggctctgagttgatctgttggagatgtccctttcttattgggggatgacagatggcagcctcctttatggcaaaagccctgatctgagaatctggtgacctgggttcccatcagctctgacacccacctgctatgtgactgcaagttggcagtcattcaagtttcattttgccggggctggttggggggagggtacattttcttaggcttactttagaatgagttttattcattcattatttaatttattcacgcattaacatctttattgaaaactatgtgccaggcactattccttgcaataagccaggtccacggagaatgaatgctgtagtttaggggagagaaatatacaccacgctggcagtgtagagaaacgtgcacaaccaggtaaatatttcctggtgaggtgcagttcaggagtcttcccggcgggggcgtgaaaatcagtctccctagtggggtgtaattgaggagtgttctggtgggtaaaattcagagtcttcttagtagggggtaattcagagtctccctgggaagtcagtgctcacttggtctgggagaagggctggaggtgctcacctgtgatggggggaatataggatgggcagtgaagccatgctggtcactgtcctgacagtatgagagagtggctggggcacagggcagggtgggtgcgggggcatttgaaccaagattgaaaatgactccaggtttgcagagaggaatatgggctcaggaagcagtcccagactcaagaatcctgaccagtgccagcctgcagagtttttactggtctatggcaagatatgggaaatgaagacagtggtggtgtctgcatactcactgggaaggattgccaactgctgtttctcggaaagaactacttttatgcccaagctcattttttaacataaaatacacattcttttatgaaattatattgaaagcagatggtgattttttttaacgtcgttacttaacaaaataaaaagttgtcaatcctatatttgtctccccattaaatttttaaaaactggatcataaaatctaaacagctgggaacttaagcattctagacttcctgaatgaagtttcatggtaatttctggttttaaaagatgtattttaaaaaatgaatataatatttttaacatacatgaaattatagagaataagaggcacatcagttcacctgccctctggatttcagaaaagcccatacttcctggcaccaaccttcattatctttgcattttcattttcactgatgatttgtttacccaccctttccccctccatcccattagagtgggacctggcttgaggccagggtctgtatttgcatgcagttattttgatagaactcttttggagctccttcttggagacagctcttttgatgcaggaacattgggatgggccctgtattagtctgttatcacactgctataaagaaatacccaagactgggtaatttacaaaggaaagaagtttaattaactcacagttctgcatggctggggaggcctcaggaaacttacaatcatggtggaagctaaggggaaacaggcaccttcttcacaaggtggcaggagagagaagtgggcaagaggggaactaccaaacacataaaaccatcaaatctcacgagaactcactcattatcctgacaacagcatggtggggggaactgcccccatgatccaatcacctcccaccagtctctcccacaacacctgaggattacaattcaagatgagatttgggtggggacagaaagcctaaccatatcagggcccaaacaaaccattaaacttttaaaaggaaattgtggtgaaatgcacctaacataacatttaccactttaaccattttccactgtaccattcagtgacattaagtatgctcatattgttgttcgaccataactactattattctgcagaacttttttgactttccaaactgaaactctgtacccattaaacagtaactccctccctctcccctaaccctggtaactattgttacactttctgtctgtatggatttgactactccagggacctcatacaagtaccaatacatacaagtatttgtccttttgtggcagacatatttcacttagcttgtcatcttcagggttcatccatgttgtagcaggtatgaaactatccttcctttttaaggctaaataatattccactgtattccatattttgtgtagctgctcatctgtcaatggaaatctgagttgttctctaccttttggctatgtgaacaatcctgctatgaacataggtgtacacatgtttgttcagttctctgatttaatttctttggggtatatatccaaaagtggaatggctggaccatgtggcaactctgtgcttaattttttgtggaaccattataccattttccatagcagcagcaccattgtaccttctcaccagcaatgcacaagagttccaatttttccacatcctcaccaactcttgttttttgttttttaataatagccatgctagtaagtgtgaagtggtatcaaaccatcacactttaagcttcacatttttgtcaacaggtaatatacaaagctggtgtctgttctctatcctgaatcccatcctctctttggcttcatgctctccttcagcctcaattattgtttcctgtgcacaaagttgtacataaaatactttctgtgtggtttctaacagggaaacactgtagaaagcctaaatgtccatcagaaaaaccaaggttaaataatgtatgccacacagagattggaaaataccatgcagcaatgaacaagaatgagctatatctgtaagtgctggcattgagtgaggtccatgacatattgctaagtgaaaaaaatcaagccatacaagagcacattaaaaactacacgtctgaatatccagaaactacagtgaactcaaacaaattagcaagaagaaaacaaacaatcccatcagaaagtaggctaaggacatgaatagagagttctcaaaagaatatatagaaatggccaacaaacatatgaaaaaatgctcagcatcactaatgatcagggaaatgcaaatcaaaaccacactgtgataccactttacttctgcaagaatggtcataatcaaaaaaatcaaacaataatagatgttggcgtggatgcagtgaaaacggaacacatctgcactgctggtgggaatgtaaactagtacaaccactatggaaagcagtgtggagattcctcaaagaactaaaagtagaactaccatttgatccagcagtcccactactgggtatctacccagaggaaaggaagtcattgtacaaaaactttcacactcatgtttatagcagcacaatttgcaaatgcaaaaaggtggaaccaacccaaatgtccatcagtcaacgagtggataaagaaactgtggtgtgtatgtattttggcaccatctttttacacctagtaagaaggaatgaattaatggcatttgcagtaacctggaggggattggagattatttttctaagtgaagtaactcaggaatggaaaacaaacatcgtatgttctcactgatgagtgggagctaagctatgaggatgcaaaggcataaggatgacacagtggattttgcggactcgggggaaagggtgagaaggggtgagggatgaaagactacaaattgggttcagtgtatactgcctgggagatgggtgccccaaaatctcacaaatcatcactaaagaacttactcacgtaaccaaataccacctgttcccccaaaacctatggaaataaaaaattttttaaaaatcaagccacaaaagagcacattaaaaactacacatatgaatagatatatgtctatgtacacatatctctgtatgtgtaatacatgtgtgtattacacgtagcatatataatgatgtactatatgtaaatgattcttatacgtgtgtagaaaataatcatgatgtaacataaatgtacatataacttttttaaacacacagaaagctctggaaaaataggcagagttagttgactgtgattacttctgaaaaagagactgaggtgagtagcggaggggaatttcaatttttacttgttatgcttccaactgtttgagtgttgttccttttttaacaagaagtatattacttttgtaatttaaaaaaatagaaaaaaacaaatatagtaagcccagcctgcaagtcataaaacacaaatcctcaatcatggggccacacatgttttaggtgcacgtaatggtaatgcattattctaatgcgtactgggaggcagactccattctaagcacttgaaataacctagtttcccagaaaactacactatgaaggaggttatccatgttttacacataaggatataagctcagagaggtgaagttacccacctaaagtcacacagctagtgaatggtgtgtaattagtgctttaatggtgagacttctttcttccagacaggtacactggtaattttttagaacatggattttaacttctgatttatttatttttttacatactgagatagtgcaggttgtgtttgtaagattcaaggaccattagggtctcgcattttgtttgtttggctttatttgaacacagctctgattataagagcccttgggcatgggaagagtgccaggagcttgtcagccatctctatcagaaataaatggtgctgtgtttctttttaaataaagagaattactgggtaggacaccccatagctttgttctgaattctagatgtaaatggagacttcatagtttatcctaaagttgctgttgaattctctaattctggatataagcgttctattgatttccctctgcacatgcaccatgcatgaattgctcctagaaggctgagtggcggacatggtatgccaccttgcaccatattatcaatagtgttgcgttttcaagaagcgttgtttagttcctttacaaatcatccttttctttaaattagctctcttgggtggcaccatcttttttacacctaaatgaacagatttcacaacaaagatttctaagtgcatcattttgttaaactcttaaaactgttaaattaataaaatcagcttaacagaaccctgattagttcaaaattgctttaaatttggtcattaagtttcagggaacatgtaattttctccacatctggtacagctgcaaggcgtgagggatgaggacacagtgctgtaacaaatacagaggatggggaagaaacgctttgtcatcgacagtttctgcactgctggtttgcagtccccaggaataagcttcctgaggagacattaggccttgtgttatttctctaagaacgtccccttcctgcagcgagaaggccaatgcagaaccgctgggcatcaagagatctgggttcactttttgagaaccctgggaactcactgtgtcactagacacacattcctctctctgtgcctcaacatcccatctgggaaatgggctgatgttcttgagatcctcttccattagcttgttgggggctgggactggtgggggaatagtgtcatcttttgctaggagctattggacacatctgagatgcattatttggataatcgcatgtcaagatgcatttgtctgtcttcttggctacaatgctcctggttctggctcttctggttgggactccaggatcaggtctgtgagatgctgacactgatgtcgcttgcgtggtagcagccagcctcttcctctgcatctttctccactttggggtcaaggtttgacaagctcctcagctgacttggtgtgctatggcgtctgacctggctgaaagccatgacgcttggcctttggttgggatagcaccacttgattcatcactggcagctgcggaggggcagagcggagggaacatgtcagtactttatgggcaatcccaatgtgagaagggactgaggccggatagcccagtggtggaaatcccgtcattgtagaagggagggcctgggatctcaaatctgggaatttttgagttagatctagaacctgaggctggaggcaagttggatggaactgtctgtgcttgtggccgctgctagccattgagccgagtgccacctgcaggagcagtgatgatgggggtcaggcccagcccctgagtgcacgctgcccgccagtgtgtgctgggcatcacggccccctcacaaccctgcaaggtaagacgtgtgactcccatttaacagatgaaggagcgagcctagtgggattatgtaggttacattgtgagtcaatgacagggttaggatctgaacccaggagtgaggagtgaatgcagcgtcaccggaaggaaaaggaaagaaggagaactggaggatgatctgtctcaggcaagctttagtctgaggttctaagtcatgctgtgaaggtctctgcagagtcactccttggcttcattatgcagagagcttgtagccaggtggcactgggcaggggctcatcccaggtgcctaaaccccacatgcatcaaaacttagaggagaccagcgtcttctgctggtcctttaaaaatagtcatttgggccaggcacagtggctcacacctgtaatcccagcactttggaaggccaaggcgggaggatcacctgaggtcaggagttcgagaccagcctggccaacatggtgaaaccccatctcaactgaaaaataaaaaaattagcagggtatggtggcaggcgtctgtaatcccagctactcgggagcctgaggcagggagaattgcttgaaccaggagttggaggctgcagtgagccgagattgcaccactgtactccagcctgggcgacagagtgagactctgtctcaaaaaaaaaaaaaaagtcatttgctctgtagtgtcagtttccaagtcccaagtctcccatgaaagccaaatgccttctgatattgatggtacttcagcaggtgactgcagcccaattgtatcggatgtttctgatgacagcagataagtgccagtgaacagctaaagttcagtggcacttacctgctgtcatcagaaacatgaggggaggggatgggatagtggaagaaaggacatagggaggtgaaggacgcagaccctgaagacaaagtccttccactcatgtgcccacctgcagaagggggtgcggaagcttgagccacacacagagggtctggtcccaaatgcagagagcccaggcagtggcttttctgagggatagaatgtgagcactttggatgtctggaattctgtaagaacccaatggaaagaaaatatgaggtttggaaacttctcctccgagtgctcctttaggtgttcaggtggattttacagaagaggctgacggcccgaaggggaggctagccatcagatttccattaatgtctcccaccatctctgaggcctaaatgacagggttcttgaagacagcaacagaacagtggtaacctatattttattcactatctttcatgcccttagcatcatatctcactgatacgtagatagacacatgtgaacggaagcattttatacgtaaacgtagggatgtgtgtgacctagatttaaaggatgcatattaaaagaattgtacctaataatatgaactatttttggcccatgacatgcggcctttagaagcatgacaaaccaaaaacacttttaccaaattccttccctttacaatcccctaccgtcctcctatctggtcaaaatatagctacttttttggtacgttggttttaaaaacagctctgtcctccaaagatatggcaaagttttctagttactgttttttaatacttcctggtattcttagagtccacagctttgagtgcagctggaaaacatctacacagaggatatgtttggacaggtattgaatataataaactatatttaaatatttatacgtgaaatttttttttatggtgctgttctttaaatcattgaacgaggtcctttcatttctccaaaagatatatgagcactgtcttttggcatatagatcatttttgcctttgaaagatgtctcagttaaaaatgatttctacagatgatcttttacatacatttgttattgtggtgagcgttacatcctgctgttttacagcgatacttggaggatttctcctgaaaatagccctttatttgtggcaagctgaaagggagagggcaggaagaggacttgcgatatttcatctgcctagagcttagtaaggagaggagagggccgtgcagtccccagtatgaccctccttccctgtgctcgggaagcagcttgaggctaagagaaatattgggctcttctcttctgctaagaggcttagaattctgtgatttttattttctgcttctgcctgcaaggccctccttctcctttgtcaatttgaagagctctctttctattcctagcagttatctagataacaatcatttgtttttgagattgattcctataaacagtacgtggagcatctcatggactaaaacgtggtaaattgtcaaacttctcagagtaggaagatgtctgctggctaggtagaaggtttctggtttaatggtgaaaacagccaaacacacaaataagcaaacacgcacataaaccaccaactaacccagcccagcagcaggcgaggttttctgtcgtccagcacgtgcaagagaagggctgggcagcttgatggacatttgtgccgtccaccttgcaggcatatggcagctcccacgttctcacaccattcgacatttggggtgaccaagtcatgcactctgaccagtgaaatgcaagtggaaatgacaagtgcgacttcatggcacagattttcggagtccaagtgttgctatacacattctctgcttgtcttggctatttggaagcacattcagtgctgagcttccctgggcttggtggccgagtggagtgaggagtgcagactccccagctgcccgtagtgaccatggggcacaagcagggaatagagctttcctgttacagcatcatggcctcacctgtcctgactgatgcaggtggataccagcaggcaacagtggttggcactgtgacactctcccgccacacatggcacactcaccttcagccaggtgcccgcactgctcctgagaccactctgaccccatgaggaggttggcttgtgagtgcttatatttagccagccattgctcacagcagaaggataaaggggttcgattaagagagcttgtgggctgggcgcagtggctcatgcctgtaatcccagcactttgggaagccaaggcaggcagatcacctgaggtcaggagttcaagaccagcctggccaacatggtgaaaccccgtctctactaagaatacaaaaattagccaggcatggtggcacatgcctgtagtcccagctcttaggaggctgaggcaggagaatcacttgaaccaggaggtggaggttgcagtgagctgagatcatcccactgcactccagcctgggcaacacagtgagatactgtctcaaagaaaaaaaaaatgtgtgatacagtttggatttgtgtccctacccaaatctcacattgaatgagaggaggggcctgcaggaggtgattgaatcacgggtcaggtttcccccttgctgttctcgtgatagtgagttctcaggagaactgatggtttaaaagtgtgtggcacttcccccttagctctctctctctctctctcctactccacctggtaagacgtgcttgcttcccctttgccttctgccatgactgtaagtttcttgaggcctcccagtctgtgaagcctgcagcactatgagtcaactaaacctcctttcttcataaactacccagtctcaggttgttctttatagcagtgtgagaacagactaatacagtatgtgtgaagaaaacatacattcttagagatctgtttgcctgctctcacagagcccctgaccagtgatgggacattccagttagcaggagagagggtgtggtggagcacagcgtggctggaggaaatcactctaaacgggcttcagtgcactaacagattttggagtgatttatatgaaaacagtttaaagcatttactagctgtaggaactaatttccaataaatcagacaggattcccttgggaaccagaaataaatgagggcaaaagaaattgctaagggttgttgagcaataaagagatgggttctagataccttaaaatgatatttaaatggacaaagttgatttagctgtcttctctcatgtctaggagtaagattgaagtccatagcatgtcattatgaccaggaattattcaccaggagacctgcagcatttcatgcacattccgctgaatggcaattttaatattccagtttcagtcctcggttgtaatgaaaaggcattaattgcttggttccttgcaaagtctgtaacaaaagtgttcctagaacaagttcaaatttggcacacaaggcagaacttttatgatctaacgttagtcattttttttctaattaagaatttttaatgcatatatattttgtgatcttcaagttctcaagtaattatttcacacacacgggtcatctggcatcgtgccatgtgtcttggaaaatgcagaaaaatagaatatcactgtggtccttgcactctggaagtgtacatttcataggaagatgaagctgtgacaccctctgagaacactgaagccacacgtgtgtgtcaaatgtgaggatggaaggaccagcagccaggagatgctgacattgcttcagggaggtggaggccaaacaaggggctctgaagcactggctagacttggccagagtggggagacagctcattgtcccgaatgagcaagacctgtggccagagctggatgcagtttccaaagaccaggagatgctctctcagctgcccacacagggttcgggagacatctgttctgttaaacatggacacttcttgtgaccaggacgtagcatcatttcctaaagaggtgggggctcagagctccctgggaccagggggatgactgttctctgttttaggaacctgcgtgtgggatgttcttgggagatgtgaagagagaggaaggaaaggacactcaaattattgtcccccaccacacacacacacacacacacacacacacacacacacacacacacacacaatctacttgcttatttatctgctcatttcattgacgcttcccaacaactggggtatttttcattcccttttcctagttgagaagaaagactccgagagggtggaatcctaccctaggtcatttagctggaaggttgcagagtggtcttcaaatccaggtcatgccccttttcgggacactggaacattccaatcaacagcaggggaagccgtatcttcccctgctagacttggccagagtggggagacagctcattgtcccgaatgagcaagacctgtggccagagctggatgcagtttccaaagaccgggagatgctctctcagctgcccacacagggttcgggagacatctgttctgttagacatggacatttcttgtgaccaggacggagcatcatttcctaaagatcccctgctagaacttactgatagtaagttctaggatattggggtgacccaaacccaggaatccagtttctgcccttgcctttctcttgcataaaaggttgaattgtgcctcattcaagtgcatgaacttccccaggccctgctcagtgcatctagtagagccaggatgtcccagctgaccctgcatttggaggcctggaggtgggctcaccacagtttgcagcttaggtgtgcccccactcccctacccccgacctgtcactggtcctgaccccaactcttctggaatcacgtggtgtgagtggtacaggaggcctctgcttgcaaagctgggtgctgacctgtgtgtgcccctgatgactcctgtggaccgtgtttgctgctgcacttcagaaggtgtcaggaatgtgtcccttccatgtctcagcagccctgggtgctcccgacatcaccctgagaaacccccaggacctctctgggtctcatttccagagggtgtctccatcactcatacccccttggccacgctgcgctggcttctttgagcctctgctaagaggcgagtggcagcttccacctctaggacctcttcttgctgtgactctgcttgggaccatctttcctgacacccatagcttcccttgttccttcaagtctttgcttaaagtctccttcctggccagatcttccctgaccctggccctctggtttgggacagatgcttgcacaccgctgctccattcctgtagtgagtctgggggagccctctgcaggcagggagccccgcgggcaacgctggatgcaggcaggagcacacaggcccccaggctccagttcttcttccctactcctgacctttttcttctccaaagcacttactcccagttgacatattgtgtgctggcttgtttgttttgtttattgtctcttccaccgcctcccaggagggcagaggtgtttgtcttttcccccccacttctctcccctaagcgcctggaggtttgcgcggcacgtggtgggtactgtctccatctttgctgaaggagggaaggttccttgtttactgatgccccccccaactcctgttcagaggacaggcgaggcctgggactcggattggagcccgcccccacgcctccacccgctgggcatcctgcctggagaagcctcctcatgtctgactgtgggaagcaagctgcgctcagcggggcatcagttccaagcggagggtaaaagggagccaggcagagaccacttcttttgttactcagtccatgcgaggtggtggcgtcagccctgcttcagggaggacgcctgctgctcagcgtcccttctgcaaggagctgtggggaccccattctctttcccagacacgggcacccgaccctagggctgggaagtcatctgcccccatgtcctgtgcctggtgcacaacccccttcccctgtccttctccgaagcaccagccgccgcctggaagaattcttccctcccacccaaggcagcggtgggcacgcccagcccttggtcctgttctccagggaacccagccgtgtgcgcagggagagtttctcagtgtggctgaaatgtatccaaggacgcatgggaactggccgcccagtgcagtcctgcagttggtggaaaggaggatggtggctggggagggagggtggggagtgggtttttaaattttaaatgttattatacaatattctagatatacaaaaagataaataacaataaaatggatagcctcatacccgccaccagcttgagaagtaaaacacagttattgcgtacctggccccatcctccccagagctaaccactgtcatgaatgtttatacacctttgctgcatgtgtatatagatgaggataattttctttcatctgctttagaactttatataaatgacattgtactgcaagcatgcttttttaattaaaatttttatttgaaacaatttcagaaagttgaaaagttttttaaaacatacaagtaccatttgtatatcattcgccagatttcatagttgttcacatttcactatatatacttaattattctctgtgtatgtgggtgtgtgtatatatatgaagtggtgtacatatgtaacattttaacactcttttgaaatatttgagaatagattgaagacatgaagcttcttacctctaaatatttcactgtgtgtttaagaccaaggacattcttgtacataaccacgtcttatacataaccacagtacaaatatcaaagtcaggaaattaacatcaatgtgatactattattattttatcctcatcccttacagaaatttcaacaattgtcccagtaatgttctttatagcaaatgaaaaacaaatggttgtttgagttttggtcctggattcaatctgggatcatggggcgcatttagttccagtttcttaatctggaagagttctgccgtctttctttttctttcttgaatcggacatttttgacgagtacaggcctgctattttgcagcatgtccctcagttctggtttgtctgaggttccgcatagattagattacacagtgttgtccaaaatactacggaagccatgttatgtccttctcagtacctcatatcaggagatttgcgcattgctggttggtgttaactcattgcttgattaaggtggttgcctgccaggtttctctactggaaagtactgtttattttttctaattaataagtatctcatgaggtggtacttggggactgtgtgaatatcttgtttctcatcaggcttaaaaattttgaaaaacagctttattgtgatgtaattcacgtgctgtacaagtcaccatttagagtgtacaattcaaaggtttttagtatattcacataaatgtgcccccattgattttaaacattttcaaaacctccagaagaaatgccatgttatgtagccatcacttcactatctccccatccacactccccaccgccagccctctgcaaacattaatccacttagagtctctatagctttctctgttctggacctttgtaagaatgaaatcgtataatatgtggcctttggtaactgtcttctttcatttagcatcatgtttttaaggttcatccacattgtagcatgcagcagtgcttcattcttttttatggctgaataatatttcattatatggatataactcatttggcttcattatatggatataactcatttggctattattaaccatgatgctataaacatttgtgcacatgtttttgtgtagacatattttttttcatttcttttttgggtatccacctgagtaaaattgctgggtcacatggtaactctgtgtttcattacttgaggaactgttagacctagaccattttccacagtggccacaccaatttacattcttaccagcagggtatgagggttccagtttctctgtcaacacttgttattatctgactttcagattctcatcttcctcctgggtattaaagtgtcatctctttatggttttgatgtgaatctccctgatagctaataatatcaagtgtctttgtgtgtatatttgtatattttccatttgtatttcttccttagagaaatgtctattcagaggctttgcctatttttaaattgggttacctgtcctttttattattaagttgtaagagttctttatatattctagacataagttctttatcagatatataatttgcaaatattttatcctattcttccacagtttcaatttttttggtgtcctttgaagcacaaaagttctgtgttctgaagaagccccatgtgtctattttttattttgttgttcatgcttttgatgtcatatctaaaaaatgctttgccaatccaaggccgtgaatgtttatacctatgttttcttttaagaattttagttttaactctttcatttagctctttgatccatctgttttgagtttatttttgtatatggtgtgagataaggattcaatttcattcttttgcatgtgactagctagttgtcccagcttcatttgttgaaaagactatttttttcccagttgaatggttttggtgccattgtcaaaagtcaattgatgacagctgtatgggtttatttctaggctgtcatttctattctattgatctgtacgtctcctttgtgctagtaccacattgtcttgattaccattgctttgtagtaaattttgaattcagaaagtgtgaatcctcctactttgttcttttcttagtattgttttggctattctgtgtctcttacagtttcatatgaattttagaatcagcttgacaatatctacaaagaagtcagctggaattctcacagagattgaattgactctgtagagcagtttggagagtactgatatcttaacgatgttaagttttctgacccatgaacattgaagtttttccatttatttaggtctttttaaatttgtttcaaccatgttttatagtttttgcaatgtaagttttggacttcttgtaattattcccaaatagtttattattttttgttaaattgtgaatgcaattgttttcttagtttcactttcagattatttattgcaattgggtaaaaacacaattatttttatatattgatcttgtaacctgcaaccttgctgaatttgttcattagttctcatagtgttttttagtggattcctcacgattttctaaataaaagatcatctcatctgtgaatatagttttatttcttcctttccaacccggaggtcttttacttatgtttcttgcctagttaccctggctagaacttccagtacaatgttgaataggagtaaaagtagacattcttgtcttgttcctgccctaggagaaagccagccagtctttcatcattaagtatattgttagctgtgggacttttgtaggtgtcctttattaggttgagaaagttttcttctagttgggtgtttaggcatgaggatttagtcaaattctttttcagcgtctattgagatgattctgttttttagtctattgattgatatgatgcataacttagttgattttcagatgctgaaccaaccttgacttcctgggataagtcttacttggtcatggtatgtaattctttttacatgttgctggattcagtttgctagtattttgttgaggatttttttatccatacccataagagatattggtgaataattttcttataatgtttttgtctggttttggtatcagagtaacacaggtttcataaagtgaattggaacatattctctcctcatattttttgaaagagtttgtgaagaatcacattcattattatttacatatttggtagaattcagtggtaaagcgacctgggcatgggtttttccttgtgggtagtttttttttttttttttaaattgcctattcagtcttttcatttgttataggtattaatatattcagaccatctattttttttcttgagtcagttttagtagtttggggtctttataggaatttgttcatctaagctatctaatttgttggtgtacaattgctcatagtattcctttgtagtcattttcatttctgtacggttgataatactgtccctgttctcatttttgcctctagttatttgagttttctcttttttttttcttggtcagtctaaagatttgccgattttgacattttcaaagaatgagctttttgtttcatcaattttctttacttttctttctttttttttttttcgagacggagtctcactctgtcgcccaggctggagtgcagtggcgtgatctcggctcactgcaagctccgcctcccgggttcatgccattctcctgcctcaacctcccgagtagctgggactacaggcgcccgccaccatgcccggctaatttttttttttggtattttttagtagagatggggtttcactgtgttagccaagatggtctcgatctcctgacctcgtgatccgctcgcctcagcctcccaaagtgctgggattacaggtgtgagccactgtgccaggccaattttctttatttttctattctcacgtcattaacttccactgtaatatttattattttcttccttctgcttacttttggattagtttgtgcctctttttccagtcttaaggtggaatattaggttattaatttgagatttttctttcttagttttttctgagttcctttaatatttttgggggagaagaagtttcacagcatcccgtaagttttggtatgttgtgtcttcatgtttaccaatattcgtatttttttatttcccatttgattcttaaggcattgattatgtaagaatgtgttgtttaatttatacatatttgtgagtttctcccattgtttttctgctactgatttctaatttcattgtcattagaagacatactttgtattatttctatccttttacatttattgaggtatgttttatggccttgcagatggtctatcctggataatgtttcatgtacccttaagaagaatgtgtatactattcttgggtagagtgctctagaaacatatgttagtttgttggtttatagtgtagttcagatcttctgccttcttgccaatattctatctagttgttctatctattattgaacctggactattagagtctccaaatactattattattattattattgttattattttgggtcagagtttcttttttttttttctttttttctttttttttttttttttgaggcagagtcttgctctgtcacccaggctgaagtgcagtggcacgacctcggctcactgcaagctctgcctcctgggttcacaccattctcccgcctcagcctcccaagtagctgggactacaggtgcccggaccacgcccggctaatttttttgtatttttagtagagacggggtttcaccatgttagccaggatggtctcgacttcctgacctcgtgatccacatgcctcagccttccaaagtgctgggattacaggcgtgagccaccgcgcccggcccagagtttcactcttgttgtccaggctggattgcaatgttgtgctctccgctcactgcaacctctgcctcctgggttcaagctattttcctgccttacccaagtagctaggattacaggcatgcgccaccatgcctggctaattttgtatttttaatagagacggggtttcactaagttggtcaggctgatcttgaactcctgacctcaggtgatccacccaccttggcctcccaaagtgttgagattacagacgtgagccaccatgcccggcctccaactactattattgaatggtctaccttcatcttcatatctatccattttttcttcatgtattttggtgctgtgttactaggtgcattgtgtttataattgttatatcttcctgatagattgaccattttatttttatgaaatgtccttctatctcttgcaacatttttttaaagtctattgtatctgacatggtataacaactccaactttgtgtttgcatgacatatttattttcatgcttttactttcaacctttttgtgtctttgaatatcagatgtgtcttctgtgaaaaaactttttatttctgtgtagtcctgttcatcaatcttttcttttactgtgtgtgtatttttgagtcatagtaagaaaacctcttcctacatccagatcaaaaagaaattaacccaattttcttctagtactcgtatggtttcattttttttcttacatttaatctttgattcatttagaattcattcttgtgcttggtaggagatactggacttaattttttaaaattgttattcagttgttccagcagcatttatttaaaaacatctgttttctccagtaattttagaggccacctttatcgtatactgagtttccaaatgtggttggggcatatctggacttcttctactccacttctctgtcaactcatacaccagtatacactgttttaattatgaaggctttgtagtatttttagtgtctggtagggcttatgttcccattgaggcttttctgtgttcctggctattcttgaaggttaattttcccacatgaactatagtatcaatttgtctagctccataaaattgcattatatttataaattaatttagggagaactggcattgtgatgatactgagttgtctcatccaagaagaatttatgtcttcccatttgctgaggaatacttttgtgttatttagttttgaaaggttttctcatggaggttttgcacatacccgaataaatttattcctaaatagtttatctttattgttgctattatacatgggagtttctttgtagtactgatttctgagtgccagttttatattctgctagtttactgaatccttttttgtgtgttcgagttataatgtgcttttttccagtatattttcatgagattcatctttgtggatgtttgtaactctattatttattttcactgctgtgtactattccattgtataaatatatcacaggatatttatctgtttgtatttggatggacatttagattgtttcccatttgttgaagttgtcaagtagttttccaaaggcgttaattctgttctcactcctttctgtaatgtgggagcctctgttgcttcacatttttaccaacattagctattgtcaatgcttaaattttgtcagtctgagggagtgcaaatggcacagaagcagcatgctttttaatgacttctcttaagtccttggtttccaaattctgacccaaatgctgcttcccacatggacacagtctccatggattgcacaccccacccccggcctgcttcttctaagtgcccctctctcattcagtggctgctggtaggagttgagaatggcaacgctgctttcctagtctcctgagagggaaacacacttctgtaaaaattaaacactttattagctgagaagtgtctggccctggtactggcctcctagaggaatttctttgctgacttacttgcattatatctgttgtataattatcaacaatcagcatccactgagtagcatcttgtacctgacactttactaggctctgaacagggcttagtgatgaataagacccagttccccaccactcctggggctttccacccgcttggaagaggagacatgtttacattaggtgatatcgctggataacaccagtgatacccagtgagcgtgtcaagggccaggttgctgacactgacagggaggtctgtagaaaatgaatgtggaaagaaaatcttctatcatattatattacaaattcaggaggaaaatctgtcattgaatgttttcttcttgttttaaaaagctgaattcattctgataaaaatgtatataccacctaaaaatatacactctatttttccaaccgacacaatcacccacaactgaaaattgaccttggagccctgtcccacctctaatgggtggatctaggatcaaccctatttctaaaggggtacattgcaggatcctgggtcacgaggccagtggctggtccagttgtggccttgactcaggtgtccttcccttatttcttatgaccaaaccaccggctctgtgcttctccatatggtgtggtctattccaagctcctggtatcttgtggatccaagacctgcctttatctccccagtcttcgtgaaataagagctcttctcttcctttagtgtttggggccctgctacctctcctgggcatttgaaagctaagtgcccactcacctcaggtccagggatgtcctccattagcatttccctcattctgctgcccagcaaaaccagggttaaactaaggtttggttacagcatatgggtaagaagtttccatgctcaataaaatgccacgtcatctactttataaaagggtaacacatcccttccgagctggaagcctctctctccatgcttgctcctcttgtggccaacagcacaccctccaggcaactggggagcattgcaggtgtagaccgggcttccgtcaggcagtgctttctggcagaagccagctggcttgtgcagacatcttgtccatagccttgaccttactggatacacttgctaacctcccagacaaactgatccaggctcatgaaagttggtttgttctttggtttgttcattgtgcattcattcatttgtttgttcatttggtaaacacatactacatacttcattgaaaattctgcaatgatcaggtcagtcaaaatgcacacacacacaaagagcctctttctccctttaccctattgagtattgggtaccttattgggcatctgagatgctgtggaatttttgccagaattttacctgtttgtctacccctgtgctaggtgatgtgaaagctacatagggcaggggcttgactcttgaaaaccatgtgattctgttgaaggtgtaaatcaagccagcccacaggaagcaatgagtcaacatgtgcacctctgtgttttgctcttgtgggtccgagaagaggcgcttaaattgcccagtgttcattgagggctgccgtgggttgggattgtttcctagaaccatagctgagccttgaagagtgggaaggctttagacagattctggggaaaggtgtcatacctggggagaataacttgactatgtgggctgagagtaaacatagtgggttctgatgatgtcgaagggaccagcttgatgatatgtgttgtttcacatgttaaatccttgggacctcctacttgactagatcagcacttgagcccttcgtatagaaagctatgtgctacagtgaccattgctgggccgactggctggcatggggctgtggttgactctgtcctgggtggggccgtggagacaccatagtctattcctagtctggccatgataccgaaatagcctttaaccatgattcaaggccccaccctttctcctatgtgattgttgtttgaatacttctattttgttgttgttgttgttgaaactgtagggtaattacccttgtccttaataattgctttagtttccttgatgcgcagagatgctctagagtctacgctgttaaaaagaggttaggattaagtttttcaacctgccgctggtgtgagaaggatgtctccatgccaattactgtcttcttgataggattagtcactgtgttaattgctactcagaaaaactgccaagtttgttgttttagacattggcttttaaaatattgcagatgtcatctcaaatgcaaattgtatttggtattagagataactgttgatctattaacactttggggttgattcatatctgaggctgtgtgagtaaaaggagtctcacccttggattaattgcatctttgatggtggttccagaactgggagggggaggcagctgtcaggtctgtttcttggcactctctttgagagaacccagagctctgtcagcaacaatctgttggaattggccagcgtaatgtatgaaacaacctcgttcttcagctcaagagcatcacctacctactccacaggtcgcagtggttggtaagctcctggtttaccttgaatgttgacactccagggagggtcaaatggccacagaagttcttaatccttagagatttccgagtcagtagaacctccccattttggaccaggaaagaatagagaattctgacattacatagcatttaattttttattaatgttttatttttaagtcatttcaagatttcagaaaagttgtaggaataaaatgaagaattcccatatgcccttcacgcagattcccgatattaacattttatcatatctgtcttatcattctgtatgtgtgcatgcacatgactgaaccatttgaaagtaagtttcagacatgatgccccgttaaccctaaacacttcaatgtgtatatcctgagaactaggacatcctcttgcataagccagtgcaatggtcaaagtcaggaaaatagtactaatgcaatagcattatccaatctgtagactttattcctgcaaccaacaatatcctttattagcaaaatacaataataaaaacaatagtctgttgtaggatccaattcagaatctcacgttatgtttagtttccatgtctctgtaatcgccatcaatcaattcttcagtctttgtctttcatgaccttgccatttttgcagcatacaggccatttattttgtagactgtcctttggttggggtttgtcagatgtttccttaggaccagattcaggatatgcaattttggcaggaacaccacagaagcgacattgggttgttcttagtgcatcgtgttagaaggtgcatggttgcctgcccctttactgggattgttgactttgaccattggttaggatggtatctgctaggtttctccagtgtaaagttattgtttattctcttcataattaattcgcattttatggaaaaatagtttaggtctgtgtaagtagcttgtatttcattaaacttttaccccttgatttagcatccattgataattcttgtctgaatcaattattataatgcatgccagatggtgatttttctctaaatttatttattgtttagtactctgtaccaaattggaaagctttttgctttcttacatttatttatttactcattgattcgtttatacccatatggactcatggatttctatcttagtgagtgacattgactagattatgttgactgagttacattcattaggttatatatttgtccagtggtttataacctagttgttttggtaattatattgtcacagatttggccaatggaagccctttcaatttggctactgtgtccttttgacaaatccccataatatttttccacaacattttattatgaaaaacttcaagcatagagaacgttaacagatttttttcagtgaacactcatgtacctatcacctaggttctttaatgaacattttattatgctgtctttatcatagatctattcagctatccacccagcaatgcatcttgtgtttaaattgcatttcaaagtaagttgtagatgtcagcacacttcatccataaacactttggcaggcatgatagtgtctcgactttaacatttatttacagttcttttactcagcaaaacttacttacagtgcaaggtacacatagtaagtgtaccatcgaacaagctttgaccagtgcatgcacctgtgtgactcagacccctatcaagttgtagagcattgcagccagttcagaaagttctttcatgtttctttctaaccagttctttctccatcgtcttcagcagcaaccgctgttctgattttattctcaccatagattagctttacctgttctagcacttcatctaaatggaacatgtgcaatatacattcttttgtataaggatgatttcactcattattgtgattttgagattcatccgtgttgttgttatcagtggttctttgcacccgtcattctttgagcgcttccttttttctggtccagcaaaatgtcccaaggtcgccttccacttcctctcaccaaccctgggattagctcaatctctaatgagccccggctcctttcagcagagaatggtttctgaattccagctgtgtgccttgcgagtggtatgccattgcttctagacactctctgccttagtagaagaagctaagcaatgcatgtgtgaggatacattcatagatacacaaacacatatatatccacacctacttctaaacatccgtgttcatggatgtgtgtaaaaccatgcattgtgatgataccaattctagtccaacatcacagggttcctcctagccgttcatctttccatatgtggcactttcttttccaacatggagaaattttcctgagtatattattgtctaaatcctaaatatatataaaataatgaaataagagttaacctataccactgaagaaagcaaacctaccaactatagttcaatgtttgtttatagcactttttctttagcctgagggcatataatcaaaatactgtgttcataagccttttgggttaatctctaccccctttctctctggttatgttattcttggaaataaaatataattaggctcttttgtttttttgcttgtgttctattttatggtctctccccatccttgttgatttttttaaggatggaaaacattaacatgtttataaaaatcaaaactatgcaaaaaagttagatccagagacgtgtcactgcccccatccctccccacacatgggtaaccactctcattattatctccttatctgttttgtgtttctttgctgagataagcagatacatgtatactttcttattttctcctttttttcttacacaaaagacagctactataaatactcctttgcacattgcatttttttaaattaaactttctatttcaagacaactgttgattcacatgcagttgtaagaactaatacagagagatgatccatgcaccctttgagctgtttttctcaatggtaacatcttgaaaactatagtagagtatcacagccaggatacttgatgttggcacaattaagatacagaacatgtccctcacctccggggtgctgcaggatgccctttttagccacacccacttcctcccctcccctacaccctctttgactctttgcaacccctaatctgttctctatgtctataatttttatcatatcaagaatgttatataattggaatcatacaataaattaccttttggaattggctactttgactcagcataattgtctcgcgattcatctagattgttgcatttattaagagtttacttctttttattgctgagtgatgtaccatagaatgaatgtgctacagtttgtttagccctttatacattgaaggacatctgggtgtttctagttcttggcaattacatataaaatgtctataaacatttgtgtacaggtttttgtgtggtcacagatttttatttctttgagataaatgcctaggaatgcagctgctgggttgtatgataactacatatttagcttttaaagaatctgccaaagcacttttcaaagtagccgtgctttattttcccaccagcaatgtacggatgaccccatttctctgcatccttatcagcatttggtgttgtcactattttttattttagctcccctgacaggtgtgtaatgttatctaatcgtggtttaagtttgtatttctctaattggctaatgatgttgaacacctttgcatgtgtttattgccatctgtatattctctttggtgaattaccttttggagtcctttgtccattttctaattagattattttattttttattaagctttgggggttctttatatatcttaaataccagtcatttttctgagaggtggtttgcaaatattttctcctaatttgtatcttcttttgcatcctgtccttcacagagcaaatattttttttcttttttttaaatttcttttttttattatactttaagttttagggtacatatgcacaacgtgcaggttagttacatatgtatacatgtgccatgttggtgtgctgtacccattaactcatcatttaacatgaggtatatctcctaatgctatccctcccccctccgcccaccccacaacaggcccctgtgtgcaatgttccccttcctgtgtccatgtgttctcattgttcaattcccacctatgagtgagaacatgcggtggttgtttttttgtccttgcgatagtttgctgagaatgatgttttccagcttcatccatgtccctacaaaggacatgaactcatcattttttatggctgcatagtattccatggtgtatatgtgccacattttcttaatccagtctatcattgttggacatttgggttggttccaagtctttgctattgtgaatagtgccacaataaacacacatgtgcatgtgtctttacagcagcatattttataatcctttgggtatatacccagcaatgggatgggtgggtcaaatggtaattctagttctagatccctgaggaatcgccacactgacttctacaatggttgaactagtttacagtcccaccaacagtgtaaaagtgttcctatttctccacatcctctccagcacctgttgtttcctgactttttaatggtcaccattctaactggtgtgagatggtatctcattgtggttttgatttgcatttccacagaacaaagattttatttatttttttctttttttgagacagagtttcactctgtcacccaggctggagtgcagtggtgcaatctcagctcactgcaacctacacttcccgggttcacaccattctcctgcctcagcctcccaagtagtggggactataggtgcctaccaccactcctggctaattttttgtgtttttagtagagacagggtttcaccacgttagccgggatggtcttgatctctggacctcgtgatccacccgcctttgcctcccaaagtgctagtattacaggcatgagccactgtgcccggcccaaagattttaattttcatgaagtctactttacccatttttccttttatatgttgtgctttaggtgttaagtttaagaaccctttgcctagtcctagttcccaaattttctcctatgttttaagcccattgtcccttccaagttagtttttgcaggtgtggagaagactttggtggagactttttctttctttcttttttttttttttgcctgtggatgtctgatcactctaacaccaattgttgaaaaggctatctttcaacaaagctatcttgaattaattttggcatttctgtcaaaaatcagttgggtgtatttgtgcaggtctctttctgggttctctattctattggtttatgtgtcaattcctttgctaataccacacagtcttgataactgtagctatataataagccttcatctgtatcctgacattcttatttggaatatttgtgttttctcattctttgatgaagtttagcttgtgattatcctattttttaaaaaaaagacccgaaattttggttaatttgacccacctcatttatttctacatctaactttattttcccctttcttatggttttgctgttgttcttcttctagctttttgagcttagaattttaaaattttaatttttcatttttactaaaataatgaaaaaggctatgaatattcagtccgaccactgttttaaatatgtctcataaattctggtatgtagttttttgtttgtttgttttctgagatggagtctcactctgtcgcccaggctggagcgcagtggcgcgatctcagcccactgcaacctccgccttccaggttcaagcgattttcccacctcagcctctcgagtagctgggactacaggcacacaccaccacacctggctaatttttgtatatttagtagagacggggtttcaccatgttggccaggctggtctcaaactcctgacttcaggtgatcctcccaccttggccccccaaagtgctgggattacaggtgtgagccaccgtgccttacctggtatgtagtgttttcatgatcacatgtacatttttggaatttctattgctttaattttgaaaagatttttaacattattttccagttttattagactgtgatcagaaaatatttctttgtaatatttctattttatgaaatgcattgattatcacctaacacgtgaccaacttttgtgaatattctatgtgtacttaaggagaaggtatagtagattccccatctactaataggtaattcaaggaaaaagtatgaagtatgactgtattagtctgctctcacattgctatgaagaactacctgagactgggtcatttataaagacaagaagtttaattgactcatggttccacaggctttacaggaagcatggctggggagacctcaggaaacttacaatcatggcagaaggcgaaggggaagcccgcgtgtcctgcgtggctggagcaggaggaagagggtgaagggggaggtcctgcactcttccaaacaaccagatctcctgagaactcactcactatcacaaaaacagcaagggggaaatcctcccccatgattcagtcacctcccccaggctcttcctccaacactggggattacagtttgacatgagatttgggtggggacacacatgcaaaccacatcagtgacaaattgatttgtcaaggaaattgattatattgtttagggcttctgtgtccttacttattttttgtctatctggtttctcttgtactgacagcggtgtggtaaacacactattcttagtgttttcatctatatttcctacagtttctttctttcattttccttccttccttcctttctttctttcgttctttcacagaactgtcgcccaggctgcagtgcagtgttgagttctcggctcactgcaatccccgcttcctgggttcaagcaatccttgtgcctcagcctcccgaatggctgagactacaggcaggtaccaccacgcctggctaatttttgtgtttttagtagagatagggttttgtcatgttggccaggctggtcttgaactcctgacttcaagtgatccaccattcttggcctcccaaattgctgggtgtgagccatcaaacctggcctatatttcctacaatttcctctcctgtaaaagtggttgtagtcttgtttggtgcactaatactcattatggttatatttttattgtggaatgtgatttttagcattagaaggtgtcataatgttgtttcttaaattatacttattctactttgatatcaagattgcaatacttgttttgttatttccatttgcctcatatgtctttgccatccttttagttttaggctttctgaatctctttgatatggttcggctctgtgtctccacccaaatctcaccttgaattgtaacaatccccatgtgtcaagggtgggaccaggtggagaaaattaaatcatggggacagtttcccccatactgttttcatgatagtgagtcctcacgagatctgatcgttttataaggggcttctccccctttgctcggcacttctctctcctgtcgccatgtgaagaaggaagtgtttgcatcctcttctgccatgattgtaagtttcctgaggcctctccaaccatgtggaactgtgagccagttgaacctctttccttttataaattacccagtctcgggcagttctttatagcagtgtgagaacaaactaatacactctttttaaaagtatgcctcttatatataacatatagttggatctttctttttaagccaaattgaaaatttttttattttcataagtaaacccattcacttttatttatatgtccaatatgtataatatcttatataataaatgcaatgtgtattatgttctacttgctgtacttgtctttctacatgatgcattttctatactcatttaatttctttttatatataagaaattctcatttttagtctaatgggtacctttgtactcattacctttaaaaatccctttagtctcttactaacttttaccatttggtctttcagttgttaatggagtctcttgactcctacctgttgcttatacaagcatcactgagcttattctggttttgtctttcctttttttgtttcctatcattttgtagttgacaaaacatatataatctatgtatgattctcttaaccttagttacacacttaatttaggtccataattaaatatattaaatgttccccataagttcctttgccaaagagtccctagtcatctcctggttggatgaagttaattttctagaagattccttcagaggcgcctgtgggtacatcactcaattctcccatattttaaactcttattctgtacctctgatttttgagggtctgcttcgctagatataaaatctttgagttttatgaaactgctgctccatccttgccccaccttctaagttgtttttgagaaggctgacaactgtctctgttgcccttatagtaagttatttgatcttttcatttacaagcgttgaggatatttttcaaatgcatcgttgaggtttttaattcagtttgtagtgttatgacacagttcctccccctccaccttatggttgggattttggggtaagtgtcgtattctcattttagttttttttctttcatagtcttctacagatgaagaccacttacatcgccacattgagtggttcgtgtgatttttagttcaagagctccctcttctgtcagtgcagcgaagtgcagtttctttatgactggtttttgggggaggggcgggaggagttgagggtccttggatgtatcattattttttgttttgcagaatcctaaatgcccacatctggcttctccctccctcccctgcacatttgccaatgctgcccctgcctacctttaaatcacttccttctagtccatattctggtctatctggattcatttttggtattttcttccctgtaggatgtactttctctttcttcaggtaattgtaatttattcctaaactctccatgctcgacgtctgccttcattggcttttggacccatcttatcctcttgctctttataaaagttctgggtgggaactcaagaatttgttaatttgatgtttatagtgtctcttttttccagtcgtgtgaaaggtgtgtgggatttgtgtggttgtttttgttcttcttgttgatctgtgtagttttcagaggatgcgttgggagatttgagtttttgtggctatcattaccttggcgacctggaagtcccttacgtggcattttaggagacgtgtgcagttatatcaatttcaagtacaattgtaactcaagcctgttatgaacaccatcttttcatgttaattgtaccataaaagaatcttgaggatatctttaaaaggtctgctctcttacgaaggtgaagtgtctcccctgtaagcttgtttacaccggcatctgttcagccagccctttttcatagacacttcagccaaatactggcgtgttttccgtttctgtgtttacggttggactcaacgagccttttactattgtggcatatgggagggagcgttgccattctgctgccaggggtgagtgtgatctggtggctgttacattgtgtatatgcgagtaggtctctatcaagaagggacccgccatgcttacctggcacgggagatataccaggatcctgaaggtggtactcccagggtgaggcttatccattgtgcgccagatgtgttgacccttgtgatttccccaaatgtgggaaactcactgcatcatttgtggtagtgggggactgtgtctgtgctctctcctgacatttgaattttttcttaaaaaaaaaaaaaaaaaaaaaaaaaaaaaaggagacacaccatcttccatggactgaatatctgtgtttctccagaatccatgtgctgaagccttaaccccagtgtgatagtctttggagatggggtctttgggagggaattaggtttaggtgaagttgtgagggtggggccccatgataggattagtgcccttataagaagaggaagaggggcctggtgtggtggctcacacttgtaatcccagcattttgggcagctgaggcaggaggattgcttgaagtcaggagtttgagaccagcctgggcaacacagggagaccccatctctaccaaaacaaagaaaaaagaagaggaagatactagagctctctccctgctttgtgaggacacagtgagaaggtggccgtctgtaggccaggaagggagccctcaccaagaatggaactggctggcatcttgatctcagacttcccgtctccagacctgtgagacataaatgtctgctgtttaagccacccagcctctggtactttgttacggaagcctgagctaactcagatgtcagccaaccatatttttacagcattctcatacaaagcccgaaaccatagtcagattcagcgctgcgtggcttagggaatgcgccacgcctgactcattgcagggggtcaagaatgtttgtgagatgaatacatggagtatctttgttctggaaatagaccacctatgaattattatagtagagaaatcccaggcctcctcgaaggacagggaaaacctgtaaagtgtctgtactttgggcccagaggaataatggaaagaggccaggcacgctgggaaatttccatttacaaacccgccttctgctgggttgagtctcgcctgctgtgggctcagggatcctggcctggcctattttttctctgggtggataccccattcccgggagcgttcagatccctgaagacagcttctgtctcctccgagaccactgctgagtcttgtcacctggtgttcccacagtgccaccctgtcttctcttgttctctgtgggttccagaaaaagggaccacctcggctctgtggctttggatctctccagaggagggttaaggcctcagatagcttctccaatgggacacagccaacatctgagctgcattttcaaaatgagagccaatcttaggctgagtcggacagggagaaaggaattgtgctcgggcacccaggtggcacctgctgtcccctgacctggcaccacgggcccaactttgggttttaacttcccacgagtgcctggacatggagaagaagtggtggagaggatgaggacatatggggagcgatctccagggtcactgaggtcctgtctcctgcctcccgctccctagggccctccagctgggcccaggaggtctccctcccacctggttgtcagtcagcttctgctgtgccctcacggggaattcctcctagagcccaccaggtgggagagccagggcagcaagcaccgaaggccggcacggcaccagcacagatgaatggcccggctttctcagaacccatcccctggaacgctggaggcagtgcaggaagggccgggttctatgagaggaccttaggcagcaggaatactccatgacagcagagatgctggggccttttccccagagccttattcttttttttttttttaatctttagacagaactctcattcacagcatttagttacttgttcattcattcatcattcattcactcaagcacttgatgggtattgcactctcctaccttgtgccagagactgtgtgagactcggagagttggtaacacacccagagtcttgccttcgggggctttcacgagcagagccattgctccggcttttgggtttccatagtgtgcattagcctttgaaggcctccaggaagtccctccagaatcagacctgttccattgtgttcactgagaattctgcaaatttctttggtgatgggacttgattcttctttatatggtaccaggcagaccagtgaatgcgtcgtgaaacacctctccaggcccgtggaatggggtggggaacgctggggtctcagtgtgagcctggcctttggattcagacagtgctgaattacagtctcagccctgcttcttgctggctgtggggctggggccacatgaaccggctaagctttggctttctcagaaatagtttggggataatgattcctgcctagtgggaagattaaataagataaaggaatggcaaagttttatcccatggtcagggaggatggtgactgccttgtgccatgggtgacccctgccttccttcagagggcatgtgcacaagctggtgcatacacacacacacacacacacatacacacacacacacacacacaggcttcctgtagtcctcggttgcctgggaggcagcagtgactctgccttctagaagtcgtctgaactgtctgctttccaaacaggggcgacaggactgtgactcgaggtgatgggttgctgaactgctctgctgccagacacattttgctggcttctcataatgtcactgagatctgggaaatggaccaagcacgatttccagctaaatgaaacactttggggccatcagctaaatagatgatgcttttgagaaaaccccatgagcattgtgtcagacaggccgtgggaccctgcaagcctgtctttttctgtgctcgtctgggtgatgagacatcgcccgggctggttccatgagcacctctggctgtgaggacctgcgtcttctgtctcaatgcacctgcggggaggctgagatttgatcctcatggaacattcaatcctttctgcatctcgctgtcttcctgccctcctctttctcccttcctcttgcctgactgttgactacaaaataggatattatttaggaacgtgtccttgcctccctccctggctctacatcaccccatgacatagtggctgtgctcaggcggagagtgagttatgtttctgtgggcaggagtgggtcatgagtcctgagtcctccctagacagccccagccctttctctttgttccaaggggcccagccaccatattgattgtttcatccctctgcactgcccagagctgcctcctggagcacgctctcttctttcctgatggcaacggtcccacctgatggcaatggtccctgggccagaggatgcccattggtcttcatggagagagcttgggtcaggcccacttggtctccaatcctggcttcgccgcgtgccagctctgcagtggtgccagcttatcctgctaagcctagcttcctcttctacgtgggtatatctgcctcaggtgcagctgtgaggatccggggtgatgctcatgaggtgcccggcaccctgtgtggcacagaaatgaccagaaaataccaactcacccaatgccaagtcttcactgtccttaagatctcaaacctttttttcttgatcttcttcccttgatgaccaacgctcttgttcctctcgcccttgcgggccaccccctcatacatctttccttgggccacaacttaggcctttgccttgcctttacttacctgttgatccacccacccacccacccacccacccatccaaccattcatttcttgcttcattcatccagtgatgtactgaatgtttcctacatgtgtatgtcaggctagggtgagcaaagcagattcagtgtctccctaccctaaacttagtgcaggagaggatagagacaatggaacaggtgcatgtgcgtgtgagtatgtgtatgtgtgattgtgtgcgtatgtgtgtgagtgtatgcatgcgtgtgtgtatgtgtgtgtgagtgtgtgatgggaggtaggtgctaacagggagagtcttgagaaatggatactagggtcacctaacagggtcctgaggggtcaggaaagcttcatagaggaagtgactcttacctccttgagcagatataagcaacctgaggccaggggttgtgctttctagggcctcagaacaccagcatcgtcaacaggtgagtgcctgccatttatatgaggccctgggtttgcaaagagggatgaatatgcaacataaatagtaatgcaaagggacagttaataaatacttgtccgatgaattcatggatgcatgtgccattgccaggcttatatttgctaagcaatcttcccagcatgtgttaaatctctgactcaccatgaataaggagcttagaagagctcatttgagtttccacgtggttcatgaatatgcaagcgagattccttttaatctcaaattttattttattagatgtatttacatgtatttattagttctcaggtttaccttggggcctatgggatatttaacgaaggtatcatcccatcttcactgcagttgttagagggcggggtggaagattgctgaataactcgatcaccccagatgaccagagatcttctgggtgtgtaatgaccacagactaatcttaatcataatcactaccatgaacccacatgacatgcagttgtataaaggatggggcaccttaacgtttgtagcacctttacataaagccagagtgctcaagccatcctggacctcacccgatgggagggagaatgatgctctgccaggtggaggccttaggtcttgtcagtctccttttactgcaggagaggctgcaggcttagctggaaacataatcgctgctcaaggtcaggctgtgcccagtggccgaggcgcttggtgagctttccactggatggcctaaatttgcaccgctctgcaggctctcgtcccagttggcaagggcgccacagctggatggctcagcgtccacccaaagggaagtggaaaaaccagcagctggctgaatctgagaaggttttcatgttcccaacgagatccaagagcaaaacagttttctgaaactattttccacttgctaaaattaaggttattattattatttttcaggaatctgctgtgtacgggttttatttttaaatgtcatcatcgttttgtacaggagcacaaaactcatgaattccgtccctgctcaagcggggtcccaggttggaggcgtgacacccgcgcctctccgctggtgtcattgattgctaagggcaaggctctagggttagtggggacctgatgaaagcccacctggggctcttgatgtgggagtgtttggtggatatgcctccctgccccgctccccagggccctgctccgtagctgctccatgtcgtctggatggtccgttggcaccctgcccaccgcacttcagcttcccttgctgccacctgcatgggctgctgccctgatgagtctcgggtcacatgagctgcatccttattgccgcagccagcagatggcagaaagcgccttgaccccatcgtctagtgtctccttgactgagatgaggaggctggaggagaggctaggaagagtcaggaaggggctgtaaggggccagctgggcagggcactggagcctggggcaaattcttactgatcttggcagatctctttttttttttgagatggagtcttgctcttttgcccaggttggagtgtggtggcacgatcgcagctcactgcaagctctgcctcccgggctcatgccattctcctgcctcagcctcccgagtagctgggactacaggcgcccaccaccatgcccagctaatttttatattttttagtagagacggaatttcactgtgttagccaggatggtctcgatctcctgacctcgtgatccgcctgcctcggcctcctaaagtgttgggattacaggcgtgagccaccgtgcccggccagcagatctcttttattacccagaaagacctctactgtcaccctttccctccccaccaacaatatcctgggagccttttctccgagtggccctgggaattcttcatttaaggcattggatttcccttggaacttccctttcctggggttgtgggtggggtgttgctgagaacacctgggagggtccatcaacaacccatcaagagtggcgaggccggcaccccagtgcaatgtgccagcggggttgacagctaccccagaggaaagggtggaagctcagacacttagcaggatttcgggggttcacttctctgcatcagtccctctttggagaaggtcacaggcgcatgatcatagacttttggttggctcagagttccctcgacagtggcatttccagctcagaagttcagggtctagtctccctgcaggaagatggtgagtgacagaaacacatcccctcgactgttccagtgtggctcctctgctcatccctacagggttcctgccagcagcgaacctttccgagccactgattcctcatctcaggggttgggatcctagcatccccttttgggggtatcctaggatggcagatgtgggatggcctggcgtgttcagcccagtgcctgtccacagccccttgaggcaggtgtttccttcttgccttctctggctttgagttcagttgtccccacatcccctgaggatccaaaaggggctttttaactctgctcaatgagaactttccttgaggccaaacacgtgcctccaaagaacccacttttagggggcatgcaggccaaggtttattgcagtaaaaggaggtgacacaaagctcactgcctccccctcaaattcccgccccgccacctcaccctcattgcctgcccctcgtggaattacaatcatctgcttgttatttgtgatttccacttgccttcaggctgttccaggcaatggctgagtttcatcacccttacatccctaggactgggtgcagagcaggtgccccgtgaatgcttgctgagttcatgctgtaatccctgtcctttaatttcatttaaattaacatctttctctctgataaagatagaacaggctcattgaagaacattcttaccacacagaaagatacaacaaaaagcaaccaacttcacaaacatcctctgaagtcccatttcccagagatagccagggtcaaggttttagagaactcaatgcttccggacttttccttatgtacacatagacatataggtgctgggtaagtgaagaattctatagaaatgagatctcaccatgcattccattttgcaatttttttttaaataatggagctctttccatgttaacaaatagagatatgcacattttttctaataactatctactattctatcaatatcctgtgattcatttaccaaagcagttaactgaagccttttttattttttattttttttttgagatggagtctcgctctgtcacccgggctggagtgcagtggcacggtctcggctcactgcaagctccgcctcctgggttgacgccattctcctgccttagcctcctgagtagctgggactgcaggcacccaccaccacgcctggctaatttttttgtatttttagtagagacggggtttcactgtgttagccagcatggtctcgatctactgacctcgtgatccacccgcctcatcttcccaaagtgctgggattacaggcgtgagccaccacgcccggccaactgaagccatttttaggggttttccacactcttcctatcataaactaggctgtggagaatgtcactctgtccgtctctgtgcccctgtccgcccaaattagtgggaccaaccccttttacaggacaccaaccccatttataagtagtttacaggatgctactttgcttctgtgaacttatccctttgttttattgtttttcgtttttgtgagatggagtttttgctcttgttgcctaggctgacgtgcaatggtgtgatcttggctcaccgcaacctctgccttctgggttcaagcgattctcctgcctcagccacctgagtagctgggattacaggcatgcgccaccatgcctggctaattttttgtatttttagtagagacggggtttctccatgttggtcaggctggtctcgaactcccaacctcaggtgatccacctgcctcagcctcccaaattgctgggattacaggcatgagccattgctcccagccgaactcatccctttgtaaacgtcaagtttctcctgtgtgggccaatgttcctgggggctgcctgggtttcctaaaatgggggtaatgatcttttatgacaaggggcatcctgaggagtgaccagtgactgagaaaacctggtagtctctcttgctgcaacaggattgtatgctgcgtgaggacaggaagggctgtttcttctagcccctcccctccccaggactcctcacccagggcccctgcacatggggactcggggtggctgctgactgcaagaaagaagggccaaggcgggagccccaggctggcagcgctttgtccctcaaacctgccaaaggttgtcgccaggctttgcactcatcttctcagccacctagctcccctggcagtaaaacattattttctatgaaatgatatgtctgacatttaccaaatttttatgtgacaatttagaaggaactggttgcattaaacagccttattaatattgcagtaacatgattggggaacatcatggctgttagaccacagggctctgatttataagctctggaggcacagaggtctccattgaccaaaacaccttcagctcaattcatgtatggttatcgaaatccagagatgcagtcctgtgatcacgcagcccgtcaaaacaagggtggtgttgcgagctcttcaagaactccggactcagccgggcatggtggctcacgcctgtaatcccagcactttggggggccgaggcgggcaggttcatggcagtagtcaagtggggctcgtgcatgtgagccctcggcatagctcctgactctcacttcgtgctcagcaggtgtgggctctcactgcggttccagcagggccctgtggtctctgttcccagccccagttaggaacacactggagatacttttggagactcttctagatctgcagaagaccccaagataaagggctgtggctctcccaggggttttcagccctctggggacagacatgtggagcaaactgtaatgaagcaagagcacctacaggggcctcggaccggggatggcgttgcggcacaggaggggtgagaacctgccagcagagcaggaggcagtggcattcgggattggccctgaggaaccaaccaggatgctggactttggccaggggatgaagctctgggtttgaaataggagcctcatgatccacagctgccttggggcactttggactaaggtgacagtgtgtgctgtgacaccaaggccttagggcacattgtgctgctggagggggatgggtttgggtcagggggcttaaggatgcatgggaaggggccacagagcaggctgagcccagggggagggctctgcacacagcccaggaattcccttcacagcagtacagaaagtgtgtgcgtcaggacaggcatctccctggagcaggtggaggggagcccagagggcagccccgcagagtccaggaggagatgatgaggccaccccagggacagcagggcctggggcagaggagggagagtggaggtgagagcagagggggctgagagagctctaggggacaggggttgctgtccttccatcctccctgggccttctgcacggctttgccctggcactgtgggccatttcccagatttgtagaggttgtcaaatgcacccctgttcccagggagccgggaaagtgagggcagatggtgaagtgttgcagggctggaccacgaggcagctggaggccaggacaatggactgggcagggttgcagggccaagtgcagtggtgagagcaggtgagaggaggggaggggaggaggggggtgtgaaggggagaaggaaggagggcaggaggaggggaggggaggggaggaccagaggaagcggagaggaggtgggggggtgaggaggggaggattggaggatggggatggggtggagagggggagaggagggtgaggagaggaggggagggcaggaggaggggaggctaggaggagagggggaaggagaggaggaaggagagaaggaggagaggggaggaggcaagagccagtctggagggagcgagcctgtgagccaggagcacagagggcgggggttgggcctcagcgtccttcatgaagaactcaattcttcaatggcagaggatgtttctttttcctctggttataaaacagttgatgttctttatagagaagttgagctacagataggtaaaaagaagaaaatagcccgcatagtcccccggctccccgatgaccattggtgagaagtgaggcctggtattcacaatgactcacatccagatgtttcttcttggggttttgagaggccggttgggctgaagctccaaggaatgacctgaaggccctggtgaagtgttcctggggcgctttcaccccaaggagctctgagcagccggagaaggggctgaggtatgtgggcctgtgaaggacaggagcacccagaaagccggttcctagggtgtccccccccaccacatctggggaaagcccagcctggcctggctcctggcccggccctgaagcctaggtttgaaattgtggcttaatgatccacagctgcgcttttggttgccagcgccctcctgaaaaactaaagaaggccttagcaatttgagagagctctgggaagcaggaatgaggccggggtctggggaggagggtggaagaggaagaaagagtctttgagggcactggcaacccccagctctgagcctgtgccctctcccggctttcttgggctcctgggtgctgtggatcttggctgggctgctgctctgggctgaccccccccccccgccccgcaaagctctgtggaaagcgccttacctgcttatctcccgccatctggaacatcctcctgaatctctgcctcatcgcccatcatctgtaccaaaagccattcctctgattctagtgttagtcctggcagagtggctgcagttggctgtcttaggtgtgcgagaaaatcattgtttagccaaggaggtggagggtggagggttatccctcaggctcttcagctcgggagcccatgccggagagatctgggaaagcatccttatttgttggcccaggtgaagagcagccaggcagggcagccaaggtgactcctggacccagccccagcccccgggagccacgccagttggggagatggcatgagggactggcgcccgcaatgtctctaggagctgttggctgagggtggctgaggccctcagtcctgtcttgttgggggcacacagtgggatcctctctccttgaacccagagtcactcagcaccatgctcgtggctgagggaaccagtgtacagagggaccccccaggagcctggagggtgtggcagcaaataggagccatggctgcatccaaggtggaaggaggccaactgggtcacatggcaagagggactcccaactcagggtgcagtcgagtctgatcgtgggatgagagccccggtggctacctccctaagtaggataagcagcccccgggggatctgcccaggcaacctcctggccccttgacgtgggcctgaagcttggaaatagcctgatggtgtccaggcaagggctgaggaggaggatagcaggagagtccagggaagccaagcaggctggctcagggggccgttgcaggcactgcgtgaccccagcattcatcacatactggcttaatgtgtgtgtgtgtgtgtgtgtgtgagagagagagagagagagagaggttttattttttttgaaagagtctcgctctgtcgcccaggctggagtgcagtggcatgatctcgtctcggctcactgcaacctctgcctcccaggttcaagcaattctcctgtcttagtctcccaagtagctgggattacaggtgccaaccaccatgcctggctaatttttgtatttttggtggaggcggggtttcaccatgttggtcaggctggtcttgaacttctgacctcaggtaatccactcatctcagcctcccaaaatgctgggattataggtgtaagacactgcacccggccgagattttcaatcaaagctgctatgtggctccgatgagatggagatgacagctcccctatgcggcagccagacctggggccaagcgcagcctccctcgggtcactgcttggcctctgacatgtgctgtcctcttctgtcaaatggggatctaatcctattgaacaggattgtgcaggttaaaggaaaggcttcttatagtgcaaacaaagcaagcatggcctctgccctcacagagacttcttggagctcaaacagaacaaatgtggcctctgccctcatggagaccccagcagcagggatggctcagcctgccaactttcatgttgggggtgcatgcgatgccggggaggacttggctgggagacaccacccatcggaggctggttttgttctccctgagtgggtggtccccgcagagagagcggggcctgttagaggactccagggcagaggtgccttcctgatccaggaccctccagccctttgtctctggcctgtgtggctgggggacaccacgtggttggccagcagatggagggacagttgcctggaatcccagtctcagtggctgagcaaggcaccctggactccccaggtgtggctgtgctgcacacggctgccccggcttctcagcactcatggccggctctcgcttccccggaggcaccgacatctgcctgttcatcccagttgtcctgtttgctttggaaccaggagcatgatttacgtccgagtgcgtttttatgttttgcaccaaaggttttaaacagttcctagacaaaacaattctattttaatgcacagaattcctatcttgggttatcttctttacagccatatatgttttattagtttatttttattggcctatctccttgctagaacataagctccctgaggaccagggcacacctgtgtagcactctgttcccggtgcctaccacggggccaggcacgtagggagcctccagaaacaggttgagagggtgcacagaccggtgtttgcaggggccggctgtttatgtagctctccctttgtggcagctactctccgcccatctttctcttaatagttatggattatggaaaagaagaacaaagcgcattaagaggttcccctacatttgatttgaggaagttttcatccgaatggctccattgattggcctttcgcgtgcagccttattcccttctcacaaaatgaatattgccttgtctccttgagaaaaattgatttcagccagaaaggagaagagcaaactccctcctcctgctcttcttttttttttttccctcccaccgagacggaatttatctcttaggtaggtggggggtagaaataggaataattggaccagaagctaattcccagagattcattgtctcgaaagctcccaccagaatgtgagaagcttgccttgaattgcatgctaatgataaatgacaactctaacagaccgtcacattgagatgtttagtccttcctgctaggagatgacacattaattttctctcagatttacattggattcttaataaaatatcggtgttggaatatgacaagtgaggggccacggaagcaccaggcaccatttgggaggcatggactttggccggaggagactgcggtggggctgaacatgagccaggcgctgggtggcattggagcagggctcccatcactgtgctgggatggggcttacgtgacctggctgcaccaagcagcaggaatggctgatcctctttcttgactatagtgttgaatgcaaagacaggtgatgccattaattctctctcatcttaaacccccttttctttggcttgtcactgaccaaatgctttcagcgtaataagtgaagttttctatttttaagaaaagttgctgtttcttgattaatttgctcatttgatgaggacttatggagtgtttgctgtttacaagttatgaaggtagagaggcagaagcagcagccagacatgccaagtctaagtgatcatcccacttccctgcttcaaaacctccagttgcttccatggcctcgagagcaatgttcggaattctcggaggatccacaaagccccgggatctaacccctctggacgtgcagttccctttgtctggaaggcgcctctccccgttctttttggctgacttttactctctttaatccctcggcctactatcactttttcaaggggccggggaggtgggggtcataacccctctgccctggtctggacccagcctctctgtaggatgctgtcaggtgccctctgctttttcttccttgcgcttaccggagttgcactctccaggttaatttatgccgtcttacattttatgctacatttgtattaagattggagtcctcgcttttccttcatcgctgttaatacacgtgtacccttggttaattcgtgtctctcatcactcttacagtaaaatccaccctggttcaggagcccagattacttggggtgagccgctctctcgccccgtctcctgcccctgccctgttctttgtctgccagcctctgccaagcttcctctccaaacctgggcctcgccacgctctctaccgaaagcccttccagggagccagcattcatgtccttgccttcgcctccgcttccacccagatgctgcgtcctgggagaggcctcttggctgcccattgccacccactcacagctgttctcaaacccactcattcgctatctctggtgggtcccctttccctcctgcagctctggggcctgcccagggcgggcctctgtgcgtcattgttcttcctccctaccggactgcaagctgtgcagaggcagggctgtggcaccctcagcacccggcgtgaatgctcagccgtgatagctgctcagtaaatattaactgaacaaatcagtgaacgtcagcgtagagtttcaagccgaggccctgggagccctgggaaggtgccatgaaggaggcgttcctccagtcttgctctggagcgagtcttggtcattaccatctctccaaatgggcagcctcttcttttcagggacctccagagacaatttatgtgaacaaactgtggcttaacgatcttgggaaattggaaaatacaagttgacctttttttttttttttttagatagagtctcactttgtcacccaggctggagtgcggtggtgtgatcatagctcactgcaacctccacttcccaggttcaagcgattcttgcacctcagcctcatgagtagctgggattaaaagcacctgccaccacacctggctaatttttgtatttttagtagagatggggtttcaccatgtcggtcaggctggtctcgaactcctgacctcaggtgatcctcctgcctcaggctcccaaagtgctgggattacagtcgtgagccaccatgcccagccaaaaatacaaattgatttctgactctgagttctggaagccctagccacccttcatcctgttctcaactctccacaaagacattgtggcccttagagatggaatctaggtgtgtcccgacccgccaggttctcctcttgcttggttgttcgggatcagccttcctagggttatagcgaggattcgatgagactgactgcatgaaacactagctacaggatagtgccattggctatccttgcttttattcagaaaaatgaggccgggcgcatggctcacccctgtaatccagcactttgagaggctgaggcgggtggatcatttgaggccaggagtttgaaaccagcctggccaacatggcgaaacccctgtgtctactaaaaatacaaaaattagctgggcgtgtttggtgggcgcctgttgtctcagctacttgggagggtgaggcaggagaattgcttgagcccaagaggcggaggttgcagtgagcagagatcatgccatggtactccaccctgggtgacaaagcgagactttgtctccaaaaagaaaagaaaaatgaaagcacacgctgaatctctgggaacgaagctcttcggaagcaccagcttctgggccctgcccattgaacacggcaaaagcaggagcaatcacggccgtctggtggcttgtggggggcttttaggccgacaaatctatctagtcgtttgttctctgataagaaaacctcttttacgattttcaatttgcccttattttaatgaaaagaagctgggattggaccgcccaagaaggagctaatcaaataaagcaaattggtgctaccttctccttgtccttattattcgtatggctctagctggaatgtattatgagaagcaattggttttcatatctggcagattgcagcctgggccgggcctgtcagccttctcttccccctcttttcataaacagctgagagtggccgggctgcggggtgtgggggaggacacggaatgcttgtaaccagttttcttgctccttgtcccccaaatcgtgaagacccctgtaaacaagtcagaggaagtctccaggttgaaagttagtaagccagttccttcctgtgagattcgggctgtcgccgtggcttcttgaggttccatgtggcggtcctgtcaaccttgctatgtgcaaggcatcaattactgccctcgctgggtttgtgcgagggagagataagcagaggagacgttccttcatcgcactttttccctccccttgcaacaaaaggaagaactacaatttaaatcaggctcagcccgcccttgctctgtatgaagtgttttgccatgggcggttcttgggctccccaaagtactatgagttgttgtgactgtagaaggggaggggtagctggggcgtgccagggatttgaaacaagacatcaggagggggtgcagtggggcaattccctggttctccccttaccggctgtgcgacgttggggaagttacttcacttctctgtgccctaagccttctcaccctgtaaaatgaagatagcaatacccagctactaaagtgactgtcagattaaaatggaacatgggtgtaaagggccctccccggcacctggcacaaggtccatgcagaataaatggcagctcttctcatggtcgcagttgtcctggttgttactgacattttagtccaggccacgtacctctaatggtgcatggaaatcaggccattccgtgttggaaagatcagaaagaaaggtgcaggtgcatgaaatatgtaagctgcaataaagggtgacattcctcattttccaactgcccactggaacagagattctgcactggcctcaggaatagtgtccactcttctaggacactgcaggccctgtcttgtcacgggagcctgattgacatttggggtcagggctgggaggcagttggaactgcatgaactgcctttccctccagccaggcccttccctgtgccttgtggcaggagcgataggaccaaaggcattgggaggaaacagtggagctgacctagggtttgggttccagctggaaaaagagttctttagaagccatccagatactgttcctggagtcccactgggaactgggacatcatctgttcttaaaggggtgctgcaagtaacagatcttatgaattcagaggagcaatagccggtcaacctgaacagagcttattgcacaaaatctgctgcctccgggccagggctgggggaatgggctgacaggagaaagatccaccgcaagtccacggctcactggaatagcaggctgggtctcagttgtctgcacagatgaaattggtggttgttgaggtcctggaaatgatcagttagtgacagagaaagtgggggtttgagggagaggggccatgaaccagacctgttttggatgcattgatttctaaagcaagacgctggaaagagtgtctacactttttattttgcagaattaacctagtcttcgattcaatccccagttgctccataaatttctacttaatatccacacgcaaaacgtctcaagaacacatcacccctctgatcttcagttattaatcatcttttatctacctaatttgaaaaagatcactccctaaagtgataggtgagtctgtgagctgcaagtgtttggagctggcctctcccatgggtgggtttgccggctacaccttacaatgcaccatttcattactctctcagtcccctcattgttactccccacaggggaaccctacaaaaagaggacaagtctgttagttacagagaacatgtgctatatgacaggcagcacaccgggcaccttacacacatcctattcactaaaacagagagaccaagtaatttgttcaagatcacacagctcttaaggagctgagctaaaatttaagatacaacctagatctcactccaaatctcataatcttcttttaaaaaacatactattatggaaaaatttcaaacatctacaaatataaacagactagcataatgaattcacatatacgtatcattcaactttaatatggtcagtcttctttctttttttttttttttaaagcaaaaacattttgctatggaaatactggatggttttataggattcaaagggagagatacatctgaagcttgggcacagaatggcaacagggatgagactcggtggtttagagcaaatgggctgaagtcagatagtctggatttgaatgttgactctcacgcttactagtcctctgaccttgaaaatttgcttaaccactcagtgtactcaactctaaaatggatataagagcagtgcttcctcataggtagttctgagcattaagcagttaatgtacgtgaagaatagaacatggaatgaccaagactcgctgcagagcaagactggaggaattccttcatggctccttcccagggctcccaggggctcagcttgaaactctacgctgatgttcactgatttgttcagttaatatttactgagcagggccaggtgtggtggttcatgcctataatcccagcactttgggaggccaaggcaggcagatcacctgaggtcaggagttcaagaccagcctgaccaacatggtgaaaccctgtctctactaaaaatacaaaaattagcggggcgtggggcatgtacctgtaatcccagcttccagggaggctgaggcaggagaattgcttgaacccgggaggtgcaagttgcagtgagccaagatagtaccattgcactccagtctgggtgacagagcgagactccatctcaaaacaaaacaaaatatatttaccgagcagctatcgtggccgagcattcacgtggggtgccgtgggtgccacagccccacctctgcacagcttgcagtccagtggggaggaaggacaattttatatcagtgcccgctatttggtaagcactcaataattgttgtttctttgaattcttcttgttattataccatggtcagtcttatttcatccatactctcccattccttccctcaacattatttggaagcatctctcagacactgtataatttcatcagtaaatatttcagtatacttctctaaaagataagttctcttttaaaaaaatacttctgcactacactgatcactgttacaaatgaataataattctaaatctcattacatacccagtcactgttcaacatttcggttgtttcacaaatgccatctttcattttacagtttgtttggctcagacagtatccaagtaaggtctacatattgcaattggttgattatttctttgactttttcaggctatatgttctcattccagcacactcctgctctttttttctctcttacttactcattcttcctcagagaattggttaaagaagccaagtcatttgccccgtagagtcttccatagtctggattttgctgactgtatccccatggcatcatttacgataccatgtcccagcgccctctgcagattgtagaaagtggaggttagagcaagagttctcaatagcttcaaggtcaatttttttttttttttttttttttttgcagcaaaatgtacttccatcaggggatgtcttagtccatttgtgttgctataatggaatactacagactgggtaatttataaacaatagaagtttacttggctcatggttctggaggctgggaagttcaggagcatggcgccttgtgagggcctttgtgctacatcatcgcgtggtggaaggtggaagggcaagagagggcaagaatgagagaatgagaatgagagaggaggagggggccaccagactcacttttattaaaaaaaagccactcctgtaataactaactcactcccaaggtaatgacgttaatccattcatgacctaatcacctcttattaggcctgacctcccaacagtgttgtagtggggattaagtttccaacacatgacctttagggggacacatccaaaccatagcagaggacatgtactatctggttgtctctcttttgtgatgtcagccaccattgatgatccatgcccagatccattaattcattagggatgacaaaacaatgatattttaattctctcatttcttcttcatttattggctggagtacttttatagagaaagttctttctcctcctatttggtaactcaaaagaacagtttgtacaggaaaggcaggatatgtggcctaattctccttttctttttttatttttttagttttcaaaataatgtattgggtcactagcatcttccaacaatgagcaattagttttttgtttgtttgaggactattatgaactcatagatttaaacatatttaatgtatttcagtcgaatgttgatgttcaaattgtcccatctttggttagtgggagcctcttcaagttggttccagagtctttttttttttttttttaattgagatggggtctcactctgtcacccaggctggagtgcagtggtgctatctcggttcactgtaacctccgcctcctgggctcaagtgattctctcacctcagcctcctgagtagctgggaccacaggcatgtgccaccacactttgttgtagagacagggttttgccatgttgtccaggctggtcttgaactcatgagctcaagcaatctgccctcctcagcctcccaaagtgctgagattacacacgtgagccaccacacctggtctggagtccttttcatattagcttaagtcttccatacagctaacatcatacttaatgatgaaagactgtatgcttccccctaaaatcaggaacagggcaaagtgttgattctcaccgcttctattcaacattggactggaggtgccagccagtgcaataaagcaagagaaagaaaagcatccacaatgggaagaagaaagtggagtcacaggtgacttaattatatatgtaaactatcctaaagaatctacaaaaaaaatttactagaactaataaataggtttagcaagggtcacaggataagatcaacatacaaaattcaattgtatttctatatagtacaaatgaacaatccaaaaataaattgagaaaacaatttcattcataatatcttcaaaataataaagtgcataggataaatgtaagttacaaagtgtaaaacccatatattgaaaactacaaagtcttaatgaaagaaattacggatttacctgggtagaaagacattccatgttctgcaattggaagtggttggaagactcaatattgttaagatggcaattctctcaaaattgatttctagattcagtacaactccaattaaaattctagcagccttttttcctcagaaattgtcaagctaaccctaaaatatatatggaaatacaaaggacttaaaatagccaaaacagttttgaaaaagaagaacaaagttggaggacttatagtcccggatttcaaaacttattataaagctgctacaatcaagatagatagtattggcataaaaatagacaatggaacagaagagaaagttcagaaataaaatcatatgtttatggtcaatttattttcaacaaaggtgcaaaagcaattcagtggagttgggggtggagaaaataggctgtttaaatttaaaaaatggtgctgggacaattggatattcagtgacaaaaataaacttgacctttatctcacaccatatgcaaaaattcactcaaaatggatcatgacctaaatgcaagagctaaagatataaaagatatagaagaagacataagacatgtttattaccttgggttcggcaaagcacccttagatgagactaagtactattcataaaagaaaaaattgataaattggaacttaccaaaggggaaaatttttactcttttaaagaaaccatcaagccattaaggaaaagagggacaagttatggattgggagaaagtatttgcaaatcatatgtctgataaaggacttgtatctagattatatgtaaagagctcttaaaactcaaaaaacaagaaggcaactcaattaaaaataggcaagagattcaaatagattcaatgtctatctgaatggctaacaaggacatgaaaaggtactcaacatcattagttattagggaaatgcaaattaaaaccacaatacactcactaggatgcctataatccaaaagacagataatgtcaaacgctggggaggatgtggagaaattggaaccctcctccattcctagtgggaatgaatggaaaatggtgctgccatgttggaaaacagtctggcagttttatttttatctaataagatgtaagtatctttcacatattgttgctgggttttcaatcatggttaagaaagttttctccactttcaggttatagagaaattcacctgtattttcttgtagggtaggtatgattttatttattacattgaaatctctgactgtttagcatcagtgctgctgtatgatgtgaggggtaaacccattttggtattttccatgtgccttctaggtcccccaatttcacttatgaaaaacttgaccccttcagccaggcgtggtggctcacgcctgtaatcccagcactttgggagggtgaggcaggcagatcacaaggtcaggagatcgagaccatcctggctaacacagtgaaaccccgtctctactgaaaataaaataaataaataaataaataaataaataaataaataaaaattagccgggcatggtggcgggcgcctatagtcccagctacttgggaggctgaggcaggagaatggcatgaacccagaaggcggagcttgcagtgagccgagatcgcaccattgcactccagcctgggcgacaaagcaagactccatctcaaaaaataaaaaataaaaaaaagaaagaaaaacttgacttcttctcccactgacttgagatacctccttgattgtgtatactgaatttgtatgtgtaagtggaattatttctgaaatttctattctgttccattggcttgtctctgcatgtgtaaattccatactttttaagatataaaacttttctcatacgtgttaatagctggtaacgctagcccctatgccttggtcttcttttgggaggtttatttggctattcttagtgcttcttcctttcaaataaactttacaataaaatgttctagatccagaaaaaaaattactgatgggattctcattgttatgacttcacatttatagattaacttgggttttcttctagggtttttatggttttaggtctaacatataagtctttaatccatcttgaattaatttttgtataaggtgtaaggaagggatccagtttcagttttctacatatggctagccagttttcccagcaccatttattaaatagggaatcatttccccattgattgtttctgtcaggtttgtcaaagatcagatagttgtagatacgcagcattatttctgagggctctgttctgttccattggtctatatctctgttttggtaccagtaccatgctgttttggttactgtagccttgtagtatagtttgaagtcaggtagcgtgacgcctccagctttgttcttttggcttaggattgacctggcaatgtgggctcttttttggttccatatgaactttaaagtagtttttttccaattctgtgaagaaagtcattggtagcttgatggggatggcattgaatctataaatttttcaggacataggaatgggcaaggacttcatgtctaaaacaccaaaagcaatggcaacaaaagccaaaattgacaaatgggatctcattaaaccaaagagcttctgcacagcaaaagaaaccaccatcagagtgaaaaggcaacctacagaatgggagaaaatttttgcaatctactcatctgacaaagggctaatatccagaatctacaatgaactcaaacaaatttacaagaaaaaaacaaaccaccccatcaaaaagtgggcgagggatatgaacagacacttctcaaaagaagacatttatgcagccaaaaaacacatgaaaaaatgctcatcatcactggccatcagagaaatgcaaatcaaaaccacaatgagataccatctcacaccagttagaatggcgatcattaaaaagtcaggaaacaacaggtgctggagaggatgtggagaaataggaacacttttacactgttagtgggactgtaaactagttcaaccattgcggaagtcggtgtggcgattcctcagggatctagaaccagaaataccatttgacctagccatcccattactgggcatatacccaaaggattataaatcatgctgctataaatacacatgcacatgtatgtttattgcggcactattcacaatagcaaagacttggaaccaacccaaatgtccaacaatgacagactggattaagaaaatgtggcacatatataccatggaatactatgcagccataaaaaatgatgagttcatgtcctttgtagggacatggatgaagctggaaaccatcattctcagcaaactatcgcaaggacaaaaaaccaaacaccacatgttctcactcataggtgggaactgaacaatgagagcccatggacacaggaaggggaacagcacacactggggactgttgtggggttgggggaggcggggagggatagcattaggagatatacctaatgctaaacgacgagttaatgggtgcagcacaccaacatggcacatgtatacatatgtaacaaacctgcacgttgtgcacatgtaccctaaagcttaaagtataataataataataaaaataaatacataaataaattaattaattaattaacttcggaagattgacattttaatgatcataactctacctaaccaagacatgtttttgcatgaatcaaaacctactcttgtgtctgttagaatatttttagagtttttcttttaggttttgggaatttcttgttaaatgtatgcctaggcatttaattttgtttttctgtagtaaatggggacttccatcatttcatcaatctatctagtcaatagtttatattttaattatttagccaagatatatatatatatgtgtgtgtgtatatatatatatatcacacacacacacatacatacatacatacacacacatacatacaatgtctataagctattggctgataatctataagccaatagcatatagatgtttcatatatttctgtcttatatataatatatattatacagttttactctgtgtaatctacgcagtcttactgagactgtattatatatataatacatataacagatcttatagaagatgtatctataagccaatagcttatagatattatatatatacgatatctttcttggctagataattaaaatataagctaactttatacccatttctttactgttataatttgtagtaggtttccattgatcccctgacctttttgccatgttgcactgagcgctattggttttgctcgctattagtctcttagataaaaggtttccttggctagatacctccctagtgagaataaagctccctgttgtccccgtatttttcttgacatgcctctgcacggctgcagtggaggtctcggaaggtttccctgtggctgtctcacaccatcagccttcgttcagcttccccagaaggagatcccgagatgaagacttgagtgtgaacagtttatctgagaagccatcccaggaaacaccagtcagggcatgtggaagtgaaagaggaggaggaggaatgcaaatgaagggccattccccctgcaagtcaccactgtgggaactggagctaacaagcagaggggagtttcacatagggcactcagagcgaccccctccaccgggcagggaagcctgagattgccccagagtgaccccagccacagggaaaggaagcctgggattcacccatgaaatccctgtctatcgggtaaaggatgctttcagggtggtaatgatcacccagcaggtggagcagaacggagactggccccacagcctgtgctagcccagcagcctcaggggcaactctggagtcagaccaactcagcgtgtatcctgcctgaacactttgtggctagaatggtttgattatatgctgggaatgataataatacctacctcatagggtgggtgcaaggatgccaataatatggatcatagttaagggttataggtataagtacggatatagatttaggtgtagatgatacagacacgcaagtggcgtgccccactggtaccgggcacacagtaaatcaacaataactggaagtgggtggcattattaagttgcaggacttccatgcctgccccatgaagcttctgttatcctgtctgcctgcaattccattcctgttttcctgctcttcttgtggggaggggggctatcttttatgccatcatgaagtgtgttaaagccctcccctgactgggccctgtggtctagcccacctgtcattcgtcccagagcaggaccccacttccctcctccttcctctgatcccttcccaccagctctgacctgcttttttttttttttttttttttgacatgctttgtgccccaggccagagtgccgtggcacgatctcagctcactgcaacctctgcctcccaggttcaaaagattctcctgcctcagcctcctgggtagctggaattacaggtgcctgccaccatgccaggctaattttttgtatttttagtagaggtggggtttcaccatgttggccaggctggttccaaactcctgtcctcaagtgatccacctgcctcggcctcccaaagtactgggtctgacttgcttttgattcttttctgggacggcagtacggcctcattttctttgccttgggggcacgtgggcccttctgcagcctgtctttctcctttgctgttcctaggaccctgagttgtggtaagggccttccccatcacacagagccgaacaagttctaataaaatcagattggtggattaaacactattaggttgctcattattgcaagttaaaatgatgattccatttattaaggccatttaagctggacacttaagttccctgtgggattgtatcctgctgaaagtgccggatgacagggctactctcagaatgccaaagggcgggtcaccagaggaaggtgggtttcctagggtgagtgcagttgcgattctgactgtgtacatgacagtgtttgagagagtcctctctctgtgggtcataccacttacgatgtgggaacggtttgcctgagtaccctgctgaggttattagtcatatttagaaagggcaagggatggaacaaatcacagttcatgtcttagctcacaagaggctagattggatcaacgtccagtcttctccttggatggagtatcttcattctccagtcacagaaaacccatccacagaagaagacccggcattgccacactctcatgagtgtcttcattctttttttggagagaatgagccacacgcagagcccacctgtttcattaaacaagttcccttgcttattccttaggaagtggtcctaagcacagtccgtggacctcaggcaccttctaatgggtctttcaggggcggggagggcttacagcacggtgaagattaaggacaaacatctagagaggggctgaagcgggaagaggctgacatcgttggccccacatgcaagcctacctgccatttagaaatggaagtgaattgtaaggtttccaatgcagacttgtaagcaggagacagataccagcgggtgacagcattgtgacaagcgcgtggagccatttcctgattgttttagtcgatacagacttagggaggaaaccaacactgacacaaaccaattgtgccctgatcgggaaacaatgaagtatcgggagtcgctgttgaaagtctgtaatttccagcggaattgctgtttagtcatcatattgccgctgaatgacatagtggggctgggtggaaactacaattagctgcagtcaccctggtgggactgtttttttccccccagacaatagaatatgaagccatcaacagccaatgttctgtgctgcttgtgaaatggcccattgttcgtagcaagaagaaaagaaaggcgctggagggtcttgccccagccctgcgggggacagatggctgacttatggtttcctcgcctccgttgtagcagagcaacatacaagccaggctgaagaagccccacttcatttgccttatttgtgtaaagagctctctggccgtggctgagagtgaggtggcaagcctgcactggcctcgtggtgcgcagaatcgctggcattcctcttcccctgctgcacgttcaggtgcagagtggtgcagcactgcgtggggtgctgctagattttgggggagtcttccttgacgttggatctgcccacagctactgaaactttattctgaaagtggtttatcacagcacttgccctcagctgctagaggggtttagttctttctctccttggggtttccaaacccaaatatgtgacctgaccaccgcatctgcagatatgcacgtcatcagcctctcctctctgtggtggacgcgtgttttctttttggcaaattcaaggttctttacctttttcatcatcacacgaatgaccatctaactcttagcatttagggagcaagccgctatttccctgagatgctctggctgtggactgaatagatgactttacctggcagtatctgagacccctgacagctgaagcctaaatgggaaagaatcgggtacttagcttgcttgagaagcaagaccgcagatgctctttcatatctagcagtaatctaaatgcaggcaatgaaccaacagcatttggcctcggtgaacagctctgccatcggtctgttcttaacatagtcatctagcgtctgcgttaaacttatttatttcctaatgctgggtgatggattaaaagatgtgtagaaaatccttccacaagagataagatattgcaggctgccacgacacccctggctctttttgctttctgtctctgttttgcctacttttcagtgcagagctcaggcccccacatcgtatatcctgattactttgtggttattactgaggggatgttttttaagcctatcattgacacatttaattcattaggtaccaaatccaaagcaaattttggctggccataaaacatggttaatccagggagatgcaataaaaggtgaaaaattatgttccagcaaatgtggaatattgcttttctgtagagacttttactggtcgatgatatctttcttcataaatttttcttctacttggtactcttggtaacttaaccatttgttgtttccagaccacagaatggctcaatgatactctacaacaggaagaaagtgaaatacaggaaagatgggtattgctggaaaaagaggaaagatgggaaaacgaccagagaggaccacatgaaactcaaggtccagggagtggaggtaaacagcagaaaaggttcccttggtgcacaaatgtcatttgcaggctgcagtggagaatggaattgcttggagtaatttgatgcgagtcacctctgtccaaagaatttttgtttgccaagaccctggtttttgcttttgtttcgtttttctaccttcttaccctatagtctccattcaagttttcagtgaaactggattgaactaaagcactcctgtttcttgggagtcattgctatatagatggggatttgcaagtttcctgtggactcatttgttgtatttatcacggaagagcctctggatgcattgagagtttgcaaagtgtcagggaagaggggaggcagcgtaaggaacttccctcttgaggtgaccctggcctccccctgccaagctggcaggcccctcacagagcctggcttcaccccctccaccgacaaaccctgggtgtgtcagccttaatagaggtttgagatcattagatgggatcacaggtgtgcatgattcttgcatggttggggtcctgcagaaacatcttgggatcttgggccgacttcgggttttggcccttgggtaaagactggtttccttgctgttgttttcaccccacagactctcaaccttgggcagccatggagaaattcccttattcctctttgccatcgtttgagggcctgagccatgtgtcacagccgtagagggggagggcatgagtcaaggtgaagtcttggcctgctggttaactagcatccacttccctgcgttcctaactggtcctgggaaggaacttcccctgggaacagggaaggcattgccttgggcccggagctgagaagctggctcgtgatccacctgttatttcgaacgggtcaaagagaggcattctggagtctgttggtgtgttgagtttgcgagcatacaggatggatagctgggaccataaacccacttgaattcaatgtgttacccttccacgccaatgttttttgtgacatgctttgtcatgatgactttttccgtataaatcatgtgcttttatggctgttaaaaatagcaccaaatggcctgtattatatgacctcacagagggatgacttttgttttatgttttttttaaatacctaataacaatgctttatggagatgcaaaaagaaaagcctctatccaagaaattccagttcctgcattctcctgtgctcagtgtttgcacagtgtggtttaattgactgcacagaacattaaaatgcagattcccccaaacacactgctctgggcgcacctctaggacggtgaccgctgatcgtacaaaggcattagccatcatcgcagggagccaaaggagggagggcttggttcttcctgggaggaccctcatctcctacgctggagggagaggtagagagtgaggcaaggctgggtggggcccccgaacaacgaggctgctcgcaccgggagtaatagggctgcgggaattcaaactggaagtcacggcagctcctgtgcccgtaggcccctggtatatttcatctttagtaatacgtacatcaggaacttctgctcgtgagtaacagccgggtggaattcttcctcagcagcagctgagaagccgaggggagaaaacaacccacagtgttcgttttctttcctcatgttataaattagagttgtcactggatggaatcagaatgatttatggctatttgttaggccatatttgtgtttggagttatttgtgtgctcatacttgcaggcaacagtctgtcccctcagaacttcgggaaagggagacgggcaggatggggaggggtttccatgacctcctaacatggatggcagtgtgggcagcgggaagagccggtgacacgatgcttgctttgggttctcagagagaggccacctactatgatgcattatgtggtggccttgcccgtgagctcagcgagttgtcccactgagccactcagcagatatcgaccctgtgtgcctactctgtgcaaggcactatggtgtcagcagagagaacaggagtcatattctctgccccacggactcatggtcaagttgaagaggcttgaagtacgtgagggtcatcaatagtgctgagacgcagagcagcctgggcttttatgataagcatcccgggagtgcagagtgggctggaatggtcagagacacttcctaggtcagatgggatacaagctgagcccttaaagtcgggtgggactctgtgtgtgtgtatatatgtttgtgtgtgtgtgtgtgcgtatgtgcaatttacatattgtttgcagtttaccttttccactctgcattgtggtctgagctgtgtctatgttgatattgaggtctcttcatcccttttcacaatcctatagcattctactatataaacacttgagccgtttccctggccatagcccccactttagattcctttcagttttttagcattataaataacacttcaataagtgttcttatacacgtctttttgggcacataggcaacctggacccagaattgctgggttataaggtctgagcatgttcagtttattagacactgccttatggctgcataattacatgcccaccagaactggcgattacagttttccccacatcctctcgcttagtgatagatgagagatggtacccccttttatttgaatttgagtttgtcttaattattagtgaggatgagtgccttcttatgttaatgggagcctgttgctatgaatggtctaccatgggcatggacatggatttttaaacagccctgaagaaggccttttcagacaagatcaacccccacatctcaccagcatttctgctgcattacctctgatctggaccaagggtggggaagcccagggggtgtgctctggcacagtgggtggttggtcctttccaccaggaaattgcaacagggatttccatggggctttgtacctcacaggaggagggggcttctgagtttggactctgcgtccgtctttggtggattcaatcaggtggttcccatagactcagcatcttcatcacgtcaggcacggcgccagccagctactcttctgctggttggggtggacagtcctgcacagggtcttggagctgtgatttttctaccaccggggctgttttcctcagttcaggggcatgataaagatatttggatctaccgtttaatatatcacttgctataagccttccctcaggccaggaaaacttccagccctgtttatggaactgttcagccatctcgcttcttttgttctcagaggctggggccctctctacacacggcaattcaaaggcacattgattttctcagccaggcacaggatgggggcagctgcttttgaagctgacgagctgttaggtccatgattagttgtcttgtctgcaagccaaggagaagctagctcgataaggtttccagggatgacaaaggttggcaggaaggaaaaagagggtggttgcgatgtcactgtttcaggagatgaaatctcagcaggtctggagttggccctgcaccccatacagatttatgccagcttctttggtgcctgacagtgtggaggagctttgggagtgggagactctcagagagcgaagagctggatgtgaagcatcaccctggttccggggtcactgcagctttgtggtcggatgagctgagggaggttagtcagaggtgatgctgttctctgggccacactggaagaattccttccaagttcatgatacttttctctggccccagaagcttgtggggctgccttaggtcctgtgtccgcatctctctgctgagagtgctgggtgtcccagaacccaaggcagctctgggctcttgtcctctccagtttctttgctgctgggttcccacaacagatgggagccacacaattactactgagacagtcatgggcttacacatttcctatataccaggtatatcatctcattgaatcctcataaacacatccatgcaaagtacatggtattatacccattttatagatggagagattgaacctcagagagggtgtctcttgccctacgtcatacctcagtcagtggcagagctggtacttgagcctgggtctgcttggttctaaagctcaagctcttgccattatatcagttccttcggggtactcgggtggggcctgtagacttttcagatgaagtcagcacctatttatttagcacacatccttccttcatccactggggattggaggctttctatccacctagtatggcaataggtgctgggatgcagtgatgtaaagagaacgtgtggtcccctatctcatggggagactaaaaaaatcaatcatgcaaccctgatgcagggttttgagggctgtgatagaattacaaggccctgtgtgggggatgcaggaggggaacctgaggccgacttggcctgaaggaagtgacatgagcataaggaagtggggtgcggtgggagcgggtcaagtgacagaggagggctgggaaatattaatgaatagagtctgttgagaatcagccaatgtgacttgaagcaacaggcaaccagaatcgtgatgggtcagtatttcccccaggcctatccagaccaggtcttatcctcctagcaacgcggccctctcggctcttaaggcgtgacttgccatggatgttctgcctttggaaccagtgggtggtcacagcacagaggctgttggtttcatggctgtcacatgcacagagacagccctgtccactgagcctgttctgtggcagaaggaaccccctagcctggaccatctttgggtggaaacaccagcccctcacgtctgactgtcattttcagatgtgaagagaacacacagtgttgctgatgtgtttgtattgcctgtaaacaacgaagagtttctttgacttcttaactgccttaaagctagaagcccggcattaggatggcagtggtggtaatgaggttatgttttgagacttggcctcattagaagtgatgttctttatttgggcacttaggccacatataaaaaaaaaagaaagcacctcttttaaaataggaatgatattgtagttactgcattaggaattaacagggcatgaaataactgtctgccctgtggcaatgccagatcatttcagctccgcttgcagccataagataaattggtatcttgcttgcagccactggaaaacattttaaatagccagccatgaacatgtatggtgcccaaatcaagtttgaaaaacagcaataaatagataaagtggaggtaaggtgcctaatgaaatgaatgaggggcaggagctcacagaaggcaaacaaaccagcagggaggcgctgcgtgtttcacatacaatacgtatttctacttttagtaaaaaatcatgtgtctcacgaacagaaaacccaacaccgcatgttctcactcataagtgggagatgaacactgagaagacatgggcacagggaggggaacatcacatacctgggcctgtcagggagtcgggggctaggagagggagagcattaggagaaatacctaatgtagatgacaggttgatgggtgcagcgaaccactgtggcgcgtgtatacctatgtaacaaaactgcatgttctgcacatgtacgccagagcttaaagtacaattaaaataaaaaaataaaaaattataataataagaaaattaaattaaaagaaaaacatgtgtcttcggtctgtggacagattattttactccattaccctccagcctcactgtgcacccaccagtccataccctaccgtattcctcattcagaagctgtttttttcccacgtctaggtccacattgtcttagcctcataacttctgattctcccccgccccgccccaaggctatctcccctgatcttctttagccagaagtgatgatttcctcccctacattgccgttgctttccatctgtacccttcttaaggaagtgttcaggttgccttcctatcagccttgtccagttcaaaaaagatacatcgagtatttattttctccctgctagaaatcctgtatctggtatccaaatctaagtaacaaggagtctccacagagtgtctacagaatctaccccacacgaccttgctctgggaagtagatttgcccagtgactaactgcttccacagttacacttcctgcaaacctcaccccaaccctgtgattcagtcctggcagatacgtttatcctcgttggttgtgcatctgggacttgaacctaggtctttggtttcagaagtggggctgcccctcctgtctggcttcaagccctgctggttgaggtgtcttagtctcatgaccgtttctagtacagggagcgtctgttcaggggcacctcagggaatctcccggggctctctgctggcttttcatcatctgaatttttgtgcctcgttctgctggtatactaacaagttaaaacttaatttcctgttacctggatgtgttttggtagaatcaattcaggagctcaaatccatagttcttccttaatttctaattacttggcatccctggtgacatgtttctacccaattcatataattaaaaatttaactaataaataacattaagctagctccattttgaagtagcaagagcagccctaggccgggcacggtggctcatgcctgtaatcccagcactttgggaggccgaggcaggcggatcatgaggtcaggagatcgagaccaacctggctaacatggtgaaaccccgtctctactaaaaatacaaaaacattagccgggcatggtggcgggcacctatagtcccagctactcgggaggctgaggcaggagaatggcgtgaacccgggaggcgcagcttgcagtgagctgagatcgcgccactgcactccagcctgggcgacagcgagactccgtctcaaaaacaaaaacaaaagcaaaaacaaagcaagagcagccctttctgtttgcatctgctgagttcacaaaggcctggcagggtgctggttttgcttctccttctgtcttagccacatctagttgctatcacaaaagatcatagactgggtggcttaaacaactgaaatttattcctcacggttctagaggctgggaagtttaggatcaaggtgcaggcggatttggtgtctggtgagggcctgtttcctggtgcattttggtgtctggcgagggcctgtttcctgggcattttggtgtctggcgagggcctgtttcctggtgcattttggtgtctggcaagggcctgtttcctggtgcatagatggccatcttctcactgcatccttacatggtgggagggcaggaggagctctctggggttccttttatcagggcacaaacaaaccccattcagaaagccttcactctcacgatctgatcacctccccaaagccccacttccacataccatcgcatggcgggggcgggggttggttttcatcatatacatgttgggggaacacagattttcagtcttcttaaggctctctcttccctaactacagccaaatgacaagagcagcagtaatcacagcatccttttttgaacttttactgactatccagtcctgtgcgcatcatcttatctgcatcatctcattcagttacttggtaacatccctatcaggtagatactattgtcatcctcatttcatccacggtctgcaagacaaagacacagcaggtccctcgctgtccacttcagtggttgggagttggtccccaaacacactgcataactggctgtcactcctcagttgcaatttgatccaagagctgttgagtcctatacattcacacgagagctttcacttaggaataacaagttgtttatctcctcccagcatgaactgcccatttccatttgtcctgaagccgtagcttccgagcttccacggcacacccactctggcagcgagggtctgtgcgtactcttgctacgcaggccagattgtatgttgccagatttagtatgtacatgcacagacatgtgtgcatacacacacaagggagaatattgatgcccagttaaatgtgaatttcagataaacaacagtttttttttagtacaagtatgtctatattaaaatattgtccgttgcttttgtggaactcacagtttgctgggcatcatgtattttatctgacaaccctccaagcatcagagctgttcctttgaacctttgcagacagaggtttgtctgttttggatattggtcccattgaagacatgaggaagtgagttggtttatctccagacacatcattgatgtggggaccataaaaggcaggaaggacactggccattgctgaggagaagacacgctagcaggttgctagcaaagccaaatgctgccagggctggggactttcgtgctccctctgaaaagtgagtcctggatgtttctcaaataccaaaacgtgaggacttccagatacccagatctggtgccgttagatgctgcaacctggagaaattcaagccttcttctgccactggtgttgggggagaagcttgttagtaaaagatgtgccaggaatatgtagcaggaagtgtgattgtagtttctgccttccttgtatctctggtagatgacaatacatacaatattttgtaatttcctttttaaaacttgatatgagccttattaagctagaaactccctgatgaaggtagagcagcagcatatcaacttggtgtgctgaacttgtacttaattattatcataatagtccctcaacatcactgcacgttagcccataaggacaggaatggaaattttagcatattcagttacaatgtaaacccttgaataccactgtcgaaattcaccaagggccattctctgtttggtccccaacacacagcagggactgagtgaggtattacccaggtcacacaacctggatgtttgcaagcataatttacagcctcacccagaaaccgggcaggcattggaagaccataatagatacttttccccttggtaagtgaccagacatggttatttgccttgggtgaagagtagctctggccatcacttgactgaatcatcaaatattgatcctctctgcatctttcattgctggggaacgttgctggggaagtttcctcccgtcattggcggctgtggcttatgtccgtgtgaatttatgctcagtcagcacgaatctccaggcttgtcctcggatagtcgcggccattcactttagttggcgtggattaggcaccagcagagggcagggatatggcttacgggctaagtaggctcataccactctgcttcccacacgccggggcaaaaatcatgaggaaaacagggtgtaaatgaagggctcttttgccaccagtaggagctggggagaaaaattttaccaaacgagttaaagaaggaacgagctcctcacgcagcagctctggtgaggctgctttgatggccgctggctccggccccttgtttccttctgtgcgggtgtgtgggtttctggctgctgagcttccctgtggatgccctccctcactgcaaggccggagtggaagagggaaagcaggtgatttcatgaaagagcgcctttctgcttcatgaggtttttctcctggacagatgaaataaccttccacgtcctccttgcacttcgtaattcaacagcttgtaactcgcgcaaaacctgagaccggcgcaaatactgaagcggtcagtattgcttcttgctaccctcagtgtggtccaaagattggtatgttcagcatcacccagggggtattagaagtgcagaatttcaggccccaacccagatctacagaatccaagtctgcgtcttagtatgagccccaggtggttcacacacactttaatttggaaaggattgggacacgccattctgttgttgccagtagggtcctgcctcagtgccttgcccccaggcaagtggttatttatttatttattttaccttgtcttaagagaaaagtccaagggaaaatttcacaagttgctctggcaatttatgacttgacttcaagcacctttagaaaatatcgaattgaaatctccaatgatatggctggagcttatcattctttattctgcccttggcaatgagcgatagagaatagcaggtttctgaaatcagaacacactgagtggcgatgactaaacagttccctcagcctttgttctctgggtgaaatggtcctgttcttccatcctttagctcctctgaacggggaacttgcctgtctgttcactgctatagcccagtgcttggcatggcacctagtattgagtacctttggtgccaaataactacatttttcaaaagaatgaaagattttgaatgaatggacctttaaaacaaagggccagacagtaaatcttttcagttttgcgagccagactgtccgtcccaacaattcaattctgccattgtagcatgaaagcagccataggcaatagtcaaggaatgggcgtggctgtgttccaataaaactttatttacaaaaacagactgtgggctggatttggaccatggatgtagttggtccactcctgttttagattatggccacggtttctagaaggagtggggtgctctgtgtatgtcctgctactcatgtttacagccgcctgatgctattcatactcagcttatatttctgcaatgaatgtatacttttatttacaacatacctggtgaggttagggtttcttctttaatgcatgtagcataggcttgtttgtttcttcttgaattgtcctcagcctgaaaacattaggcaatgtctcttgcaaaggagagtttgaatgtgggaattgagaaatgtcctgtttctcttaaaagctcagggcactgcttcatggcattgtagagagggcagggctagtcccagtgatacactctgtgttctcctgtctagtggggatggctgagccaatggcatgtgtccttgttgagaccaggtgggttaaaggattggggtgtcacagaagataggctgaaactgcctgcatctttaggcgtgcagtgctttgaatgaagcctgtatgttgctggatgcaacagagtccccctagaatagtgaccgatgggagggcacagatgctatttgtccatgtttaagtatttacatgacagcacgagaaaactggagaggctctctttcatctttgctgccacaatttacctacagtttatgatggatgcgagaggtagacatttatcacaaaagtgtaagaaatgttgactcttcatgaattgattacttagaatgtattttattaaagattctaggtggcatgtgataaactgaacctctgctggtttgcagcttaatgattcatgcatctgtggtggtgataaggaaatcaaagattcggtttgccttttcagagaaagaatatggattattattaaatctggaatgggcctcttgagaatccttccttagggagcgtacatatcaatactttcttctcgatgtgagaattctaatgcttcacttatggaaacataaattccacagcaagtggctgcgggttccttccttccctctggttccttacatcctttgtgcgtcgaggatgcgtttttattccttagttagtacctggcattcatcgttctttagtctccatggttttgtgtttctattgataacttttaatgctaagagctctgttgaggtctatgttttgcagcagctgagatgctggtagagaccaggatggtgtatttgcctgtcatcccattggcttgaaatttcctaacagattgggttaagtcttggaaaagactaagagtaactattagatctcagatttccaacggaagtgaggtcagctcacatgggatgtagaatgttaccctgaaccaattcatgcagaagccaacaaggccgccaagcacatctagtgagttgcatctggaccaaggacagcagatcagaatgccccgtttcactaggctttgcggatggtggaggtggaggcattcctgttctcaaataacagagtcagggagggctttgctgaaggcatccggcatgtggcgccccagccatcacctcaggacagaggatgcaggcggagctcccaggtaacattcaatgatgaataacaagcccacaggcttacagtgacattaacgaggtgttggcgttgtctgatagcttgagtttcaaaatactgtgtgacttctttttctttcaaaaatatcagacagaggttaaatactgtaatcttttccataggagactgtgggaaaataaattgggaaaccccaagactccttgttttcccccagattccttacccgtctacatgctgtgcagcagaagcaacgcttaatccttttatatgatgtggtgccctcacactggtattttacttaaacccttcattttgttggatgcttttatacatggaattagacctaattgtcaacataatgccatattaagtttagtttcccaaaagagtaaacactgaactgctcggcaattatttcttacacacagaatctgcttggccttccatggactgatcagtccatgaacaagtgagttttgctgctgactgctcattctttcatcactgtgacatagttcaaagagtcttaaatgggccgggcgcggtggctcacgtctgtaatcccagcactttgggaggccgaggcgggcggatcacctgaggtcaggagttcaagaccagcctagccaacatggtgaaaccccgtctctactaaaaatataaaaattagccgggcgtggtggcgcaagcctgtaatcccagctactcaggaggctgaggcaggaaaattgctagaacccaggaagcagaggttgcagtgagccgagatcacgctgttgcactgaagcctgggggacaagagcagaactccacctcaaaaaaaagtcttaaattatagcttccacctaaaaggtgggcagaacgaggctgccttgatcattgctttacagctggtggggttgctctgttctcatcaaactcatttcccctttgcaggaaactcctaggacaccccttcaagggacaccagcctgggcgatgccatttcttgttgttgcccaggttgcttctgtcacaccagcacctagcacagtaaggcttggtgtgtgtttcctgaatgactgaatgcacgtctgagagctgctgctgcagcacttctggtgtctgatgaagggtggttgcttcctcccagtgactgagcagatgcgtgtgttgacattggcagagaggtcgggtgccagcagcctccttccaggtgcagaaccgatcacacttgccttttcctggaaggcggttggttaagtaaaccttattgaagtagctcccctcccagattaatgaatactttcagacatgatatgaaatgtttggaaacgagatgcgacacggtattttggccgcattttttttttccctttcataacacctggcaacaagattctcaggctaaataccagacaagtgtgcgcttcattatgtatagtaacttcgtctataactttttttaagccctccagatggaagcatggtataaatgtggagaggctgagaaggggaaatggaaataaatgcactaagaaataaagaatctgttttttatactttcttttgcaaatagtgtttgccgtgacatattgtgaatggactgaattataacaaaaccagaaatgaaacagagctcgggggtagggagagcaattgttacacttactttaactgatataatgcaaagcaacgctttttacactcaattagtttgtacattgtgttggacacaaaccagaatgcagaacatttttgggttttgtttttacatgattaagggagatgagatgaaataaattcagtgaattatcctccgtttcttttaggtctgagatgtttttgttctgttgttcctcacccctggtattgagtgcataaccctttttcccgggtgtaaggagctagagagcccaatatttgaaagcccagagatctatgggctttcagtagagttccttcttccactttagggccatctttggctacataaacaaggacacgaatcagagctatttacatctggcattttaccatattctgtgcttagaatatcagaagaggctagcaagcatgatcgaagccaacagatgttagtgagcatttaggcagcaaaagtatttccaaggctgtatatttcaagatccttgcttaattcattttgcttaattatactttcttgaatttttaatgctcctaatatgataatattaagaattgcagtgtgtggttatggattgctcatttcaatatatgttagatatgaggggatgtgtgggttaatgctgagagccaggaacagatgaacttgggggtcagctcagtgtctttcctgtgcacagctctagttgtctcctctgggaggggcccaggaagggcctggatgctcctgcaaaggacgcttctgcaaaggatgcagaaaagcattcctcaaactttcatgtgcagacaggtgccctggggattctgattcagttggtctgggtggggcctgagatgctgcattgatagcaagtccctggtgcagctgatgctgctggtgccacggatcctactttgtgttgtggaagtgaagtcagttgtattctacaaaggctgctgatcaacaagtaccacacacaatggaagagaacaagtgcctgccgatggaagccatgcctgtgatacctggcacatgcagtttccttctggcgcaggagttgtggtcaaggaccttggtcagactcttgtcttttaaaaagatcatccctgctttcatgtgtgcaaaaggaaagccacgtgtgtagagcactcggtgattctgtgttttgtattcaaaaccacaaacactaataagaaaacaataggagaaacctgttaggtataatatccaattataattatttttactccaaaaagcacatcaaataaataatgcagtttatgttacttctagaaaatgcggcagcgttagttaatttacataaattatacaactcattatctttgtttataaaaagacttagcaatattttggcttatggatctgaaaggggaaaaaatatcgcagacttcagttcagtgtaattttcctttcctgcacggccacctttttatttatttacagaaagagcatctgtttgacagatccccttaggagtactgccctttccttttgatgaatagaatgccttaagtttgacttttgtttataaaaagccaaataaatacaagtgaattaatccaagcagcaagagaatgctctgagtagcagtcgcggcttccttggctgacaccagggcctgcaggggtggggagggagcctcaggggccagggagccgggtttttctggcctcgtgcttgtcttttctgctgcagaacttctcaggcagcctcgagttagatgtgccagtgccacccactcagggtcagctcctgagcaggtgaactgttcctgcgctgtcccagccagcagccatgagccacatgtggtggtgagtcctggaaatgtggctcatccaagtgccatgagtgtgagacccacacagcttttcaaagacctagcatgaaaagaagccactttttattattttagctttttaatttttttttttatttgagacagagtctcatctcactctgtctccgaggttagaatgtagtagcactatctcagctcactgcaacctctgcttcccgggttcaagtgattctcctgcctcagcctcttaagtaactgggattacaggcacctgccactatgcctggctaatttttgtatttttagtaaagacagggtttcgccatgttggccaggctggtctcgaactcctgacctcaagtgatctgcccaccttggcctcctaaagtgctgggattacaggtgtgagccactgcacctggccaaaaagaagccactttaaataacccattaatatttttgtggattacatgttgaaataatagataaaatatattattaaaattcatttttcctgtttccattttacttctctactgttgctactagcaaagtttaaacatggctttattatatttccactggacagccctgggcctgccctagactaacagagaggctggagacctagattactcttaatcacacccattaccaagactctgattcttccactggtcctgcgtcaggctctgactcataatgagaaacaggatacggctcagtgacaagggtagggcttgtttgatggtttgcttggagacttgaaaggcacctgggagaacaacatagtgtaagaaagtggagctctcttcccttgacagtacttggctgttgcttctagcttaaatattaaagtctctgctggtggatggaggagcccagctcccaggttgtttcaaagtggaaactggtgaagcctaaatttgccttcattgcttatgcagatccagtagattggcaagagaacaagcctgccccgaggcaggtctgcagagcgggggcgtgcttggcagaggagggaacaaggaacatggttcagttgcggccagacctaggcctggccatgtgccagggtgcctggactttggacaccggtgtgttcagagtgtgatctgatactagcaggacttctggctgggagcgccactgtgggtccaccacagggacggcctgggaccccagagccctttccctcataagacttgggagttagagacaaagggatgtctgccatttatcagttgatggttaataatttaattcttccctgcatccatttattgaagaaacataagtccacgatgtgccacactttgctaggcactggggatacagtaatgcacaaaacagataggttcttcaccctctcgaagctcccaacttgtgggagcggggaagaaacagacaggacagaggagtgcaagaagtcccttaggagccctgagagaaggactagaggacagtgtgcaatgcatatgcctagatgacaagtagtggccaggcactggcccttggtgacggaggaggcaggaacatttggcctgtgactaagggaggaaaggccattgctgcaaagagctgggcagggctttcttggggacaggacagtggatgccctaaggctggaaggaccttggttgctctactgccagaaagggatctgtgggcctggagagcagtggacaaggagggggcgcggtggaggggccaggacccaggtggcacagcaggatcagctgtggtatagatcttggattctgttctaagtgtcatgagaagccactgatgggatcgtagcaggggtctggaaggcagtgggggaggttctggacaggtaactttgctttatgctgagtgatgctggatatgtcccttagaccctctggctgttggcttcttcatctatggagtggaaaggctaagagagtggaagagaggtgggccagaatgttctccgaggttccttcctatttaaaagtgccatgatttggagagatcccagtttttttcccttcttggagtagagttacctttatggcttctgggatggattttagatggcttcacagtgccagcatttctgtgaagtcatcaattcatatccatgagttctttggcttcataagataaaagaagacagaatgcacaggactgtgttggaattgccatggagtgcctaggttttcactcagcagttccatggtgagacctgtgcattggtaaagttttaggagctttctgggtcaatgattctgcacatcagcaggattgatcccctggagtttgtgcctctattaggggactaagagggcccctgtagccagaggctccagaggctctctgtagcagtgtgccagatgcctgtgacatactccatatttaactgttcagacctaccagcaggccaagggttttagttcagagattctgagcacctcactttgcagctggggaatctgatggagctcacagaataaacaaatctgtggtaggctgaggggccctgtgatgggcttttgtcacatgctgatgagtcatttgctgagatggcaaagggattggttgtcatgagggctgctagtgaacattgggatcttggggccctgacacagctggtgagcaacattctgatgcatgttcccctgcccctctcagtgaggaagccagctgagcatctgcacaaagcttaagaacccaaggggtagagctaagtgctaatctgactccctcttggacacctataaaaatgtccagaggcttccaatggccatggcaaagtaactggtagtgaacttatcatcccacccaaaccaactagaacactggacacaatataggaaacaactattgttggataatggacagcaggcaggaaggactgtaatatctaagaggaggaaataaacaagctctggctttctggctggaggcattttccagacagtgcatgggggtgagtggcaaccaggcagagtacagcagtgtagcaaagttgaggaggtgacaactagagtttggggaggctgagacaaatggaatccatagggtagagtgctgaagagtacagaggagaagggggggtcagcagagaaagaggtccagaaatctggatagaagatgtccttgattctttggctaaatactaagctgtgtatgcatcatgaaactgtatgaggttggtcaaaagacaaccactgtgggccagaagctaaaacttctcagggttcacacagaactgggaaccactgtgagccagaagctaagacttctcagagctcacccagaactggcagatgttcaagttcaaactagtcggtgtgaagagatgctaatgaacacctgggtattccacagagaccccagaatgatcacatcttaataatggagctaaactctccctggagtgaagacaactccagacctaccctaacaaagcgtataaacaaatcaaaatgagcaagctgatctgcaaataatgcaagtgcctaacaaagctaaatccaaaattctttaaagtaagacaacgaaatccacactcaacagtatatcattcacaatgccctgcattcattactaaacatataaggaaacaggaaaatatgacctatatccaggagagaaatcagccagtagaaagaggacccaaaataacatagatatggaattaaaagacaagagcttcaaataatctattataaatatcctcagccatttaaaggaaaagaagaacagagtgaggtgagaaccataatatataagaagaaccaaagagaattctttgaattggacaatacaatatctaaagtgaaaatgtcaccagatgagttatctattgatatgtaacaaataaccacaaatgtatcagcttaaaacaacacacatttatgatctcacagtttctgagggtcaggaatccagacatggcttgactgagtcctctgcatcagggcctctcacaaggctgaaatcaaggtgtgagccagggctgaggtctcatctgaaggcttgactgaggaggacctgctgctaagcattcttgattgttttacaaaatcagttccttgacagatgttggatcaagggcttcagttcttagctgactgttgggcacaggccacctttgttaccttgctatatggacctccaatatggcaggttgcttcatcaaagagtgcaagccagaaagataatagagaaagtttgctagcaatatagaagtcacagttttttgtaaccttattacagaagtgacatctcatcatctttgatgtatcccatgagttggaagccagttatcaatatgcccagaatcaacaggttgagattacacaagggattgaataccaggcagtagatttcatttggggtcattttagagtctggttatcgcaatgggattaataccagattagacacagtggaaacaaaagataagtgaacctgaagataaagcaacaggaactgcttaaactgaagcactcagagaagaaaggtagggggaaaaataatagagtgtggtagagtatcagagaactagagagcaacatcaaatgatctaacagacatataattggaggcccagaccatgaggagtgggtggcagaaaaatagttgaagaacaggtggtcaagacttttccaaatgtgatgaaactaaagagtcacagatcctagaagcaggagaaatacaaagaagagaacatcaagaaatataatcaagtttgctaaaaaccagcaacaaagaggaaatcttttaattaggcagagaaaaacacattacaaagataagaattaccactgatttctcattacaaacattgcaagctggaagacaatgcaacatctttaaattgctaaaaggaaaaacctagaattctatattcagtgtgcatattcttcaagagtgaaggtaaaataaagacatttttagaccaaaaaaagtgttgctagcagatccatactacaagatatatttgctagcagatctatactacaggatttatatatatacacatatatatacatatatacatatatatacacatatatacatacacacacacacacacacacacacacacacatatatatatatatatatttttttttttttttcttgtgagatggagtttcactcttgttacccaggttggaatgcaatggtgtgatctcggctcactgcaacctctgcctcccaggttcaagcgattctcctgcctcaccctcccgagtagctgggattacaggcacccaccaccacgcctggctaattttttgtatttttagtagagagggggtttcatcaagttggccaggctagtctcaaactcctgacctcaggtgatccgcctgccttggcctcccaaagtactgggattataggcatgagccactgtgcctggcctacaagatatattaaaggaagttcttcaggctgatagaaaatgttacaggatgaaaattcctatttacataaaggaacgaggagcactagaaatggtaaatatggctggacacagttatgtgctcttgtaatcacagatacttgggaggctgagggaggaggattgtttgagtccaaaagtgtgaggacagcctgaacaacatagtaagaccctgtctcaaaaacaatggtaaatgtgtaagtaaatataagatacttttattcttggtttaaaaacactttcttgaaaatataattggccaaacacttatgggaaagttatagctcttaatgcctatatcaaagaagaacacagatcttaaacaataacctaactttatatgcaagaagttagaaaaagaaaatgaaacccaaaatcatccaggggaaagtattatggactggatgtttgcatatccccccaatttttacatgctgaatacataagccccagtgtggctgtgtttggagatggggcctctaaggaagtaattatggttaaatgaggtcatagggatgtacccttgatccaatatgattagtattcatttaagaagagacaccagagagctcactctctctgtgagcacagaccgaggaaagaggaaaggccatgtgaggatgtaacaagaagctcgccacctacaagccgggaagaaaactctcatcagaaacaaatttgctggcatcttgatcatggactcctagactccagaactatgataaaataaacttgtgttgcttaaggcatgcaagatgtggcattatgttatagcgtcctgagcagacaactatagaaggaagtagtaaagattcgagtggaaataaatgaaattgagaatggaaaacaatagagaaaatcaatgaaaccagaagttgatactctcaaatatcaacaaaactggtaaactgttaattacactgagaaaagagatagatagatagatagatagatagatagatagatagatagatagatacaatacccccaaaactgagaaaagagcttaaaaaaaagatcagtagatagataatatgagaccccaaaaagggagaaaagagctaaaaaagagatcaatagatagacagatagatggatagacagacaaataaaagacccaggtgactaaaatcaggaatgaaagggagaacatcactactgaccttctagaataaaaggattataaaaagaatactatgaacagcagtatgccatcaaattagataacttagatgaacaaaatcctagaaagatgaaatgactgcagtttactcaagaagaaacagagaatccgaatagaccaaaaacagagatattaaatttaaaattttctgacaaagaaaaaccaagggtcatatgaattccctggtgaattctaccaaacatttaaagaataataacacaaaatattccagaaaatagaagaggagggaacatttcaattatatctatatacatgagcaataaacaatttgaaaatcaaattaagaaaacaattgcagttataaataatagcatcaagaagaatataatatttagggatacatttttaaaatgaagtttaagacttgtaaatggaaaactacagaaatattcttgaaagaagttaaagaagatctaaataaatgaaaagacatctcatgttgttggatcacaacacttaatattgttcagatggcagtactccccaaattgatctacagattcaacgtaatctttatcaaactatcatctggctttttaaaagaaattgacaagctgaacctaaaatttatatggaaatacaagggacctggaatagttaaaatctttaacagaagaacaaagttggagaactaaaaattctcaatttcaaaacttactgtaaagctatggtaatcaagtcagtgaggtattggcataagaatagacgtataaatcaatggaataaaattgagagtccaggagtaagtcttagcatttatggtcaattgattttcaacaaaggaccaagacaatttaatcatgatagaatagtcttttcagaaaggttctggggcaactggataaacacatgcaaaaaaaaaaaaaaaaaaaaaaaagaaaagaaaagaaaagaaattggacccctgcctcataccatacagaaaaaataattcaaagtagattatagacctaaatgttaagagctgaaactataaaagtcttagaagataacatgggaataaatctagtgactttaggttgagaaatgatttcaatgtttaacattctgaggaattcttagaacttaacaattaaaagaaaaataatagaaatggacacataatttgaatagatatttccccaaagaagatatatgaatagccaattaacacacgaaaatatatttaacagcatcattaatcatcagagaagtgaaaaccacaacaagataccacttcttacccactaggatggctataacaaaaaaagagagataatagtaagtgttcacacacgtggagaaattggaaccctcacacactgctgatggtgatccaaaatgctggtgctgctgtggaaaacattctggcagttcctcagaatgttaaacattgagttaccagaagacccagcaatttcactcatagatatgtacccaagagaaataaaagcatattcacagaaaaacttataccattattaatcatagcaacaagtcaaaacaactcaaatgtccaccgactaataaacaaaatgtagtctatccatacaatgaaatattacttggcaataaaaaggaatgaggcactgataacatgccacaacgtggatgaacttctaaacgttattctaagtgaaagaggccagtcacaaaagaccatatattatgtgataccctttatatgaaatgcccagaatagggcaacctatagagacagaaagcagattaataattgcctaaggctggaggtgtgtgtgtcaggtagggatgaggggtgactgctaatgagtattaggtttctttttggggtgatgaaaatgctccaaaattagcttatggtgacagtttcacaaggctgtaaaatactaaaagcattgaagtacacttcaaagaagtgacgtttatggtgtataaattatagctcaaaaatatgtttaaaataagataattgattgtctaaaacataagtaataacattatatagaagcaaagtgtgtgacaacaatgatacaaaggaaagcagagggaagtggaagtatattgttgaaagattcttacatttttggtgaagtgctctaatatttgttgaaggtagaatactatgattgaagatatatattgcaaatcctagagcaaactactaaaaatgaagagatataggaataagccaatagtggatataaaatgaaagactcaaaaatattcaaattaatgaagtcaggaaagaggaatatgaaacaggacaagtagaaaacagtgttagatggtagagataaacccagccatatacataattgcatcaactgtaaatggcttaagcattccaattaaaagctagagagtatcagactggacaaaaaaaccataatactcaatgacatgctttctacaagaaacactttaataataaaggcacaaatgggttagaagtaaaaagatgggaaaaaatagagtgtgcaaatactaaccataagaaaactaaagtgaatatatgatcaagcagagtagacttcaggacaagaactattactcaagataaagagagatattttataatgataagagggtcagtccgttaggaaaacatgaccgtcctgtctatgcacctaattacacagcttcaaaatacatgccaaagtgacagaattgaaaggaagaatggataaatttcacaattgtagtgggagattcttttctcagtgatgcataggagacaggaaatcagtaaggacattgaaaacttggataacactatcaaacaactcgatctaattgacatttttgaaataaatacccaacagtggcagaatatacattcttttcttacacatagaacatttattaatataaactatatactgtgtcataaaacaaatctcattacatttaaaaagattactgcttctctgacagtaactgaattaatttaggattcaatagcagaataaatatctgaaaaattcccaaatatgtggaaattacacaacatactgcttaaggtaaaagaagaaatattataaaggaaactagaaaatattggctgagcgtggtggctcatggatgtaatctcagcactttgggaggccaaagcgggcaaatcacttgaggtcaggagttcgagaccagcctggccaacatggtgaaaccccatctctactaagaatacaaagattagctgggcatggtggtgggtgcctgtaatcccagctacttgtgaggctgagacaggagaattgctcgaacccaggaggcggaggttgcagtgagccgagatcgcaacactgcactcctgcctgggcagggagacagagtgagattccatctcaaaaaaaaaaaaaaaaagaagaaagaaaatattttgaaatgaatgaaaattaaaaccccacatagaaaatgtatggagtacagggaaagcagatattagaaggaaatttatagtttgaagtgcttacactatatttacattaaaatcagtaaatgtaattgatattaacaaaggtttaaaatgtgacctaaacttttacatgtagaagctagagaaagaagaaccaattaaaaccaaaataagtaaggaaaaaggtaatattaaaataagaataaaataaatgaaatagtaagtagacaaacaatagaaaacattaataaaacaaaaagctatctctcttcaaagatcaataagttgaaaaattatagctagcttgattaagaaacagagaaatatacaaattattaatatgagtaaaaaggatgcatcactacagatgctatacacattaaaggtaacctaagaggtgtcagaaaaggatatcatgaaaattttatggaaataaatttggcaacttcaatgaaatggacaaatttcttaaaagataaaaattcttaaaactgacacaaaatggaaaatctgagtagctctatatttattaaattaagtttgtaatttaaaatctttccccaaaaagaaacctccttcatggtgaatttgatttaaaaaaatttaaggcaagaataatgttaggcttaccaaacattttcagaaaatataggatgatagaacacttgtcaggtcattttatgacaccaggatatctgataccaaaaccaggtaaagacgttacaagaaaactacagaccaatatctctcatgaacatagatgtaaaaatccataacaagatattagcaaatggaatgcagctataagtaaaaaggataatacaccacgattaattatgttgattgaaggtgtgcaaagttggtttaacatgtgctaatcaatgtaattaattgtattaacagaacaaagaatattgaccatataatcatctcaacagatgaagaaaaagatataattccatacccattcatgattaaaaaaaaaaacctttcagcaaactagatataggagagaatttcctcaatccaataaaggaaatctacagaaagcctacacctgatcatatatatatatatatatatatatattttttttttttttttttctttttgagacagaatcttgctctgtcacccaggctggagtgcaatggtgtgacgtcgcctcactgcaacctccgcctcctgggttcaagcaattctcctgcctctagcctcttgagtagctgtgactacaggcgcccgccaccatgcctggctaatttttgtatttttagtagaggaaggatttcaccatgttagccaggatggtctcaatctcctgacctcgtgatccgcttgcctcggcctcccaaagtgctgggattacaggtgtgagtcaccgtgcccaggcacctgatcatatttaatagcatattcttgtacttccttctaagactgggaaatcatcaatgtgtccactttcactgcttctattcaatattctaccggaggtcctaggaagttgaataaggccaggaaaagaaataaaaggcatacagatggaaaagaaaggagtgaaattctttttatttgcagacaacatgatcatgtgcatagaaagtgttaaagaatctaataaaaattactggaactagtagatgaatttaggaaggccaaaggaacaaggccaatatttttttgaagtatattttcacatatttgcaatgaacaattggaaaacaaagataaagaaaaatacagtgtaaaataacataaaatattccttgaaatattttaggatcaaattaacaaaatatgtaagacctgtacccttaaaactataacacattgctgacagaaattaaagaagacttaaataaatggagtgatataccatgttcatggattggaagactcagtgttgttaagatggcagttctctccaagttgatctatagcttcaatgctatccctgtcaaaatctcatcagacttttttgtagaaactggcaagctatttttaaaatttacatatagcataagaatgaccaagaatagctaaaaggatttataaaaatcaaagtaaagttaaaagaattgccctacttaatttcaatacttaatctaaagctacagtaatcaagatgatgtgatactggtatcactgagttgatattccaaagaggtagatttcagggttcagtttctgaactttctgaggagccaaactagagaactaaattaatctttccaagcaatggtgtgtgtgtgtgtgtgtgtgtgtgtgtgtgtgtgtaagagagagagactcattctcattctcattctcatttttgaattaacttacagataaactgagtttcccaagaaggccctccatggcagactatatatcatctcctctctatctcccccttctcagaataaaagcagttttttcttctttatggtttgaaaatgaatttatatttattgtagaagacttcagatagtagataaagacaaggaagacattgatataatggcctatgatgtccatctttctgaatgcttttcacatacacacacatacacacactttttttttttactaaaataaggggttatatcatatatgctattttgtatttttttacttgactccatgttaagtgatttacatatttttaaatgactctgtgtgatatcatatacttaacctgttcactgacattagacattgagactattactactatttgccattagaaatcacaccgtgagaaagatccttgtatctttatttatagtaagccctcaacaaatatttatttgaggagttactaggtaccaggcttttcatacctgaacaattgttttctggagaatattcctagaaatgaaatagtagtgctgggttaaacgatataactgcctaaaaattagctccatatggctacatcatccttcagaaaggctgtgttaatttacaactgctctagggatgtttgagaagtcctgctgattaacaaacatgccccaccccacaggacttggcgcagggtgggggccacacctggtgcctagtgttattgacttagtgatgggtgaaaccttttgttcagcaaaagtcatttgtaccacatcaccatggggatgtgtgtaaagcattcatctagctcatggaggggaactgtacagctcactctagtgtcttctcagagttctgtagtaagttttccaacttgccattctgccatttattaactacaacaataaaaaaatggaagctaccctttactacaataagtgcttttcaggcattatctgaattttacaacaactctgcaatgtttcatcgatgagaaactgaggctcagaaagtttaaataatttccaaggtcacttagctcgtcacagatccgtggatcaaatgccagggtccagctctttctctaagtccaatcctgagtttttgacttgaacttgtcagtcttcgttttctaatcatcctgattctggggttcatttactctagaaatatttattgagcaccttccacaggccaggaaggggaatagtggagagctgcgttgacaaggtcttggccctcacgtagcttccagtccggtagaggagatacaatttaatcatccaattgtatgaaaaaactgtgattactgccatagaggaaaagtgcaggaactctaagatctgagagcaggaggatatgatctaatctggggatcagagagagaagctctgaagaagtgatgtttcactgaggttgccagttaatggggctggggagggccatgaggagaaggggaaggcatttggtgggggaaagggatatgcaaaggccctgggggcctgaggaagtgtgtgctggaggaaatgaagggtgggcagttcaggtacttagagcgcagagcctgagggggctggtgagcaggtgggcactgaaccccgcagtgcacctatgtgaaagtgtttggaatgtaacctgagaacgatggggcccatgaaagcttgtaagcagggcagtgtcatcctctgattattgtaaaaacattgcccacgcttctgccaggcacatccactggggtgggaggcagattcacatgggagggatgacttattggttaaaataggtggtcccagttctgtttctcttctccttatttttcttttctggtgagtttcttctccctgtgctaacattctgggcctcaggcttaagtaagaggcagatggcccgggtcttggagcagggaagccaggggaccggcagccccaaaagctgtcaatgtcataagtcatccttgcagagccgcagccaccttctcggcagaatgtcaagcagctcggtacggggagcagctgctctgcatggctctgagcattgtcagaacaccataaacaaaatggtcaggtttctgcagagataacctcctggcctccgaccccatgcggcaccgtgccgagggccaagctctctcttcggcatctgtttttggtacttccaaagcccacagtgtggggctttgggacgttttcagcctgaatgctaaaatgcctggaatcaaggcaagaggaggactttgagagttggcttccctgtgtctgttccctggaatgagaagaagcctgagctacagcctcaggttactgctggtggtccctctagaccaaaaaaaaagaacttgccaagagagacccttagtatccagagtcccctcctctcctggggttggaagggagagcaggaagagggagtggcctctatgccagccaggtccagagcgggagggagtgaattgcaccagggaaggagcctgctcgttgctggtagaacttgcagcatccagacagacctctcagccctctttggatgcctttatccttgcaaatgtcagagatgctggctttgcaaaaaccaaaaaccaaaacccagtaaccagtcttcccagcctgatgtgtgtctgtgccctttgcccacctgggcactgaggcaccaaggcacctggcctcacactcatttcctttgccccatctggctcgccagtcagcgagaagccctctggttttctgaattgcgcccaccagggaaggaacactgaagatttcatctagtcagctttcccttggctcatttgaggaagtgctagaatgcttcccaagctccctgcttatagggtaagaccctcctgtcccaagtatgacatccctggggttagtaaaagtctatgaccttaagaagaggtttctgcagaagcagcttggctctggctgtgcactgctgagtgtaatggtggcaggatgctaagggtgggcccagggtgccacgtggatgtcagaaagagcaaccaagggcaagcccttcttggagaggcagcattataattgccatgtggcaccggtttgcagtcactgttcaggtaattgctttgtaattgactgcatcaccttcttcctgtttaataaatagcacaaatgaaaccaacccgccagtggtgggattgtaattcaaattccattgactatagttgcgcatttttcatttagcatgtaaaggcagtttctatgtaaattatttcaaaaggttctccatggactaatgacattagcgtctggaaggataggaattgtcatagtaattgataggacaatggcgtggtgcatcatggagaaagaaattggcgctgtaacttgtacactttttaaaaataaagccaaattaggagagaactgctgaaaaacaaaaacacatatttcataaacaagaatccaaaatgtgacacatttgttttgacttaaagagccaaattatttacaaacacagaattaattattccattgatgaactttctgcagaaaaattatgagcactggcaaatatggacatattctctttttattcacccaaccagccactttacctaaacaaagggtacctctatgtctagttcccctactggcagcagaaattatattaaagacattcgttcagtttgaaaaacacagacttgtaactttttttctttataactggcagaatattaattctgcaaaccaattcaagaatctctttgaaatgtggccttttgggtttcaaggttgtaggtatatatttaataaattgagttgctttacagttaatatgtcaaaggcctggtctgccacatggagaaaataaaagttgtagaaacaagagtaaaaccttattaccaggtaggtagatgtcctgaaaaattggatttcatccccttgaatttgaatctcttgtaaattaaatattcagggaaagagaagtcaaagcagcaaagtaggaaaacaatcaaaacttgaaaacgagcatgttcttaaatgaaagaattaatcatgctaaattagaaaaagtattaaaatagttttagattaatgcagactgtgagtatcaatataattgcagcagcttaatttggcataaaaagcatctaatgaaatattttaatatcactgtccattcaatttaccagcttgaatttcacggggtattaagtggtttttaaattatcattgcaaaattttccaaatccatgtggattttttttgttgttgtttatggaaggggaaagaaattgtgtgtgtgtgtgtgtgtgtgtgtgtgtgtgtgtgtgtgtgtgtatgattaatgagtctaaatccaaatttctactttgtggaacgggtagaaaccaaccccctgttctttcccattgtgccagaaatccatgttcctccgcttcttggacctcggccacccagggccagggctttctgtgtcatcctgaagaatgcacagctgctcccaaggagagtcaaagagcagagaggagccttagcagctatttagttcagccctttattttgcaatgagggagatgatcactccaccttcttatagaaagagagctttagggagcctcatttcttctggattttctgactcatagactatattaaaaatacctcagtacactagagaggaactccaaatggcaattgtcgaagcacgcttgcccagggatcctgcaggcccaaccacctgtgtcgcctgacatggcatttttctggttttccagtagctccaagactgggttcttccatgcaccccatctgctcttgcccctctgcccaagtccagccttctctctcctccaaaagtctctttctcattgcctgtagctctcacctctctgataactgcccccagatctggaagagcagaatcaccaggccagcagggaccagcgactgccagtttactcaactggacgggtggtttctattcttcatctcagctgaatttctgggtagcatttgatgacagttcatttcagcctctttcctgaaactccttttctaggcttccttgacctagaaatctgagtcttggtgacctctctggccactccttctggatctaaagctctagaaggactccacgtgaaggctgagtaaagaaggatatgccagaaaggagagttggggctgccctccctcagggagcctgcagtgagggagggaaatagattgggcagggggtggcagtgggatagaggtgactgtatttacacaacactgggggacagagggatatgggtttgttgcctatggccatcaggaacaatgatagttttcaaacaggaaagctgcagtcctaacacccttgtgtctcgtgacatagcctttttctggttttccagtagcaccaagacagggagctccaagacaaggacaatatgacaaaatgtccgcaagattcatgtaggatgatgctcattacagcagtattgataatagtgggaatttggaacaacctaactcttcaatgataaggaacaagttaaataaatcatggtactctgcaaacatttgttgaataaataattatataaaagagcataaagaagagtaaatacgaaaaaaaatctctaacctcaccgctgcaggcaaggattttgtgtattctcacccttctccaacctccaccaagatgcactttacacactgccaccccaactacaggagacaccccacctgtgcttttccacataatattatgttgtgcatggtttctcatgtccttgcatatgctttgtgatcccatctttgaatggatgtatattgttctgtggtcagccctcctcaagttttgggcaaaactgtcttcctttcccgctctctactttctccgaggttccagctcatccatacctacagctccagtggtacttgcacacaggtgactcacactgctctatttctgtcccagtcctcttctctgggctccagataggagagtcaaccacccatcccatggtggatgtcaaatgttcactacttgacgtctccccttagactctttggactcccctaagtccaaaccccaagtcatgatcttcatcttcaaatatcttcatttcatgaaaggaagcaccattcattcagttgtgcaagtcataaggctggtagtatttcctgataccttcttagccctctatcacccccttgtccaaataaactccattcccttttcctctgggagctgtaaaatccaaccttttcctctatccatctccttggtcatcatagcagcccaagctaccaccaccaggacatcatctttctacatggactgcttgccccagcctgttctccatgctgcagctgaggggtctttccacagtgcagaccccatcagtccctgctccgttcttagggtgagatttgtggctctctggttaggaactaggcatctggagccacttatccaagttgagtcccagttcctcttcctctccctacctgtggggcttgcccctgtgctcccgttttctcatctatgaggattagtgagtcaatcacagccactgtccttagatcagccctgccacatagaaatgctgtttcggtatttgctgctgttcttcttcttcttcttcttcttcttcttcttcttcttcttcttcttcttcttattattattattattattattattattattattattatttctgagaaggagtcttgctctgtcacccaggctggagtgcagtggcgtaatcttggctcactgcaacctttgcctcccgggttcaagcaattctcctgcctcagcctccccagtagctgagactacaggcccgtgccaccaggcccagctaatttttgtatttttagtagagatggggtttcgccatgttagccaggctggtcttgaactcctgacctcgtgatctgcccgccttggcctcccaaagtgctgggattacaggcgtgagccaccacgtccaggcttgctgcttttattttgctattgttatctgtaaaatagagactgtagtgagaaacacatgggttaatatgggcagaatgctcacaagtgtgctaactgcagagtaagtccttcatgcgacgtttgctgtggctcctggcattccagcctctcctgggccgtgggcttcttccttccctgtgcttaactggatctgcagttcttgtgctcgccacatgcccacccaccacaaggcctttgcacgtgttctgctcctgcctggaacactttcctcgctttacctccttcttgcactcttcaggtcgtaactcaacaacttcctgacctcactgatggggccacttctccctggtggggccacttctccctggtgtctggtactccttcctagagaatccacagaactcgtgcaaggaaggatagcccagtggagggagccctccgctttccagctccatatgtggggacaagacacaactcaagcagccctctgggaaacccattggtttccaagaccctcccacagggtgcttggtggcctctggtggctggccctccaaggctccttttggtccggcggccccagtggccatgcgtcctagagagagatgttcagcctgatgggagagagggatccaaggatagattgtttacaggcagctcacttccatgcacccctgcccctatcaccactgatgatgagaaaatgagtcagtgagagcccatttcctgttctttgttttcttttaatttgagagaagatggagagaatccttgtcaggtaattacaccccagactggaaggtattggagcagctttccagccaagtctgggactcgcactgcatttcatggtgggtggcgctgatgcaccttcgggaagttctgcgacgtgcaagctgaccctggccatggggctgcctctatgggaacattgtagcccatggcactattcacttgggcctacggatgatcagtggttctcgccaaactatctgaagggagttcccagtgcctcgcctgtctcatggcagctcctctgaacagatgctcaaaagctgcctttttttctttctgaaatacagaccacagattctatggtctttaaagagctgagctattttaaagatgttggtacaacagaaccctctaacctaaacatcacataaggggaactcggcgcacaggtgaaccagctccaagatctagcctatctctttattctaaaccagagattcacatgggcctgcttttggggtgaaagtagggcccctgagcccataacgacacctgtgtacctggcagccactatgattaggtgtcacctgtttggagccccactgatggctgaaatccccacctcaaaaactagaaccaacaggaggctcatgataggggtgaccatgtacatttctaaatctgctacaaattcccaggccacatgtgtcctcttttcacagtgtagaggccaggaaagagacctgcccgctagcatgctttctctaaatcagctgtttcagatgtacccaccaccgggccaatggagcctgctgtgtgccaagcaccatgccagattctgaagactcagggaccagcgccacatggtctctgttcttgaggtgtgcacagcctgcgtgctgaggggatgagtgagcctgctggtggggggcagagaggaaagacctcacagggagattggcatgtgattgggccctgaagggtgaggaggagcaggtcaggcagagatgggcatctggtggagttgatggcacaggtggaggggcggaggcgccagggtgtgccacgtgcttttagagctgccccagcaacgattcttgatttgaggtctatgggtggtcctggaagatcgtcatgggggtcttcagctattggtggcattttgaaggtccaaacagagatcttccatgacaggtgcatctgtggccgtggcatccaatctcttctctttgggctggaatcatgaacgttcagggtcgtcaccctcaccctgctgtcatcctctgaggctggggagatgtacctgtggctgacgttaatgcacagaatcattgtagtatcaatgcaggattttggcagcaatgcgtttctataagaagtggagatatttggagctgctgggctagagtacaggtgtcgtatctcagagcatgttaggctaagattgtaaagggtcttaaatgaccccaaatatccctgcctaacagtcaacaagttagagatttggggagctattgaggctgagtggaaagagtgaaaatcccagctctacacttctgagtagtaagatatcaggcaagttatttaactttcctaagcctcagtttcctcctctgaaaatgaggacagaggtgctctgaggactccagattgttatggagagtttagctcagtgccttccatcgacttgacactcagtaaacagaagctggagctactcttacctctatcactgtaagtgtcaaaattgtgatggtcactctgagacttactccatcagtaagtaaattaactcatctgatttgatctagcagagatcagctgcctggagcaactgcaactttttttggaagatcagagaatgaggaaaagctaagttatttttatcaggaaacactcggcaaggagaacaggcttggggtagagagagaggtgctaccgagagggatttcagcaggcggggcagtgtgacctcagtgagcagccagggggagacagggcccaagggcgcccctgtgttctgcagaatgcatggcagtgtgattcagggagaatatggccatcattgtgaatttgttttaggtctcaaatcggatgtcatctccctgtgatggtgtggacatggggcgatagtcatctgagagggaagacctctgagcatcacattctcatgagatttgtaactgctcttgggactgagttgagctattctaaccaagttcctctacctttctccctttccttcttctccttcatcatcatcaccactgatatttttacacgttgtattggtcaggctaggttaggccatgtgctggtaataaacaagccctttccttcttcttcttcttcttcatcatcatcaccactgatatttttacatgttgtattggtcaggctaggttaggccacgtgctggtaataaacaagccctggaatgccagtggcttaacaagttcaagtttatttctcactcacattgcaactcttgtgaggcaaatgctgcatcagagtggttcccctccaggtggtgactcagggatcctggctccttctattgtgtggctccaccatcctagagtccttgtttctcatccctgaggacagggaagagagtgaaggtgttgtagcagccaggcctggaagtggcatacatcaattttaccttcatttcattggccagaactcagtcccatggccagtctaactacagaggaggctgggaaatacagtctttctttgtccaggaagagaaaattatccagttagtttggtgactagttagtttctgcatgtgtgtattatctcacttaattttctagagaaccccatggaccaggtgctattattatccgtattacgtatggataacttgaagtacagagaggccacctgaccttccctgataagcagtggagccgggattcaggaataagactgtgtgactctgaagcccacactcgtagcgctctgcgtgctgggcaccgtgggggtatgagaatacacggcacagttcattcccacacaaagagcttataatctagagtgctttcctaacaggaaggggttgctttttgtctccagagcactttatctctattttactttgcattgtggttatttaattgatctcctcaactagacttgaagtttcagaattaatgtcagacgttcatctctgcattgtccatagcccaaaggatacttagtgaacactggttgaatgttcaaccaccagttcaaccacactggttgagtgtgggccgttcagtcaatagagagtttggggttgtgggcatggaagaggagaggcaggcaggaaaagactcaggacagggcagtgtgctggatgcaggaaaaccaagggtgaatcaaaagttgagaaggaagagttggtgaattgtgctatgagcaacagaagcatactggggaagaggactgaaagagagcagtaaccgtgagatccctggtgcccatgcaaagcccaagaagtgatgagcagaagccagaaagctagggctggagcagagagcagtgagaggtggctgcagccagcacaggcggctctcgtgaagcatttggtattagcgggagagttggggaaggaggatcaaagtcaggatgagtctattagtctgttcttgtattactacagagaaatgcctgagattgggtaatttataaagaaaagaagtttaattggctcctggttccacaggctgcacaggaagcatgattctggtatcttcttggcttctggggaggcctcagaaaacttacaatcatggtgtaaggcaaaaaggaatctagcccttcacatggccagagcaggaggaagagaggggagggaggtgccacacgtttaaacaatcagatctcatgagaactcactcgctgtcatgagaacagcaccgaggaggaaatccgcccccatgatccaatcacctcccaccagaccccacctccaacactggggattacaattcaacatgagattgggcagggacacagatccaaaccatatcagtgagggtgggagttttccagcctcttgtgtctgagcaaagggaaatgagcaggaggggtgagaatgaaaaatagagggagaaggtgtggtttcaagatccagtcccagacgacaaaggaagacaagaggatgagataacaggagaaggactgtccttggagaggaaggggcaccctgtcctcggaggcaggtgagaaagaggaacaggggctccatttcctcatctataaaatgagatgccccggtttgcactctcaccttcgtgtgtttgtgggcatcctgggttgaatagtatcctcccaaaaggcatgtccaccctgaacctcagaatgtgaccttctttggaaataaaggctttgcagatctaattaatcatattaagtgaggtcatgctagatttgagtgggcccttatctaatgactggtgtccttagaagaacagggacctttggataggacacacagactcagggcaggcatggagagactgcgtgaagacagagatagagactggagggatgtgtcttcaagctgagaaacacccagaattgacacaagactggaagctggaagagacaaggaaggctcctccccagagccttcagagagggcgtggtcttaccaacaccttaatcttgaccaagccttcagagagggtgtggtctttaccaacaccttaatctctgccaaggcttcagagaggatgtggtcttaccaacaccttgatcttagacttctggcatccagaactctgagacaataaattgctcttgctttaacccacccagtttgtaagcaataggttatggaagccctgagagactgatatagtggggaacatgtgaggtgcattggaaaatactgggaattgtacaattgccatgaaaatgtgcagcatttccatcagaatgattatcaagtccatcgtgtggacatggcctggcagagggaagggatggggtgaggaaactcggttctgcctttgacagtgccttcctttggcctggagctttttcctgcatcatattcagtccctctggatttaggtgatgaaaacaccatgttctctttccttacgggttgcccctcacctcagcagaagcagtgcatgtccctgagttttagatttggaaagagagatatatgtggagtagtggatgttactatatgtcacccagctttccacctgggcaggggacacctgccttcagtgagagtaactcggggcctgggatgttcactagaaagttccatacctctgggtctctgttgggccattttgcatttccaaattatgtgttgcaaccaccccccccatgcacgtattgcttttatcttcctgcgtgtattgacacacatttttagtgctttctccgcatataaactgactgctatctttagctttacttgctgcgacgtaaattattctcattttattattattaccatcatcattttcattatcacatgatgccagcaagtgctgtggctctcggggactctccgacagatgacagtcatagaatgaaactcccaatgaatagaaaacccctaacatttattccatcgatacttttaccaacaagtctgaggttccttttaactttactgtcctaaaatgtccctcattttgcaaatgaggaaatgggggctcctgggggggtgaagtgactctcacaggatcactcagctctcagtggcagaatgggaactgacccctggtttccccctgcagagtgcagtgtcttttgtgtgggatgaaacatgctcccaatcccattgccacattcctcttctgagtctgccgggactgctgtggaaggtgctcagtgaagcactggtgggtgggctgccatatctgggttccttgcagtgcacctactgaaagcctagaaggaccttcactccatgacagacacagtacccagaggctgggaaagttagggacgaagacgggcagagacaaagggggtgctggactctggcaggatcatccatcgtgctggagtggggaatctccctagagtgtatctcgggagagtgccatgttgttagggagaacctaggctatggagtcagcctgacccagttctgcgctggagtagttacgtgaaaacagtgggcctcagtctcgtcatctgaaatggaatttcagtgcacaactcctaggagttgttcagagatgaatgttaagtgcctggcccagagcctgttcccagttggctgagctttcctctgtgtgcacgcccctcatcacaccagcaaatggtcagcttgtcttctgggccctagcgatgaattaagcgctgctgggagatcccctctgggtgttgcttcagctgcctgacctcaggaggctgatatcacagcaacagcactcactgggctttaagccttcacatttcttttactggcagaactggaagggcagagagcctagcccaggagtgggtggccagtgagaactgggcagccagcctggctccactccattggcggcattgcccttggacagttttggttgtcacccacatttggcttcttagctgaaactctagaggtacattcctccttccaacaactgtctggaaacaggaagtggtgcagggaagaaaaccagatgccagcttcccccgctgttttgactgggctctgtaaatggaaacagctgagaatactatccaagggtgcgtgtgcccatcttaaagctggtgtgtgcattgcagggaggatgctgggtgcaaacatactctgacgtttatattgaatattttagtttgcagaaattcgcaattaaatctactttccacctacactttgaaaaatccatttatagaaaccaaatcaaattggagatctaaggactggtggccagaaatgaaatatttttaaaataaaatatatggagattgaattgctgaagcgctggcttgttctgcggcttcctgggatgtgagctagagggaaggcttattggacagagccttctctggggatcaattatgaactactcttacgtcctggcagtttcaaaagggaaaaaaaaagttctttgaaagaacttatttagcaggcagagccaatattctgtgttttcttgaagccaccttgtatttcagcttcggtgaatatgtgtgtctcctgtggatctttatgggaattgcttgaacactccggagaggctggatgtggcattaaaaccacctaacctttgctcccccagcctcgccattcatcctgaagacttaattatttctcgaaagatgatccatacgggtactgcctttttcttaggaatgtgagcccagatgctgaattccccactctccgtactcaggagagagaagctcagactcagctctggcttaaatttctgaattgatccctgattgaattcctcctttgaaaattatcaagagctgcttagttttttcccagttcctatgagggatgccaaatccttgcatgcgtttctgcactcctctgcacccacggaccactcagagaaaatgcaaccattttgttcaagtgagttcttattgcccttcatgggctcagttccctttgagaagacaactgatcccatgccacgtgtttcctgcagcctcgcttccgcctttaggaagcaggcagaggaattcctacagagcactaggccaccccagcgccacctcccatgtcacaccaggcagaggttgggtgggatctctgggaaggcatgtcctccctgcctcctgggaatcctggggaagaaccaccctaggaagtggcaagctccggcggggtgtcctactccctgctgggtcactggagcttccagagcccaggcttcgttgcttttctgctgtattcctgccccctttctactgctttccagtggacagggacggggtggggctgccttcctgggaagggattgcgctgcagaagctggggctggtaaaggctggggagcaaatgcagaccttgtctgggtgatgagagaccgccactcgtctccaggagctcccgccagaggcctgctgtgacaagggataacgtgctggcaggccacttgtccaagagaatcattccttcctgcacctggacactgtttcagggctggcatttctctggcactcggtgtgagcaaagcccatttggtcgtttgtcagtgaagacagaagagtcacaatgagccgatttatagagtacatggggtgttgtggggcagaggcccggatggctccatgatccatgtgcatgtgttcccggttttgtttgtcatttgctttcttgccatccactgggaaatgtatttatcactacagtttgtataatttggtggtctgttttcatcttttacaagcaaaatgcttggtatttcaataagattgaaggggggtggaaatagattgcatcccacttaggactctcagtgggggagtctaaacatgaattatcccagcttaatgcttcaagttattggggttcccctggggagcatcttcttggttcttgtaatgttgctgcctcccgatggctgcccagggtttccagctctcccgtgcccctcgcttttctctgaaaactcggcatgccccggggggcctctttggagcctgttggaggagattttgtagtaatgagcatttggcttttgtaatcctttttctgcttcgtgctagcagcctcgcacttcccacctgttaaagcttgcaaagatatcatcggcaggcattttcccaggggaagcacagttgtgtccaaagcccagaataatccaggctttcctcatttctatgcagagggcgttagttgatcctggtgccctcaagagaaggtccctccagaacaagctcaccctccatcacaagcactgatgatgggggtgctcaagctggggcagggagaggctgagaggggataacccaaggtggcaggaggctccctcggtggtttgtggtggggctgttctgttcagccaggatgtggccctttcaggggtttacgctgtttaacactggctgagtgtcaggactggggggctatggatggtgagcttctccctggagctggctggtagggaagttcagcagctctctggatgttatgaaaccacggagaggcacagtcaccttaaaaggacagcagctctcactggctgctagactgcctctgatggaaggtgtctgcaagacaaaggagaggctgcgggcagcagtgtgcgggggacaggtgatcttggccagcatcctgcttgctcatattcctcggtgagaccagctctgcagagaaagggctgcttcagccctattcacccaaaacctcaatgtagaaaccacccactttgctctcgttcagcttccagagggaatgctgtcagtgacacagcattctggtccctggagtagtgggttcttgacattaacgaatgggcattgtgattttatccttgtgccttatgaacttggttaaagatttgacagtcactgtcagaggctgcaagtcatgcaggggcttctgagcctgcaggtgaggaccagcccagaccagggtgaagtctcagagagactctccgtggacccttcaccaaatggcctccaaggcaaggcccttgatcacaagtgtgtccctggttctccctggtcctctcgcatctgccccgtgactcccgactcccctctgcacttggtctggtctccaagatcgttctgatgtggactttcctccttgtctatgctggcagacctcaggaggaatccaccacctccgctttgctgccaggccaatcactgatagcatcaagcacactggcttgaagtcagacttcaggtgttcaaatactgactccaccttcacttacatctgactcgggcagttatgtaaccttctggctttggggttttttttgttgtaaacagggaccctaatggcatctgcctccctggagttggaagctggaacggggcaacacatggacaatgctgggaacagtgcctcacacatgcccgtactcaatgctgtcatgggacccattccggccctgtctcctacattgcatctccatctgtgatctttcactcagtgccccggggttgagaactaaacccctctactcattctcacaagcaggccttttcctcttcaaccagattgtaactccctgaggggagggcttgttgtgtgtttcctttggatctgcacagtggtacttagcagcgttctaggcacctggtaagggtttgagtaaaacagactgattggatagttagtgatgctgggaatctggagtgtgaattaagcagtatattccaaattacttccaggcgttcatcatttcagtatcacacggccacatgggaaaatgcccactgtgtgaaatttattcatcagttcaacaaatatttatcgagtactttccatggcatggttttggttcctgaagattcaaaaatgaacagacagaaaatatccacgcccttgtcacttacctgcagcagactgacagtggtcagatacaatctcaagaggtgatcagtgccacagagaaaatagagcagggtgtattggttatctatctctgtgtaacaaattatccccaaacatagcagtttaaaacaatgcatatttattatctgaccatttctgtgggctggggccaggcatagctctgctgatcctcccactcagggctccttacaaggctaccgaaaaggtgctggccagggccgtggtcattgcaaggttcaactgagtcaaaatccacttctaaactcgatcatggggttgttgggaggatacagtttctcatgagctgttgaactaagagctcaggttccagctgtttggtgaatgccatgtgggcctctccatggaacacaacaggaaagcttgcttcatcagagtgagcaagtgagaagagccagagagagtgaacacgccagggaccttgagtcaccatcttcccagtaaagtaagtgccattaggaaccccactttacagacgaaaatggaggcccagagagttaagtattttggccaaggttacataactatgtaactagtgagtggcagggccgaggtttgatcccaacctgtttggctccagtacttgtgctcctaactaccacagtggaccattgctctgccttttagttgcacacactgtctgctgcagtcttcttgacaagagaagatgatgactcaggaacttcagcagtagtggggatgggaagaagtgggttgactgggaatacattttgaagagattgttgctagaacttcttgataatttgggtgtgggaataaggtgaaagaaagatgttaacaatgatcccaaagttgggtgcctaagaaactgagtgaatgacggtgctattcctcaagatagaagatgatggtagtggagcaggtctagggggagaataaagagttctgttttggccacgtcaagggtgatgttcagatgtagatgtcaagtggcccattgaatacatatgtctggagctcaggggagcagtcagaccagagatacagacttttgtagtcattaatcacggatgaccaccgagagaaagagtataaaggagagaaaatgactaaagacttagacccctgacacctaaaacatttagctgcctggacaaaaagggagagccagcaaaggaaatggagacacagggggcaagaaaaccaggaaagcatggtgacctggaagccaggtgaagaggggcttccaagaaggaggaaatggttagctgtgccaaatgcttggtgagaggggatggaggaccaaatggaaaaagaaagctacaaaactgtattttcagaaatgtcctaattttgcaaaaataatttctccctgcccaaaaagagtaaaaagctctttgagtttgttaaatctgtagtccaattttaatccatgaacatggtatatctctattctagatattttagaagatatgtggtaggggagtgtgggttatgttgttttctataaaaggtgttgaattttgttctggcaggtcagttaattactggcagatcctcttggtctggtcaggcttggtttgaatctttattagagttggtccatttttattttgcccttattcctaggctttggcctttcctgtagggtatagtccttgttcctaaggcctggccttttggggaacaaatgcccaaggtactcagcaagggttctctcgtctggcttggccagaattcaaagctctgccagctctgcatgacttctagtatctctgcttagctttcagtcttataacagctatggagttttgccctgcatgtgggcagttctgccctcaaccaagtactcacagggtacctccaggcagacttctagggcctactttctgcacaagattcttctctccagagcccagacctgtaagttctagctgctttagcagccccaaactcttgatttttgccttctcctataatctaggctgctgtgccccatcgtcctgcataatgggccaaaaggctgggcaaacatggggcttatcttgtgtgttttttttctggcagaaccacagtcctgaactgcctgttgtacaatccctacaaagagtagcctcagatatttttgtctagtttcatgattgtttacagcaggagggcaaatccaatcctagtcacttcattgtggcaggaatcaatatctatttggtttaatgtttaccattccttcccattccctataccagctcatcacccttgtcagcggcagttctatatatgtttgtagtcctttcagttgaaataaaattgagtcaaacaatttataatctgaaatgaacaaagaccatgtaaattcttttcagttgcctttttaggctggtatctgtctgtagaggactcccagggaaggattctcaaggaagactcaatgggaagcctttggatggcaagctacagggctgagtacgagggtggccttcctgtgcggggtgtaggattagcatcagagaaacaaatcaggaatccctgggtataacagtaggggctgcattgtcattttagccttctccagagatgcatgatccaccccccaccccgcaggtcttttcctctctatgaaagtcactgacaagttcctgtggatcccctggggtccccaggaatgtatttctactctgagggccagtgagtatctttttcttggccatgagccatgaatagaaacgggacccttaatactgcctgacctgccacatgcagccctctcttctgggactgtctacacaagtacatttccaccatctacaggggcggaattccggtcatttgctacaggggaaattctagatttttgtttctaaagggccccaggttaccaaggtctcttgtatattagaattttaccacttctctctgggggaattaggtatttatcaatacattttgtaatatatatttaccaaattgtttatccagcaaacttttattaagcaaatgccaggcattgtgttaggttctgaagctctcccagttccttatccagggccccaggaacgcactcagggaccatttcagacacgtgggtgagtcagtccctaatgggctcagaagagaatcaccaaaatgtttaagacagaacagtcccgagcagccaacatttcacccttccttcctctctcttcccttgccgaccagacccaagggttttggactcaactgtttccttttgtagcaatgagctaaggaggctatttgctttgactaaggggccaagatgatgaagtcagatgtcctgagtttgcatcttgcctctccactgacttgctgtgtgaccttaagcaagtaccttcccctctctaggtctgcttcctgaaaattcaaagtctctgaaaattctgttttaaaatatgtgctggaggtggggagacctgattccctgcctagtgcttccttcgttttcatggattctttattaagcagatattacttcttcataataaaatcgtatatgaaacaatgacttgatttctttatatgaaacatactttgtacatctaaaaatgttgttgaaatcatctgagcctctgagcaagagcttcgcctttgactctgaagccagtgctgtcagcagtttctcccccttaatgtaatgctgtatgtgactcaatatgaactaagcagggggtgggaggtacagaccaccccagtaatccaggctttctctggaattctcccacttgtttatagtctgggcaatttgcctcctgctgctgcatgactcagactcggagagcttccaacctcgcaatgagccagcggctccccggagtcagacgctggcccttgtgtctcaggctcctggaaccttccgattaagcctccacttccatctcctccctggccacattcaggcagcaatgccccaaccccacacagagacacacgcccaatcagtgccctgtacaagcagggactgtgggtgagagggtacaaggaggtgttccaacccctcactgagacaggatttctagcccctctctttggtttgtgtcattttgctttgaaatgtaagttgacttctgatcagggcagatctcagttttataggaccttgtgtaagaataagcaatacaaaataaggaacacaaaatgagacctagagtcttagaaggggcccgtgcaaccagaggtgccccgaaagcttaagtgtcattgacttcctagcaaccctgactgtggtctgattcctttaagatccagaacaactgctccctgtaccttaagtaattatcatttagaataaagtcagaaaattgcttgctgtctgtttattttagaatcaagcagcttctgtataatttgaatttgagatagcattcttaaaaaaaaattcccttcgcaataaagcaccagattgaatgtccgatgagtcacaaatgcccttctgaaaacagctgcattagagggactcactcagaaaacatgattttccttcctccaagggtctcccctagaccctggcacagaatcaccctggtccccactctggtcctcccttccaggctcattcctggtgcagcagatcacttccacatttactgcatcacatccagcatcaatgtttttaactccatgaattgtttagaaaattgtatagaggccaggcgcagtggctcacgcctgtaatccccatactttgggaggccaaggcaggcggatcacctgaggtcaggagttcgagaccagcctggccaacatggtgaaaccccgtctctactaaaaatacaaaaattagtcaggcctggtggtaggcatctgtaaccccagctattcgggaggctgaggtaggagaatcacttgaacccgggaggcagaggttgcagtgagccaagatggtgccactgcactccagcctggacaacaaagagcaaaactctgtctcaaaaaaaaaaaaattgtatagatattgattaaagcagaaccctgaaagatggtgaatgattggcaggcaatgagaggaagtgtcgtgttgtccgttggtgacatttgcaaactctcctggtttaaagtgattccagagcaactttatttccatagtctgtgttgcactcaaagtaaatattaattccattatgccataaacttttatttatcatgacagcaagtcataaagttctcttactagaatatagcttctaaattgcatatcatagatgagatacaacacacacattggattctagcagcaattacccaccatcctttatgcaagtcggtattaaatgcactttctaaatatgagtcacagtctgagcttatgcagaaaatcttccatggctattacccaggagcccagaaatatgacgtgagggtgacagaggagccacagccagcaggggccagacacaaggatcaaagtgcacctagtcacccggcagtaattcatctgaagcattctttgcatattatgggtctgactttttaaattacgtaaattgctcattagaagtgccttgtaattgccttcacctgcggtattgcgagaggtgtagattttaattattcttttttgatttgtaatgtggtttgactttttcagggtgatagtttggaaaaatacagatctgctctaattgttgtaccaagtgaaaatagatggctctgttgatcaacttccttgactttgtggtggagcgtacaaaggagtcttatagtttcccagcccttgttgatgactgaggggctttgcccgtggggcccggggaggatccctgtgagcctgtagtgctggtgccttgggctcagccagcccctcagatgacttgtgtggagccaggcagtgtgttcatgttggatgtaaccagatctcgggggagtctgctcacctcttccccacagcatggataggacagaaaaagccaaggcccattcatcatctttgaagactgggacagacatgatgagtgctgggggcgcccaggtccggggtgctcctgggatgcctgctgcagagatgcttttctctctagcccacttctcgagggcagcctggcctcctgctacccagcaagtgctctcacttcctgcagcacagaggcctccacctgtccagcccaccctgagccaagctgctctgggctctggaacgggctgcaggctttctcgggcccctgggcctggccccctgtcatccagcacacggaattgatgagttgtgagaccagagctgtggcttcgggggtaaacttccaggactcgttctggctcatctgcagccatggatgaataaaaactcgatcaggacgctggtctttgaaaggcagctattttaggactcacttttggaaaggcagggggattgtttttccaagacaaaattatgcatttgtcaatacagcaaaagcatcgactgctttctctttggtgggggtggggggtctcttgccttaatcattctccatcagaaagctttgctctttgaagcctggctggcattgggcttctgtgcatctgcccacagagagatgctcctcaatcccctcccgcacctggccccactctccctttttggagcagctcacctctcaccgacaataacagggagaacctttgtgagtctaggaacggttttgtcataaagcccccagcccatttcctgtcttttcatcccctgttttatgcatgtggcattctgttccaggccagattgctgtgacatgagaaatacccgaaatatgggctgccacggtggctgtcattaaccaaccactagttgtgcctttataaatttttacacaccgctaaattataaatatgcaatgctgcgagtaatgaaatatgcacctctaataactgcagttagaagatttgtaattctgcctgcatgtgccataaactgggaggagttggggggcttcatctgtttcccatttggagcccctattgtgcttctccccatcccagagtccctcatgagggtcttgcgtctcaaggggaccctttgggggagcctctctcaggtattgggcttccccgcttgatgccttttcttttgttggtcacatggattcaataaacgtggttcactagcacccaccatgtttcagacctgtgcgaggctggcaatctgcagcagaattaatcttccaaatcgtcattttggggagatgaacaaattaccaggcaatgacagtgcagtgtgatgagggcccaaggggaagggtacccaggtgctgtgggaggctagggtgaccctgaacaaattctgtaatctctctgtgtctgtgtcctcattcatgactgaggacagtaccaccgccttcctcttggtgctgctgggagcattatatgagttacgacatgtaaagcatttatttagagtggtgcctggcatacattaagcactcactaaacattaactagtataagcaccgttattattacttgacttcttcctgtcttctgcctcgtagttgagatggtgcctagagcactctcttccttcttaaagagcatggcttcagcaccacaagctttgaattaaagaaacattgaatttttgtccaatacagaaatatcttgtctttatattgatatcaaaaacaatctgttataaaaatgcaaacagtataaaactgtataaaaagtcccccctaaatccaatgtatacatacacacatgcacaaatatgtttatgaagctgagctatactctatgtctcgtttttagccacaactatatagtggacataatttatgtcatacaaattagtacattttaccagcgtaggtgttattttcttacccttttgttggatgattacatcgtttccattgtttcattgatcccacaagtattactgagcagctgctagaacccagtgttctaggtgctggagctgtcctagcccttgttgacacagtctagagacaagggatgagcagacaataagaactagaatatgtagcatgccagatggtcatgagagacacagggaaaaacaaagcagagaaaaggcatgggacgtggctgcaactttaaatccagtggtcagggcaggccttactgaggtgactggagaggaaagagctgaaggggtcaggagccctattgaaatctggggagaggctttccaattacaacagcaagcgaaagcctttgagatcacagaacaacctggacaagtcctaaaagctttgtactaaggcaaagaggccagacacaaaaggacacacactgcattctgtggttctgcttctctgagatctcagaataggtaaattcagagagacagggattagagtagaagttctcaagggctgggggaggggagggagatgaagagttattgcttaaaggaggcagagtttctgtttgggatgatgaaaagtttaggaaaaggagagtggcaatgattgcacaacaatgcgaacgtcctcaatgccattgaatggtgcacttgaaaacggtcaaaatgggaaatttcatgttatgtactttctaccactattttttaaaaagacctcgagatgggagttggtattggatagaacgaatgcacaatgtttaaattaatgaacattctgttaatgaatagttgtttctagtcttttgttgttacaagcaatattttaataatatctgacaattattttatacacatatgtcattttacacttatgtgactatgtaaaataaattatagaagaggacagtttagacgatggactgtgtgactttttattttcacagatattgacaaattgtcctccatagatggtaaattaaattacattccagctaacagtatgtgaaatcatttgtttcctcaagcccttatcaaaacattgtgttatcaaagcttttttttttttttaggtctgacatataaaatggctcttacagttttactttaaatttatcttattaatgaagttgaacatacttcttttctattcagaaatttgcaaatctttgtattagattgttggttttttttcttatcggttagaagatgctctttatatattacagaaattaacttttctatgatatatagtaaataatttctcagctcataacttgattttgctttttaatattttttctagacatttaaaaaagtgtaagtagccaaatttatctcttttctttcatgatctctaaaatgtatgacatagagaggccatttcttgttccaaaattacaaaaaaatgtttttggtattttaatatttttatttttttcttaatttaaatctctgaatgatttagaatgtattatggtagaagggacagtgtcaatatattatacaactttatttttcttctccagatagctgctcaagtgttgccaaactatttattgaatcatctacctttttttcttgctggtaggcatgtgccttctctgttatatactaaattctgaattgtatttggatctatttttggactatctattctgtttcaatgaattgtctgtttatccacatttgattgccacactcttaattattgtagttttctaatacattttcatattcatgaaggaagtccacctttattcctctttttcagaatgttcttggctacttctgcttgtatttctctaatactctttggaattagactgatctaaaacaaaacaaagcaaaaaaccccccactaaaccccagctggtatttttactggagtcacgcccttaccttaccctgaaacctattaccactgatctgttcaccaacaccataggttttgtctttttgaaaatgtcttataaatggaattatactatatggaaacttttgagaccagtactttcattctgctcaacgttgccattcattactttttcattgccgagtaatactccattgtattcatgtaccaatttgtttatctgcttcctggatatataagtttgggatgatcatgaatagatgttctacaaatatttatatataggttttcatgtaaacagttttcatttctccaagggaaacactcagatgtggaatggttgcgttagatagtaagtgtatgtttaacattgtaagaaattgtcaacacatttttattattttgattttgtgtgtattttgttttttggctattttaataggcgtgtactggtatctcattgtggttttaatggtttgcatttctctaatggttaacgatgttgaacaactttgcatgggcttattttccatttctgtatcctcttaagtgaagtatctgtccaaatttttgtccattatttattgggttgtttgtttgcttgctgttgagtcagatatgtgatttgccaatatttttaactagtctgtaacttgtctgttcattatctgaaaagtgtctcctagaagaaaagttttacaatttcgttgaagtcctatttagcgattgtttcttttatggattctgtttttggttttatgtctagcaaatatttgcttaactccaggtcacagatattttctcctatgttcgcttttaaaaagtgtatgattttacatattgcacttagagctaggatccattctgagctaacttttgtctaatgtgtgaggcttaggttgagggttctctgtttttttgtttttgtttgcatttagatgtcttattgttctaataccacttattgaaaaaaaaatcttctccattgaatttgcctttgcacctttgtcaaaaatcaattgtctgtatttgtggagtttatttctattatgtctcttgtgttctattcatttttgtgcctatcacatcaccaataccacattgttttcattactgtaggtctatataggtcttcaaattggttagtcaaatttcccaaaatttagttttcttttaagaaattgttttggctatactaattactttgcctttcagtatacatttttgaatcagtatgtctatagttacaaaaagaatcctgctgaaatttttattgatatagtgttacatctatagatcactttgggggaaactggaaacctttcctatgctgagttttccaatatgtgaccgcagtacaatcagctctccatatctcagattctacgttggtggattgaaccaacagtggatcaaaaatattcagaaaaaataacaacaataacaataatacaagtaaaaaatacagtataacaattatttatatagcatctacattaggtattaggtattataagcaatctagagatgatttaaagtatatgggagggtaagcataggttatatgcaaatactataccattttatataaggagcttgaggatctgtggatttttatatccacaggggttcctggaactaatcctctgcagatgccaagggacaaccatatatctctccatttatttaagtctttaaaaaaattcttgttagtattttgtaattttcagcatatagatgctctatatattttttattaggtttttacctaagtatttccatttttgagctattttaaatggcattttttaagaactggttttcactaattcattgctagtatataaaaatacaactgagttttgtgtgttcatcttgtatcttgtgaccttgctaaactcacttgagttctaggatttttttttttctgtaaatttcttagaattttttgtgtgggcaatcatgctatctgaaaataggggcagcttttcttcttgctttccaatttacaggcttttatttctttttcttgccttattgcactggctagggtttccctacaaagcttatgtgagaatggacagttttgccatgttcctgatattagagggaaaacattcaagtctttcaccattaagtataaagttagttgtagggtttttttggtagatgcccttcatctggttgagaatataataatgttttttcttctttagattcttaacatggtaaattacagtgattgatttctggatattgaagcatctttgcattctcaggataaattccatttggccatagtatattcttcttttatatgttgctcaattttattttctaatattctgttggtgatttttgcatttctgtttctgagggatattggtttatagttttcttttgtggtactgtctttggttttggtatcaagatgttactgatctcataaaatgagttgggaaatattcctgactcttctgttttctggaagagtttgtgtaaaattgatactatttcttctttaaacatttagtaaaatttgtcagggaaaccatctaggcctagagaattttttttttcagaaagttttaaactactaattcaatttatttaatagttacaggactattccagggttgttgttgtttttttttaaatctgggtgcattttggtagtttgtggttttcaaagattggtttatttcatctaagttgtagaatttatctatgtgaagttgttcactgttttcccttatcttttttatgtctgtggagtctaatatctagtctctcatttctgatattggtaggttttgtcttctttctttttcctttgttagtcttgtggagaagtttattaatcttatttatcttttcagcaaactagcttttgctttcattgattttctctatttttttcattttcaattccatttgtaattcattcttattttactatctccttttggcctgctttgagcttaatttgctgttatttttctagtttcttaagaaggatgctatattattgattgaaacctttcttcttttctaatgtgaacatttaataagatgaattttcctctaaacactgctttggctgtatcccacagattttgatacattatatttttattgtttgatcagttaaaaatattttctaatttttttgacctatgggctatttagagagttttcaattttcaaatatttggagattttcctgttatctttctgttattgatttctaaattaatttaatcatcagggaacatattttgtagatttcaattcttttagttattttaaggtttgttttatgactcaagacatgatcatggtgaatattccatgtataattaaaaagaatgtgtattctgctgatgttgggtagcgtactctcaactatcagttggagttggttgatggtgctattgagttgttctatgactgatttctgtctactcattctattactgactgagagagaagtactgaagcttccagctatagttgtgggttcgtttagttttcccttcagttctttcagtttttgcttcatatatttgaaagttgttattatgtatgtacatgtttaggatcattatgtctcttttattattaagcagtgtctctttttatcatggtaattttctttgctctgtagtctaccttgtctgatattaatatagccactcaaactttattttccacagcatttgcatggcatatctttttccatccttttacttttagcctactcatatcattatatctgaaatgcattttttgggaacaacacatcgttgggtcatggttctttgctattcattctgacaatctctgtcttttcattattgcagttagaaaattttttttttttttttttttttttttttttgagacggagtctcgctctgtcgcccaggctggagtgcagtgacacgatctcagctcactgcaacttccgcctcctgggttcaagcaattctcgtgcctcagcctcccaagtagctgggactacaggcgcccgccactacgcccggctaattttttgtatttttagtagagacggggtttcaccgttttagccgggatggtctcgatctcctgacctcgtgatccgcccgcctcggcctcccaaagtgctgggattacaggcgtgagccgccgcgcccggcctgaaaacttttattcctttgtttttgttcctttgtttcctctttcctgccgccttttatgttatttgaacaatttttagtattgtattttacatattgtgtttttttactatatctctttgtatagttttttaatggttgctctatgggttacaatacattctttttgcaatctacttagaatcaacatttaccacttcaagtggaacatagcaagcttaacatcatacagattcctttactccctcaccccttatattttagttgttttatatatcatatatatatatataaaaccccagtaaggaatgttataatttttgctttcaaccatcaaaaatattttaaactacttgagaataattgtctattatatttacccagatctttattagttctgttgttcttccttctttcttgatgttccaaacttacttctggtatctaattttccttccatctgaagaacttcttttagaaatttcttagagcaattctagagaattacttgtctgctggcaactaattctcttagttttccttcacatgatattgtcctaattttactttcattcctgaaggatatttttgccgaatctagaatcctgagttgactgacagttctttctttcatcacttaaaaaatgtttcacttctttctggcccctgtaatttcagaggagaaatcttcagccattcaaatcattgttcccctatggggtcaataacttttttctgtaaagggccaaatggcaagtatttttgtctttgcaagccatacagtctatatcacaactacctaactgtgccattgtctcactaacacagtcatagatactgcataacagaatagttatggttatgttccaataaaactttatttacaaaacaggcagtgagccaaatttggcccaaggaccatagtttgctgacctctgcctggaaagtaatgtgtcgtttttctctggctgctttcaagatttttctttttcttttcttttcttttctttctttctttctttctttctttctttctttctttctttcttttttctttctttctttctttctttcctttctttctctctctctctctctctctctctttctttctttctttctttctttctttctttctttctttcttttttttaagacagtcttgctctgttgcccaggctggagtgcagtgacacgatctcagctcactgcaacttccgcctcctgggttcaagcaattctcgtgcctcagcttcccaagtagctgggactacaggtgcatgctaccatgcccgactaatttttgtatttttagtagagatggggttttgccatgttggccaggctgatctcaaactcctgggctcaagtgatccacgggcctaagcctcccaaactgctgggattacaggcatgagccattgtgcccagccaacaagattgtttttctttgtctttagttttcagtttgattctgatgtatctgattatggattgcttagatttatcttgtttggagttcactgagcattcagatctgtaggtttacgtcttgtgccaaatttttgaagtttttgatgattatttactcaaatattttatctgtatcacaatccttttcatcttcttctaatattccaataacacagatattaggccttttggtatcatctcatagttccctaggctctgctcattttttaaaatcttttttattctctcttattcagattggataatttttattcaagctcactttttcctgtaatcaccatttggctctgtagcccactcagtgagttttctgtttgggttatggtaattttcagttctaaaatttccatttggttctttatattctctacttattttctgaaacatttcatttttccatttgtttttagagtgtttacccttacttcttggaacatttctataatagctgcttttaagtctttgccagataattctaccatctatgtatctatttctatgaaagttgagttttttttttctagttgttattatgccagccaattttggattttattctgtgcattttgaatattatgtgatgagactctaggtcatgttgagatctaaaggagaatgttgacatttttgttctcataggtaatccagccaggtgggttcaggctgcaggtttcagcctgaacttttgtggactgtgctttcaaggttagttctgttttcaaagcctttgttgtcctgtgtgtgggacctaggggctgtcctgtgtgtgcaccatacagtggccagtctggggtgtgggtgtaggttatcccgtagttcagttctcaaagtctttggcatgctgttagcatcagatccatgcatatgctgcttgaggttgagcccaggagtttataaacaattttgtgagattttccctctccaccatctccttgggcctctctttttcagtcatctggccataaagctgggattttagttaccttggtcagttgtacagatgccatgactgcacccacatctgggaccacagcagtaggttagagagaggaaagaaagcaacatgagttctccttacctccttgggatcaaaggtctaactattgtgagagagtttcccttctttcatggttttaggcacctgtgggcctcactgttgctgccatcaccacccaggattgcctgggggctgcagtgcaagtgaatggataaaagaaaaaaaaaacaaaaaacgggatttcttctgctctctttgagtgtccagagcctgttttcttgctccttgagctgcaaccagagcttaccgtggctctctttctacagtccaattcccagtttcaggctgcctggagtccagactcagggatgaaggaggaataggaagctcgtggctctttcaggggtgtttctaattctggtcttcctccttaatttgcctgctcctatgtacctttcaatgtcctcagatttgctgcttcaacatcagtccaggttttatagctgcattcaggatgctcactccatcttgcctggaaccagaactgcttccatatacttttgctcactttccaggtgctgtcctctctgtccctaactgactttcagcagggtttgttctcctttgggctgcttccaaaagggccttcttttctttgatggctttatttatttattttttccacttccttcctgagctctgccaattcatgttttattcccctttgatgtgattttgtgcctttcctgagcttttgtgtctctgctttgagtttttgttttaaagaagcacttgttcattattgtttgaagttgtggtagtgtttggtcaactatttttaatggctccatgacattttcttggtgagtatcctacatttatttatttctatctcgttactcctttttttctgtgtgtttatactaattggattatggttcctttcttgtgattcctgtctttcgataaagtggatcccactctcccaccccccagaactactatgaaggaatttcttacgggttgtgatctagggtagggcctctggctaacatgaatttcctctgaatcataaaggtccttagacacagagctgtgtctgtatttgtgaacctttccctatctccagccaacagaaatcagcagctgcagagacaatactaccaattcaatttctcttctctaccatctcctctttccctctcccatatccagttccctggaccagcctatgagtcctggcggtactctgctgccagtctatgaatcctgttttcatttttctgaacagaagcttgttggttttgtgcctcggggcatgtgctcactgttttgatgaactgcactccacggctttgcctgagagctgcagcggtagacgtcctcgttagggatcttcctgtaaccctgttagacctttattgcattggtcggcccttctccagacactgttaaaagagattagagataatttctggacatcaaacctagaattggtatttttctttttctccttagcattggggcaggggtaatttcctggaggaaaaaggagtaacatcatatttactccactatatgaaagtcagagtttgggtatatttatttttaaaatatgatacatattatcaaattgccctcaataatcttagatgtccttataattttctttataaatttaacctgatttactaggaaagaagtacgtagggagacagacagtgcctgtgaaaaggctggaaggcaggtttggaaggtgggctacttagctgcagccatcggtcatccttggaaggcagcgagaaagcagtgcggagagggcacatcagagctctcagaggcacagaagggccactgaatccagggattacatgttttgaagacagttttgcatcaggaatctagattcccacccacagcaggccaggcaaccaaccctaaaattcttaagagacgattatttgcaaaggcagaaagttcatcccccgggagggatccattcctaggctgaacaactcagttaccagcaagttctcacacaaatgtgaagtctatataccagttattttggtcacttggtgctgttcttccatccagagcacccctggaatctgttcctctctacacatagggcaaccgtttgagtactgaagcagggtcctccagcagatgaccttccccaaagccagctctgcagaggacagcagttctgggtgagcacaccctgtattatctgggtcaaaggccacagctcccagtgtgggacatggaaggggtccagggagggccttgcaatgggagccccagggtttgggattttggatgctctcaaatgtatccttgtgggtggagacagtccatttgcattccatgtagattcatgccctgtgtatcatggtgctgtttgtggttcccaactgccatctccagtccaggcattattaactcttttttatcatggaacctgagtgtcttaaatgatggttcccaataattctaaaccaagtgagcaaataggctgtgatggaagagacagagggagctgtgaaaaagaacaagagcagagcttttaaatcaccatgtgacaaatggaatcgtgacttaggtttcacaattgaggtggctgatttcatgtgctattgacaaatctttcacatttctgacagttacagagttccccctctggaacataaagtctacattcatggaggtcagcttcaggtacaccacccctaaggcctgacagtactttgctgtgcatctgagatctggcagaaacagcctctgaccaccagaaaacctaacttttcttccaagtcccaaagagattacaaaagttttaatcatcctgggactgtctctggctgaaggatagatatgaccttgagacattgacaagaagaatgattagattcagtgaaaaagagagcagggatgaggatgttgaaggggttttgactcaagggtcagtgaagggtgcagagaagacaaagagtgaatgagaacatgtctggaggctcaatttcattgccccttctcctggaaagcaattggcagctgctgacttgcagagcatcacttggaccagggttcatgttgaatctacccacgcaccttaggactttgtgcagctggagagagggttgttcggggcttggagctgcagaaacattattcctgttgtcagctgaagaaaattgtctggatataaaggataggccttggcctgactctatttgtcggggaggcagaacttcacttggcattttcttttctatgcaaaggatttgagacctaagagagggaagagatgagggaagaccttttcgccttctccatttctttccctgaatgtagactggttcagcagctcagggtgaagcctgggaaacaggcctggcttttaccgtggtgaatcacttattggctgggtcaacatggacaactctttaaactttcctgagcctcaaatgccagatgtggggattctgttctgtaggaccttgtttttgtgtcctgaggctgccttaacaaaggattgcaaactgggtagccagaaacaacagaaattattgtcttatagttctggagtccaaaaatacaaaatcaaagcgtgggcagggcaggctccctcgtagcctttaggggtggatctttcctggcctctcccagcttccagtggctgcagtgatccttagtgttcttggcttatagatgcgtcactgcactctggtgttctccctgtgcatttctgccttcatgccatctcctcctctgtcttcatccattctcatgctgctgtaaagacactacctgagactgggtaatttatagaggaaagaggtttaattgactcacggttccatatggctggggaggcctcaggaaacttaacaatcatggcggaaggctaaggagaagcaagcttggaccttctcacatggtggcaggagagagaagtgtggagcaatgggagaagagccccttataaaaccgtcaaatctcatgagaactcactcactatcctgagaacagcacgggggaaacaacctgcggtgatccaattacctcccactgcgttcctcccatgacacacagggattatggggattaacaatccaagatgagatttgggaggggacacagccaaaccatgtcatcctccctgggtcttcacatggcctcttctattgacaccaggcattggatttaatgcttaccctaatctgatatgacctcttcttaactaattacatcttcagggcctctatttccaaataaggtctcttttgaggttctgggtgaacatagattttggaaggactctattcacttggtatggatcctttaaagattaaaagagataacacaagtgaagtagtcagcagaatgcttgacgcacggtaagtactcaataagtggtatttattgctgttgctgatgttattgttgcttgtaccattcatagaatcctttccaggtggctgtactattaacatctagtgttcgtaacaattctgttcgttcatttagtcgcagatgtttatatgcccagcaatctgctagactgggggatgcagaaatgaaaggcctggccttttgttttcagggagttcacaatctggggaggaggcagacacacacgaacagcctgtgctgagatcctcaggaggggagggtggccgtgcccagataggatgggaggaagatgctctgggggaggcctcctggacagatcaggaggattctcagaggcttttgagctgaaacttgagggtgagttaggattccccccatacaaatggggtacagcagtgtatgggagagcggcagagagtaagagagcacctatttgttcactcagtggccatgtggggcctcaacttcgaagcaaattccgtcctgtctgccaggggtgaggaggtggtgcagaaacaaactatcaagatgtggaccctgttcttggaactggatggacaggaacctgctgtagggagcacagcccctctggagaccaacactgtgaagggaagttgctcccttgccgggggtacagggaaggaaggcctaggatggggaagggaccacagcaggcctgcgggagtaggaaggaggccagggcgaatccccaggaggcgtgtggtcctgggacagcccacctgactctgatcttccccatcacttagtctgggacctggaagctggcagcagcttaggttagttagctgttagctgtggctgttgaaaggatgacaactctgtgatccacctgtgtgacactgaagaagtcactcaacctctctgtggctccctgtcctcatctgcaaaatggaaatgatgatagaatcactgtgagggttcagtgaattaatacgtgtctagcccatagaacagtgcttgccacagtaaacactgcttacaagtttgctcgtgttgttatctaagcaaaattcccaatcaaagggctttgaaaatgagctggcaatgactctttgtcggtgctctctcagttgtacttgatgcctttagacacaggaggcagagaagatggcacaggcctggaagcggttgagctggatgacatccacacgcaggtgtcctgtctgagcctgtgccctgtgtcggtgaccagtcaactggcatatcctgaatggaacacagccctgggcaacttaacaaggggctagagggcataagtttcaaaactctttttggggatatttataagagacacttgcattggttaaaaaaaataataattgtaaagtgaccagagctacaaattattgatcttctctgttcctttcctgcctagggcacatttcttgatcctttttaagccaaggggagatgtacttgctttgcctattgaggcccttcctaccacccaggctctgatggctcaggtgccttccctatggatggcctggggaaatgggcaggtatgtggagctagcatgcttgaaagaaagggggtgggggaagatgacggcaaggctgacgtcagggcccagtgtgccagtgcagaagcagggaggccccatccctggctggaaatttactgcagctcagagaacaggcctgtgttcctccaaataaggcagaaattttcctgcattgctagttgtacaaacacagggaggcactgagcagtggcaggtggcacttggagattttctgaatttcaggcattgggtcagcccgtaaaggcttccctggggtatggtggacttggtcagtgactggttggctggaagtctctctcctgggtggttacctggtatataatgaataaaatatagcactggacaacttaacagggaatgggaggcgaaggccagtgagtttcacagccattttcaggggatatttacaagggacccttaccttggttaaagaaaaatgtaatgtgaccagagctacgtatttctgatttttcgcctccatcttggtatccaatgaatcacagctaatatgagctctgactgtatgaaaggggttttcttagttgaccactcagctgagagagctaccaaatcagaattccacaggagaggatggttgggttcctcagctattttggaggatgacataaaatgttgcagagggagaacccttctctgcaatcagacgagattttcctcattgttctgcagggcctcacatgttaccaatgaaagccagctccctggtgccacgcgttttactcattgctggatccctagggcctagcacagtgcctggaacatgcacgtgcctctgggcatattcagtgaatgaatgaacaagggaatggaggtgggtgaaggtggactgctagggaaaccgggaacatatgaaggcagcacgaaatcgtgtgtgttggggtgaaaatggacgactggagtctcagcttattgaattgtgggtaatgttcattcaactagtcagtcaaaggatattttgggaaacttcttataccagatacatttcttgccttcatggagtcctcagtctaggggaggggggaaggcagacactgaatgaccagctacatgattaattacttatgtacatttgtggtgggcacttcagaggaaaggtgcaggggtgagaaagtggcatttacatggagatctgaaggaaggttgagggtgagatagtgatatggtttggatctgtgtccccgcccaaatcacatgttcagttgtaatccccagtgttggagagggggcctggtgggaggtgatttgatcatgggggcagattcccccttggtgctattttcgtgatagtgagtgagttctcatgagatctggttgtttataagtatgtgacatctccaccccgcttcctcctgccccggccatgtgaaatgcctgttcctgctgtgccttctgccatgattgtaagttccctgaggcctccccaaaagctgatgctgccatgcttcctgtacagcctgtggaaccgtgagccaattaaacctcttttctctatgaattacccagtctcagctattttttatggcagtgcaagaatggactaatatggctagtaaggaggaaacacatactgggcatcaggatataatcattcattcattcactcattcagcaaataattactgagcagctaccatctgtcagccgcattccaagtcctgagaagattcaacaatgagcaaaataaagtccttgctctcaatgagcttaaaacaaagcgtaaagtttgtgcgtcttttgttagatttattcccaaagagtggatgtttttgatgctatactaaatcattttttttttccttggcatactaaaaattttgttatttattctatggctgccaatacggagaaatgcaattcttttgtgtgtgtgggccttgtacccagcatccttgctaaatttatttacccagtctaatagcttatctgcagtactctgggtattttctacatatacaatcatgccatctgcaaataatgaaagttttattcagtcctttctgatctttatgctttgatttctttttcttgctttattacactgagtaggctctcccacccagtatcaagtagacgtggtaaggtgattgtaggcattcttgtcttgctcttgatctcaaaaggaaaactttcaataattcacctttaattacgatacttgctgtaaagttttagtatgtattctttatcagattgaggaagttctcttctatccagcttttctcagagtttttgttttttattgcaaatgaagattgttatctgttccgtatgaatgaaaatgttttctgattgaaatagaagagatcacagtcatcgaatcagttggccatatgctatgtatctgaggctgtaataatccactctaggaaagacatctggctggtgggtgtgattgatcagggttgctactcagttgaacttaccatagtcgataggcatctttcaggatccatctggtttctgcagggtctacgttggtgaattaaagacatgatgaggaccactcccctgcttcctttagatccttaagggtggctgtcatctccactatccccctgggctgtgctgtgtgtgtttttttttttttttttttttttttgctatcttagccagcatggtgagagggataatttcagagacttttgcttgccttttccctcatgtacctcacagaccaagggcccaatgtggggctgtaccaactgtcaagaaggctaatcccagttacacattcaagaagaggaaatgaccatcagttgggcccatgggctcagtggatccattgtaatgagactttgggcaggactccatttatgatcaggctcctaatccaacagggggcctacaatgacacctggggtctctgagtctcagatcaacttggactctgtgccaaaccatcctcaaaatacttgggtctttcccaatgcatagttacccaaataaatggcagtaagccccttggtgaaggaatgggggaatgagctcattgcatgtacttgctgcggaattgcagggtcctttctcttgggcacctgcccatctctttttccaacaagttgcaggtctaaaaactgacttgggtccagagattggtaagggattgtgaatttttatggaagtgactgtcatcagcctcccaggcatccaactttgatttcttctactcaacaaggccgttggctgccactctgaccttgctgctcattttggtagttgtggctcctgacttctgatggttaagcactagcctttaccgttttggggtcctattgcaccattgctatcagcaagtcaggttctctgtcagcctctccttctgtcagccctccatccctggccagcagaggggagccactgctgaacttctcagtgatgcttggccctctcactggcacaatccttatgaccctggagaacagtgtgctgtttggtctttcctgtggaacatgctcatccccaggtattctgggcatacatggtagatccattgtagcatgcccaagctcctaggccctttaatcccttcttctgcaagctgtcagggcttttctgacatttcagcatctctttttgcatattttaggagccatcccagtagagagttcacaccatccccagggatccctaccatggtgttggacatcaggagagtacctcttctctatccaattttttggtcaggcccacttgaccaggcttcctcagagtccatccccctttatcctccctccttcctggtagcacatgttggctagaacttgcacctccttctcctttcttatcaggcccagcacctcccctgctgggttacaccaccacgtaaccctaggcccaatagttagtagggaaattgggaacatatcttgagtcgaggcaccagttaccttgcaggagagagacctctgcactgttttctagagcaggggtttgctagctctagtaggggaggggtggatgcttctgcaggcctggaagatttggaagagtctgaagaagtcaaattatttgggggcatttgcacagatgtccctatcccctgtgtgggggttatcaattttttgagcccggtgtctgactctggcataacaaacctgcgttggttgcctgtctaacctgctttgcatctctgctacttgatcggttagatcctaggcttggtcttgggctttgtcggccccacaatcgaaggctccctggctttctcatttggtttccaattgcacattaattgggctgtttctgatctttctgtaaagcggaggtcagtgaacattttctcaaagggagagatggtaaatgttttaggcttactagccatatgatctctgttgcagctactctgtctttgtagaaggcagccagaaatggtatgtaaatgaatgcgtgtggctatgttctaataaaactttatttataaaaacagatggccactatgggcaactgtggcaatagccatccaatcccatcatcccaacaagaattctcagacactgctggtggggatgtaaaatgctcaagccactttctgtttctttttgagtcacacttggttgtttgcatttttctaataatttgtccatttctcctaagttttcaaatgagttggcataaagatgtttataacattgccttatcttcttagtctctgtttcatctgtacttatgtgtctgttttgttactaatattgtttaattgtacctttcttcttcttcccttaataagaattaccagagatttgtcaatatcagacttttcaaagaatcagctttgacttcattgatcccttctcttgtatgcttgttttccatgtcataaatttcagctcctctcctttcctttcctttcctccctcttctctttctttccctcccctcccctccccttcctccgttcctccctttccccttcccttttcccttccccttcccttccctccctccctccttctttccttctactttttgtgtgttgattcaatttttcccatgtgtctattgttttattttgttctatttcttaagttattgttttttactcctttttttaaaaaattaaccttaaagtatataacttttttcctcaaagtactactttagatgcatctagaagtttgggtcagtagcaccactgtcacttaattcaatatattttccaatttttacttttatttcttctaagatttatggctttcttgaagtatttcaaagtttccaaatatatggggaggaggagatttccattatatcctgtttagaaaaatcttcctccagatatccatgtggcttgctcccccatggccttcaggtctttgctccgagtttaccttctcaggaaggaaatccaaaccacccaatttaaaattgtaaaattgtgcttccttagtactccctacccctagcctgggatgattctatttcctttattcttctttttttttttttttttttttttttatctttttgagatgaagtctcactctactacccaggctggagtgtagtggcacgatctccgctcactgcagcctccacttcccaggttcaaacaattctcctgcctcagcctcctgagtcggtgggatcctattttctgtttgttatttcccctgctactaaaacactagaacgacctctctagaacatacattcctttgaaggcagagatgattgtcttcttttgttcaccgttgtagccttaatgcacaaagcactgtctggcacttagtagatcttgaataagtaactgttgaatgaaggaaggacacatttattaaaaatttccatccaattgccctgtggtcgtgctttgtgaaatatagtttctctcaaatttgatgagacttgatttatggtccaaaatgtgttccatgtatgcttgaaaaggatgtatgttctgtggtgcaatgccctatatgtttggtcagatttattaattgtgttattcaaatcttttctattcttctccttttgtctatttgatctaccaagcactaagacatgtatattaaaattttcccattatgatgatgtatctgcccatttcttcttgaatttctgcttctgctctatgttgctttaaagattttaaggctatattgttgggtgtacacaagttcagagttgtaacttcctcttgaatatttcatcaatatggtgatcctctttatctctagtaatgcttttggccttgaaatctattttatctgctttcttttgcttagtatttgatctctctctttccattgttttattttaaacatttcatttccttgtgttttcactattccaggtttaaatagcatatataaagattcttaaaaaaaatccaggctagtaatcttctattttgagaattgaatgtatgtactttggctgtaattattgatttgtttgaatttattttttccatatagcactttccatttgttgtgtttttgtttgttttgcatgtgatcttttttctttccttctttcgccatgttttcaattgagttttgtgtttttcccttttccattttaaaatgtctgtgctcatcctggccaacatggtgaaaccccatctctactaaaaatacaaaaattagccaggcgtggtggcaggtgcctataatcccagctactaggaggctgaggcaggagaatcacttgaacctgggaggtggaggttgcagtgacccgagatcgcgccactgcactccagcctgggtgacagagggagactccatctcaaaaaaaaaaaaaaaagtctgtgcttagaagatatcctttatttctatttttcaatggttaccttagaaattccaacatagatatggtaccttaacagggcctaaggttaatctacagtttgaccatccttttgaacaatccatgaccaacccccacccaggccttcctcactctactaatgtgttctttctgtgaagacgttgattatatcttgattttctatacccctccaaaatagacatcattatcattatcattttacacaattaatatttccattcttcccttcaacagatacttattcaacattaaattccacgcactgttctaggaacataggaaacacaaggaacagagaaggcacaggtccccaccctcatggacttgacattctagctggggtgacagattctaaacaataaacatccacgaggaaatgatagaagatatcagaaggggtcatgactgggagaaaaaggtagaacaagatagggaggctgggaatgcaaatggcagttttctgtggagtgctcaggggcggccttgaatggaggctggagggtgccaggaagaagccatgtctgcctgggaggggaaacactgaggtggagggacagccagtacagagttttaaactggagcatgctgagcacgttcaaagacagcaaggaagccagcgtggcagggccagctaggatgctaatgtagtaacccagaagagaggtggtgatgacttgctccagggtgtagccaggtggatggggagaaaggggtcttggacttggcacagatttcctaatggaacagagatggggtagagtcaagcttttttctgcatgtttttgtcttgagcacctagaagaatagagtgggcagtaactgagatgaggaagctataagagaagcagttttggaggaagcatgggagatctgctgtggacatactgcatttgagatgcctcaaaaattcagaggggccactggacccccaagtctggcatttcaagggcagatccaggtttggtttgttgttggtgggtttttttgtttgtttgtttgtttgttttatgaggcagagtctcgctctgttgcccaggctggagggcagtggtgtaatcttggctcattgcaaccgctgcctcccaggttcaagtgattctcatgcctcagcctcccaagtagctgggactacaggcgtgcgccaccatgcctggctaatttttgtatttttagtagagacagtgtttcatcacgttggccagactggtcttgaactcatgagctcaagtgatccgcctgcctcagcctcccaaactgttgggattacagacgtgagccactgcacctggccgacagatccaggttttgtggaccttaagcttatacaattttgagagccttctttaaggaacaaaacataaaattacataaaaaccaaatacaagggagggccagaaactttagctccactagctctgcagagagctgccttacagcagttgaggagaaaagcaaagctggagagataaatgtgtacgtcatcagcagggaagtggtacttctagttgagagattgaattctgtccccctcaaaagacatatgcaagtcctaagtcccagcacctgtgaatgtgacctcatttaaaaataaggtctttgtagatataatcaagttaaagtgaggtcagactaaagtgagctgtaaatccagtatgactggtatccttaaaggaagagggaaatttggacacagatacacagaggaaaaaacgtgaagtgatgaaggcagagagtggaatgatgcaactcaagccaaggaatgccaagtgttgccagcaagcacctgaaacgagataagaaaagattctccctcacagccttcagagagaacatggccctgccagcaccttgatttcagacttaagacttccagaactgtgagagaatatgtttctgttgctgtcatcacccaagtttgtggcactttgttatggcagccccaagaaactaatacaatgagggagtgagtaggaaagaacatcagaatcagccctgaggcttgtcagggacataggaggtccaggaaagcaggtagagaagatatgaccatgaggtaggaaggacccctcaggagaagtgcactgtgacagccaagcgaacaaaaaaggatgaagaaggaggaggtgatatgctgtcttcaggtcacattcaaagagccctgagaactggccattgattcagcaatgaggaggtttttgacaaaagtagttaagtggataggcgggggggaaagtctgttggagttgatttaaaagagaccaggaggaggccgggcgcagtggctcacgcttgtaatcccagcactttgggaggccgaggcaggcggatcacgaggtcaggagatcgagaccacggtgaaaccctgtctctactaaaaatacaaaaaaaattagccaggcttggtggtgggcgcctgtagtcccagctacttggagaggctgaggcaggagaatggcatgaacccgggagacggagcttgcagtgagccgagatcacgccactgcactccagcctgggcaacagagtgagactccatctcaaaaaaaaaaaaaaaaaaagaaaaaagaccaggaggaaagaaatgggagacaagtaagtaaagatgtctgtttttagggataactgcaaggaaagcaaaggaataaggtggtagtgttggagacatgaggagaaggtttttttaagattgaagaaatagcagcatgtttccctgcaggttggaatgatctggtagggagtggaatattgataatattaggatacagcaggcaggaatactgctggaggaatgtccttgattaggtaagaaggagcacagctcatgcatgggaggagggactgtttatgttttctctccattccaccactttatttctcatcattttttcttacatctcagaccttccttctgggatcatttttcttctccctgaagtatattcttgagaagcttcctttctggagtcttgttgaaagtgaactctcaggttttgttttgttattgaaaatatcttcattttattctcattatttcaagattgttttgctgaatatacagtttcaggttgacagttctgtttgtttgtttttttttccctcccagcacttgaaaatattagtccagtgtctcttgagacttattgttacaattgagaaatcagtcgtcattctaattgtcatttctctttgactcctgttgaggttgtctctctagctttgtgttccacattttcactgtgatgtactaggtgagggtttgtttttgcttttcctgactgggattcactgggcttccttctcgaatttggtggctggctgtctttcagaagctctaaaaattctcagacaggtcgggatgatggctcacacctgtaatcccagcactttgggaggctgaggcaggcggattgagctcaggagtttgagaccagcctgggaaacatggcaaaatgccttcttacaagcaaaaaaaaattcttttgctcctgtagtggttatgctcctgtagtcccagctacttgggaggctgaagtgggaggatggcttgagcccaggaggcagaagttgcagtgagctgagatcctgtcactgcactccagcctgggagacagagccagaccctgtctcaataaataaataaataataaaaaatagaaattatcagacaaactcagttatcaccactgccctgtttttctctccttcttgaagtcagatcatttgtattgtactctgctttctgcatctttacctctattttatatgtttcaacattttctctctgtattggcttccttagtaatatctttttatttgtcttttaactcatcaattctctctttgactatctagtattttctttacactgagttttaaattttagttattgtattttttatctctagaagttctatttaccttttccccccaaatctgccttgttggtttggagattctcttgttcccttatcatactttcattttcctcctttcttgctttaaacagattaaacaaactaattttatattatgtttttgataattccaatatctgagtcttggcagatctgattcttaacttttcttctttgtgctggttctcacatatggagaattgagtcctcatgtgcttggttatttttaccttatgaccttgcactccaaaagctgcaccagagacaaaatcaaaatgccttaactccacttaatgcatcttcatccttcctaaatctgcccttaaaaatccaaagagtgtgattatcttcactttactgtaggtcatagaagtgttaagtcaaagaagttgaagtaacatcttgaaaaaaaaaatcccaagctctaaattaataacttaatgtaacttctaattatgttggagttacaaaatttctttccctggatgaacacaaactatgactaaatgttttctaaacaattaaatttaatattttgaccaattaagatgttgcaggtgtgttcaaaattaattattatttttcttaatttaagacgtttttcattagtggaaagaaattccaaaatttgacaccaagcttagaaccaagagattctaaaattcttttaaaattttgccaatttatgtcaaattgtctcacctatgaccaaaaatgctttgctctcaggctttgtttttctgaaaactcttttttatgtttctcccgtggctaatctctctagaatctgagacctgacagctgaagggacttagaggtccatttctccctgaaagctgaccacagaccattcagaaaaagtgatttccaataaataccctacgtgtgtgatggtattgagatgagggaggtagattgttcaattacagaagcgataccccatctcttctatgtgtaaccccaaattcattgctactgaggttctataatgctaaggcttgcaaaactatcacttttacagataatgaaatgaaatcccatttaatgatgattatcccaacacaaagagggtttttccttttttattattatgaaaatacgcaactggcaaaaatacacatgatacaaaaagatatgcagtaagaaggctctctctcccacagaccctccaggcccatgctcatgggtaacaacggccacagatagatttccaggctgttcttggggcacctcagccctctgcttctttcttccccaacactttctctcgggcttctaggcaggcagcagacatggagataggactggtggtcgtgatgcttaaccttgagccattactaccaggaagggagggagagaaacttgggtgtactgagtgccaactgttaccaggctgaaatccaggctctgcacgtgagatctctactccacagagcaacttacagaggtgggaatatagtatggtgaaataacagagggtccaagacaccagatggccagcccccagcacaggcttgtaatagtcgcaggacccggattcagcccgctcttgtttggaccacgcggcaggaagaggcctgacggtgcagctgctgctggggaagagacacgtttgtcgtgcctttcctacccggagctcccctagcatcctcctccttggctgggaaatggagtgtacgcccccttctgaggattcttctggacccaaatgtgagttgaggccagagatgaggaaccaggagcacccacatgtaccatgggtgaaccccaacaggattggggcatttcacctcattgaatcaaatcattcattgcacatttgagttgaccccagtctcggatatctgaattctagataaagacattacccaggacatgtgaacatgtactggaaaatatcaggcaatggttcaatcacaactgtttatactaactggctgttaagttataagagaaaaaagtattaaatgccaacatggttttctgtgttgattctctctttgatgcagggaatggatatgacagtgaagcctggcccgcaggagctgtgtgcatcctatcagccagatactgggggaagcaggcagggctggcctcatagtcacaccaccagagtcaggctgcggccacatcgtagggctttgggaggctggggctgtgtttggttcatggggttagagtcgggtacagtggctcatgcctgtaatcagcactttgggaggccgaggcgggtggatcacctgaggtcaggagttcaagagcagcctggccaacatggcaaaaccccgtctctactaaaaatacaaaaattagctgggagtgatggcaggcacctgtaatcccagctactcggaggctgaggtaggagaattgcttgaacctgagaggcagaggttgtggtgagccaagatcatgccattgcactccagtctgggcaacaaagcgagactccaccaaaaaacaaaacaaaacaaaacacctcagtgaggtcccccatgccagactttcagaggagagcgagcctatggggccatcatcggtttggccaggtacccctgagggcagcagcagccctcatgcgggtctcaggacccctttatacgcttaaaaatgaatgaggatctcacaaagctccatccttattgcattcttttgattatgtgggttacatctcctaatattcactgtatttgcattaaaactgaggaaaattaaaacaagagaatacacaagcactgcacattccatgagctgccagaccatcagcatcatcacatccagtggcgtctggaaaatgctgcagcacacacaaggcacatcacatgctagcattattatgagcagggtctagaaccccctggccatgctttgagaacctctgcccttggcaccccctagagagctgaccgtggtcagaaccatgtgctcagcaagacaggtaacctcatgcctgggtcagcagttcctcttggttttctacctctttgaccttctcaactgcaatggatggggacatggggaaggtggccattgagggctgctgactctgggtaacttacatgtccctcgtccttcttattctgctttggatgatcccacagagctcttttgaggtctttgtattttgacagcaggaggcccatgacaaactatttgggattcaagacttagacgcctctccccaacccgtttgtgcagaaagattggcttcccccacaacataaatgtccacactgaaaccctgtaactccatccttattacacggttccagggagactctgggatcatgcttcacagttgatgtttgtgcaccaaatggaaatgcagcaagagtgcaccaggtctggagaggggctgctggtgtggggcctctgagggggccccgatctgccagtcactctgagttccctgtcaggagactcataaagaaggccagcgaggactgggaacacatgtttattttatgaatgacttcggggaaagaggagaaaaaaaatcctccagaatgtcatccaggaggctgtgttctttttattatgttttgtcggtaaacaaaaaaaatggccacatttaatacttataccagtcctgtgggatttctctgactaatgtaaaatgacagttgtcacaacattctatataaatacaagtctgtttgcaggagccttttctatttttaatgtaaaccacacctaactcgctctgaagaattgtacccttggaatttagagtcctgtctgttgtctattcacgggactgtattgtcttaggagcagcccggaagaaaccaaagacatccagaactttttagtttaacgtgagaattattcacctaattttcccgcagccattgtgttacttaatttattgttgtgtggagctgtatggtgatgtcgctaatgagcgacacagtgtacttggtgagccaatccataatttaggaggctgctgatgatctttgtgctgtctgcaggctgagcaaagcaggcagtaaaaataaagaatatacttacagtttatagaaatgagcacacacccgcagatacacacacacacacacaatacccattactaggcttgcaacccccatggttgcacgaagcgtgagcttgtgtgctgagaggtgcagggaaagctgaccgtaggcttgataagttcacagtggactcatggccactctgttgtggactgtcacactatggagagttggtggaagaagttggcttccatgagagggggcaagtgtgaagccctttatggtctgtttccttgcattcctcagccatttattgctgcacccactccagcgggcatgagcaacagaatcctctttagtcctagtggcaggtcacccagtgactggcattcaggagctaaactgattgatggtaaacttgatgatgtcgcccttctctgcagtttttggacagggatagcaaacatgtcagaggatgactctcaggtgattatgagcttccctgtcgaggttgggctctgcaagctttggcaattgacatgagttgaacctagttgtcattcctgccggtgagggagagacccgcaggggagtcggatctgacacgggaccccacgctgcagagtgatgatcgcataggcacgccttcctgcaaggtcacaggtggaacaggtggagagaacacaccgttctctctgctgtgaaattccctttgcactgggagatttcccggcagaggtcctacatttcggcagtgagaaatgtcaggggctcctgccatgcgcagccaaggcattggatcttcatattggatccaggaagacaactttgtgaaaggaaaaggctgaggggcttaaatgctgctgtcgtcccagcttctagggaggctggggttacagcctccgccatgttgcagattctccaataagcatcccggtgatctgtgtgccttgcaggggcgtggagcctggtgtatttacataccacggactaggtttaaaaatcaactttagatttgctttgccgtttgcagtctcttgaataaagcatttttgtagcctcctcaaaatcctctctctgtgtttacattttaatgggcattccagtgaaatggaggaatttttttttattacttacatttatcaaggaaagaggtggggttggaaactgccaagcagcagggccgcctctctttagactcctggggctctctgctctccagcctgatgtgggcaaattgtgtcacgtagccaggcaagtgggaaggagaggaaaggccattttaatctggcttttaaatatacatccctgagaatttacagaattttaaaatagtactttagatctcaaacatcgctgaaagaaatgaacacgtgtaagaagaatattaaattgcactggtctacgtggaaagtaaagtctgtcacatgtaatgaggtatcattccagaattgtccttttggaaaagaaagggggaaaaaaatcactctccctgccagggcagaggagcccttgactagttcttcatcacaaatactcttggaaggagggtcctaaggtgacctctccattccttggcaacattttcgggacagttttggtttctgtggctgcgtaaggggaaacccctcttggatcttgggcacagaagccacctcctggaggcagtcagttcttttggatgcggaaacggaatttctgcttaccctagcatgtagctaatattaagatcttcttgtgcaaagggctcccctatcacagttgaacatacagtgtcataaaactgggccaaggcagcttccggggctttgcatgtgtggaactgccagtgttttcatctcccccgggggatgtctctcttgttcctcccctgacattcccaggagatccctaattaaagctacagatacggtttaaaaatatactcaccagatgttagtttaaaatgacctataactggcagcagagatggaagaggctgacggtgtctgaggccttccggtcgccttttcctaggctgtcattcggtatgcaaatgaagcccagcagaatctgagagccagctctgccaagccataaaaccaactgttttgaaagcaatgcatcagtaattcttatcacctggcatctggagtgcgggaaagctcccttcctaactagaacatgtcatagcatgacttaggaggaagctctcattttgcactccgcggacaatttaaactgatgaatctgcttgctgaagctcatacagatccctttaggacaaaccattttttaaaccaaatccaggctctgagacacccctgctatgactttactggacctatatactacggagaagagggcttgtttggcagcacagcttttgtgtgtgtgtgtgtggggggggggggggggggtgggggtggggggtgtcagaccccgaggctacccttctggggttttgtttagattcttctgtgcaagttcccaccaagttttcagtgagttagactttcagggtaatcccggtttgccttgcaaagctgaggaaatgaggaatgtcatgggtatcaatatctttcctgagaactgaaatttaccagtagcacattcctatcgggcatttatcaaaacaaacatataggtcaaatgaccgtttactcagcagccacctgtcagtgccttgggacgtcagcagtcccggggatgcccgtcaaagcagctgagtgatctcggccctgaacattgccaacttcccgcctgatgccctggagctgaggctccagcttgaggcttcccagtgctttggataaaaagatgggtctgcacctgagagccatatacatctcgctctggggagaaaacccaggcagggctttcacacagaggaagagtgaggccaggatttatactcagagaggatgggcaaatagcattcacgcgtgtgtcctccagggtggaatctgccaggctgacttacagtgcaggaattttgccagtcagtggaggtagatgtgtttatagataacgttaaaaaaaaaaaaaaaggcaaaaaccaagacctctgcaaccttggtatttgaaacacagaacacgggtttgtgtactaagtaaaatgtggttaaataagattaatctattgatggtggggaagagagcctgtaaggcagattgggtgtctcagaggcataattatttatcaaactaattaaaatgtaaccaccggctcatcgactctggaaaccggctttcctgcccaagaagcagccctctcctgagcacctgtgattttatttttcattcattatcccactgaaacacaaaacaaagacccaaattggccacctggagtggccgctctcaccctctgcctggccatggcctgcctggactgggtgttggggagggatgcatggggacagtgttgttcacagtgtgggtgagtgagtgagcccacctggtcccccatgaagccctgagatgccaggagctctactggctgtggcctggggctgtgtgatggagagcacgtgtgttcatcagcgcccagaggcctgggctattcagttgggccatctctgcagcccagagctgcctggtagggctttgccatggattcctggcttggaggagtcatgattagcatgaacttgcaaacccagaccaggcgaattgacttgggggtgatgagatgcaccagctggtggaagcagcttctctctggccatccttccagaacggagcaagtttcctggcccatagtccctgcttccatgaccaccctggcctctcaggagcatgtacgtgtgattgcaggggtgggcagggagaggacacttagcagagggaagaggcacagggcttgttacataaatgacttgggactgttgagcaggtgcagagaggtctgttgagaaatgaaaggcagagagcctagcccagcaaggccagggcgaggaacctggcaggaggccttgactccttgatcgcatttctctgtttcacgtcccgaggtgggcagggggctgggaacctcccctgcagagctaaccactgggcctccttcacagagctctctcggggccagcaacagggagaaggccatggcccttctatcttcctcactcctgtcctttggagtccccacatgtgtgccaaggaactcaaggccagcggccccctccctatcttcctctggatcatagctcctaggtcccatccaggaagaaagaaaatgaggtggcaggtccagaagcctttttgcttttctgttgatttatgtccctgaggcctctgagcaataactaatacatgacttgaatacgatccctagtgatctgacctctctgggggagttgcttaggcagattacggcagatgattgagcagaatgttggtgagtccgtagtggcctggtggttctaggaggcctggcttagagccagtccatcaatacctatcaccttgtgagggggacggggactaaggacctgtgtccacccgactgccacatcgtcctcttcctttgaggggaggtaagcaccccttgcgaggttaggagagggcgtgtctgataggcattgcagtggttcatttcatctgtcaatttgacccggccgtggtacccagatgtcggtcaaacaccagtcccgatgtctctgtgaaggtattttgtaaatgtgatgaacatttaaatcagcagactttgagggaagtggttgaccctccgtaatgtgcatggtgggcctcatccaatcacagtgtgggccgtgggctcatccaatcacagtgtgggccgtgggctgcatccaatcacagtgtgggcagtgggcctcatccaatcacagtgtgggcagtgggcctcatccaatcacaatgtgggcggtgggcctcatccaatcacaatgtgggcggtgggcctcatccaatcacaatgtgggcggtgggcctcatccagtcacaatgtgggtgatgggcctcatccaatcagggaaaggccttgagagcagaccgaggtttccctaagaaaaaggagttctgcctccaggctgcaacctagaagcgctgcctgagtttccagcctgttgcctagtggaatttggactcaagattacagcatcaactcttacccgaatttccagcccgcttgtccgcccaacaaatttgggatttgtcagtccccacaatagatcgtgtgagccaattccttagaaataaacatgtatatatatatgtattatatgtgtatatatactatatatagctacataacatatatacatatatacatatatgtacatatatattatatacacacaataggactacatatatattgtcctattggttcttttttgctggggaaccctgactcttacagagatggaggtgccacttcctcctccagattttggggcttctgctcttgacacctcagtctccctcctgctttggtactcacccagcacccagtcccgttaggtcccagaaagaaggatgcagaagaagagagtgcacccccttccacagaaacaagtgtacaccaatgacaatgccacctatagagtcatgccaggtaacaagggatgaaggctactcatgtagggccgggacacggctggcacaaagggattggcctagttctggagggtttggagccgtctgcctttgagtacagactgtgcaccaggagcatcgctgagcttttccataaagcccaccatgtacgcaggaatggactccttgtgtcaatgcatcatcaattcatgtattcaaatattgattgagcacctgccatgtccctgatgctcttccaagtgttggagatagtgaacaagacaaagccctgccctcatggagtgcacatgggaaaggcattcagtcaagaactgaaacatcagcgattttcaagttggtgtgtgtgccacgagaaagaaaaaaagtaggataaggtgatgaaactacagtggggaaggtgcctgtgcagcgtagatggacttaacgccaccaaaacatgcacttaacggtggttaaaatggtgaattttatgtgatgtctattggactagtccgttctcacactgctataaagaaatacctgaaactgggtaatctataacgaaaagaggtttaattggctcacagttccgcaggctgtacaggaagcatggctggagaggcctcaggaaacttttaattatggtggaagaggaagcaggtatgtcttacatgcctggagcaggaggatgagagagaacagggaggcgctacacacttttaaacaactggatgtggtgagaactcactcctatgacgagaccagcgagggggaactccgccccctcccaccaggcccctcttccaacattggggattacaatttgacatgagatttgttcagggacacagacccaaaccatactgtgtatttcaaaaagtaagtttacaatgttctgaaatgtatcatggtggtgattgtgcaactccgtgaatatactaaagccactccattgtatgctccaaatggaagaattgtacggaatgtgaactccatctcaataaagctgtttaaagaacaaaagacaaagctaggtgagtgtggagtatttcagatacagcagtcagggaagccctctccaaggagggacatttggtcagaattattgtcatcatttttcagatgagtgtcagagaggatgagtgacttgcccagagtggcaggtctaagacgcacacccaggcatgtctccttctaagcccttcctgccctgcttggccattctgagtttttttcctctcttctcaaagcacgttcatgctgatctcactctgttttgtttgtttgtttgttggttgtttttttgtttttgtttttgtttttgagaaagagttcttgctgtgtcacccaggctggagtgcagtggcgcaatctcagctcacctccacctcccaggttcaagcaattctcctgcctcagcctcccaagtagctgggattacaggtgtgcaccaccatgcccggctaatttttgtaattttagtagagacagggttttgttatgttggccaggctggtctcaaactcctgacctcaagtgattcacccacctcagcctctctgagtgctgggattacaggcataaaccactgcacccagctgatcatctcactctcttctaggcatcttgattttctatcttgtctccagcagacatagtgggaaacagacattcagaacctgacccagggtcccatagccaatgatagggccccaaacaacactctatcccaggaatcagcaaatttttttctgtaaagaaccagccagtaaatatcttgggctttgccagccatatggtctgtgttgcatcaactcaactttgctgttatggaacaaaagcacccatagacgatatgtaaacaaatggatgtggctgtgtgcccataaaactttatttgcaaatacaggcagcaggctgaatttggcccacagttatagtgtgccaattgttgttgtagcttgtcattttctcttctctggaaaaatgccctggagaaggtaagactggagggaggcttaattcttcctgcccccactagcctacccccgacttatgcttgtgtccaggaaaaggcatgtgaagtgcttcatgcagccagattccccagaggagcaatacgaagcaggacccctgtcagatgcagacatgtctctatggagagaccaagactaggggagggcccaggaagtagccctttcccaaatggttgctttctcctatgagcagctaatgtgctgcctgcctgcctgcctgcctccctccctcccttccttccttccatccttccatccttcctggcttccatccgtcacctatccatttatgcattaatttatctctctgaagatagatgaatccatctattcatgcattctttgcttcttccatccatctagccatgtatccttccacctgtgcatccatccatccatccatccatccatccatccatccatccatccatccatccatacactgtctcattcaaaaacatgacttcagagcctactctgcaccaaacaatgaattagaccacaagaattcagtggaggacaggacacagtttctgttctcaaggagttcacaccatgaacaaacccatacgtagtccacaaaccaaaggagtgaacgccatgataaaaatatggtattcataagcctaggctgtatatttatggaaggaagtagcctgggctggccagggtgcttttcatgatacaagaccttccttcttaggccatgccaagacacagccttgatggcactccatcacactgcctcaagacaccagctctctgaccacaaagggtctccgaggtggaacatttcctaaagggctgtgggcagcctgcaccctgagctctggctcatgtttgctgggcgtggagctgcctttcagctgtgcaaggcctccagcttccccatggctggaataggaaagagctccttcccaggcatgtggggaccatgctgaggagtgtctggtggttggcaggtgggggctgccatgaggaagagaagtggagccactgttctcttcccacccacagaagcaggtgaccagcctgtgcagcctgagaagaatgagacacccgccaggaggtggggcacagctgtcatcctgtccagtgaaacgaaaatatttccattctgtttgatatctaagagcaaacaaagtaggtgcgagattgtctctggtaaggaagaatatgccaagctctcttgttggggctctgaattgagctgtcacccagcctggagctggctcccctgcaaatgacgacgaaagcagccccagctggcatttgcccagccatggggtggtggtgaccccagccagcccgggcttcccatggctgccaccagcctaatgcctgcatgattgttctgccgtaaacatcatctgtgtgtgcgttatcttcagacagtctgggctcagcatcttggccagggtccagtgctttctctctccacagaactcaaaatcgtgactgtcttagtctccataggataaatgagaattaagtttcagaaggggctccaggagctggcctcctggggaggagggcaggccaggctgctcttcttcctcgcctcctcccccaccagggcccatcatgctggagggcagataacagtgaggagaatccttctgagtgtaagcacaccatggagtggggcctgctctggcctaggagctgtttgtgtgcaatacctcagggagtcttcatactgaccgtagaaggtaggtgccattatcactgtattttacaaatgcagaaactgaggcacacagcagtttcctcattgaaaataaatgggcatggtctcttttaagtctgcctcttgagggcaatatctgggagcggtcccaggtctcagatggcctagggtggagggcagggtgctgcacccacatgacctcagaagagctccaggctccacgacctgtccagaggcagcaaggtggatgcagagcccgggggtcccctgggcttcctggattgagaggcagtccccctccacccttttagcactgactcagctggcgattcctctcatggttccaggattgccctgatgagccatcatgggggcacagcagcaggattccagtcctttccctgctaaatggtttcctgtgtgggaattgaggctcaggttgtgcctggaggagtgagactgggactgaagcagggctagaggacccaggggtctgggatgggaagaaaccacccccatcatcatggcagggtgcccatggtggcccttgaagagtggtccccacatcttaaaatcctacaacacttagaatcctagaacatagggctggagccatgttagagagcaagtaatttgaccctaatattggaaataaggggagaatagggaagaaggaaatagaacagaagaccttgtctaagagacccaggaggtcattggagagctgtgaccagaaactcaggtagctgaagatggagccatcttgaggccgagggcctgagcactcccaggtctggctggccagtgggcaaactattcacctccccaactgttttctgcaacttcatgcctggccttcaagaggcattttccactttccctgggaccatcaatcagacacggaactccttgctcctattaaggcctgagacaagtgccctctgcaatcagtgggcaccagtcctacagagcatcacacagcgccagccctctctccttttctctgaccctacgcatggctaaaatattgtcctgtggataggaaatgaaaagggtacaaccttacttcttcaaagatcgcccagtctagcccagaggtataataaaaccccaaactttcctttcaggactcatctttcatgagtaatatctttccgtgttaagtggtaggcacacaatggtgaaataaaacacagggctcagcgactccgatggcttggggtgtgggaggggaaggttgcctttatggtgtgagtttcctgtgcctcagctctcctggattgtggggctcatggcacacgggtgattgatgacaacatcactctccatcattcaattcgggagatccctaccaggggcatcttggccacctccgaggccatattgggctggaacctccattatctgtgtagtcaggtgtttgcatttaaaacaaaggaggaattagagtaattagatgaattataatcttcagttcatgacacactattgttgttgtttactttagagtgtttgtttaaacattctaacaaggaatgcccatgacctgctggtcaatccaagaactaggacattaccaattaactgtgtctgccacgggctcttctctgtccctccccgaccttcccacctcccaaaggtcatcacaaccctgaatttgtgcttacatctccctcctattatttcagtcttatgacttataagtgcatccttaaatactaccttgtttactttttgcctgtttttgaactgtataaaaaatgttttgtcccttctgtggtcttctggggttggcttttgaaatttaacattgtgtctctaaatctcatttatgtggttgatgtgtagctagagttcatcaattttcgcagctgtgtaatattcccccgtgggtctctaccaccattcaccgaactcttctgcctttgggcattcagtggtttctagttttgtgttagaaacagcattgcccagaatagtcatctttgtgtctgtctcctaggagacagtgcttgctgggtggtccagttatctactgctgtgaaacaaaccatcccacacaaccacatcatgggtgttgctgtcgggctcagaggggtaactctgatttgttccaccacactcgggacctgagatgagatgattgagggctggacccttggagccggcctgaaggggcctgggcctctttctccctgtggaggctaagacctttgcatgtggtcttttcacctggtcttccctggcatagcagctcagggctcccagagtgagctttccagacacccagtggaagttacaggcttcttagagccaacccagaagctcagaatgtcagtcctaccacattctattgatgaagcaagtgaccaaggctggctggattagaaggcaggggaactggatttcacctctcagtaagaggcatagcaaatgtagttgtctttactggattccatgagactcatgaatattcatttttacaagttaactcaagttgttttccaaagtgatggccaatttatggacccatcagccatgcataagtgatttccagggtctccaccctctgcgcatgaggtcagacttcttaattgttgccagttgagtgaggatgaaagggtgtctgaccctggccctcaccagcatttccctgttcacgggtgagcagggcccctcttcctgcaattattggccatgtgtttctcctctttcctgctcaagtctttttttttttttctttgaggcagagtctcgctctgttgcccaggctggagtgcagtggcgtgatcttggctcactgcaagctctgcctcctgggttcatcccattctcctactcagcctccccagtagctgggaccacaggcgcctgccaccatgcccgcctaattttttttgtattttttttagtagagacggggtttcaccgtgttagccaggatggtctccatctcctgacctcgtgatcctcctgcctcggcctcccaaagtgctgggattacaggtgtgagccaccgcgcccagcctcctgctcaagtcttttgtccatttttctgtcaagttgtctctttcttcttgtaagaattctttatattttcttgataagaatccttcatcccttttatatgttgcaaatatcttgtatttttcagtttgtagcttttcagcttctttaagatgtcttgttgaatagttcttacttttaatacagtcagtgttctcaatatttcacagttagcacttcttagtcttgtttcagaaatccttccctatctcaaagtcaggaggatattcagcattattttcctaaaagctttaaagttttgatgttgacatttgaaatctggatctatctggagttgatttcatctgttgttgttaacccctttggggataaccagtgctgccaactcctttcccatgatcgcctgctgtctctgacacatcagccatggtgggcccatcctgatagcctttttgtttgtactttgaagactttcagagtgacttaggtgagatgatgttgtatccataggaagcttgtttgtaaaccccggggctcactttccacttctctgattctttggggtgccagtcctgggaataacaggctgctagagcccaaactcatgccagagtttgagtgcttacacccccatgccaggtggctgggaagattatgccccagttaacgacatcagggctgggcatgcagtcagggcttcatgcctgagagtcagcaggctgactttttaagaaatggccatagtcacttgggctaagctgctgccactgacctacctgcctttctgctcctaaatacatgagaagaatcccaccgcatctgtggaaatacagcaggagggagagctccaggactctgagaaatgtcaggactgctgaatctgaggaggtgttttggggtacagggaaaccctctgtaggagcctttctttggtattagccacagtaaatccctaaataccagagaagtccagggaccagcccagctggcagttgcatttgggaattaagctaaagaaaggctggttgcatcagttgggctcacttttagtgaagtcaatgtgtttatatggtttgaaagctcctggggtgagttagtccatcttaccaaggcctacagcatatcttcctggaagctatgaactgagaagagaaaaggacactggaatcatggattctggtccagaatccatgctgccttgctgtgtgaccttggacaggtttctctccctctctgatcctcaggttacttctctctagaatggaaggggtaatcagtgcctaggcagttcctcagattctcctctttctgattgtctctggatctgtgacgaaggcattcgatgactctgagctgcctcctgctgaggacgggggaactacagcaagaaaaggcccagaattagcctaaaatgtaaacagctgagagctttcttcttaactgggtgaaattttaaagatcataatacacctctacactggcctgcaagctcagcccataagacttccccccttagggatggtgtccatcattgagtcctgttttgaaaatcaaaagtatttttaaaatggaatttgcggggaagagggtagaagttaagtttgcgcctccagaagcagggtaggcttaatctaaggggactgtcattctcccagctccatggggcctggcaggaggcggccctctcagtgctctcggccctgaaggaggctgtttggttctgcccctcctcctgggtctgagggcaggtggcacccccagcagagaccagccccatttaccccaggaggttgggctccttccccctagtttcttgggtgccctcaggggccaggccttgcagctgagagcagagagtcccagctacactcaactgtcacagactgaagggcaaagtgcatctggcagccagcacggatgtgttgtcctctgactctgtagggtgacctgtcccatatgcctcagccgtttggggacagcctctgaaagagccaaatgttcctctccaaactccgtagcaatagatggtgaagagattctgagctatttatggtcaggagagatccggctgcctcatcccggtggcagcgtctgagtaacattcctcggtggggagagcggcggatggttctcagaaagaatcgaggctttgggcacacatcactggcctgtccccacttcgtctttccacaatgaggcccggactgttccatcgggaaggggcttctggactcatccctcattttctcaaaggagagccaagctccggagagggagtggcccaaggtcacagagtggtccggtgcccaggcagctccagagcccagccagtcgggcctctgccgtcacaccagccccagggtcacgggctttggctttgatttgtaaagatgttctctttcacaccagcccccaggtcacagcctttggttttgatttttgaagacgttctcctcgcttgcagggagctaagccttccttgggtcacttgtattggtttccatagcaaattaccacaaactgggtggcttaaaagcactgaaatgttttcttttcagttctagaggccagaagtctgaaatgaagatgtgggcaggtgggttccttctggaagctctaaggcagaatctgtcccgacccctcttcagctcctggtggctgccagcaatccaggacccccccggcttgcagctgcgtccctgcatcctccccagcctctgcctccatcctcacttggcagtgttcttccccgtggctctgtgtgcccttttccgcctctcctaaggaagctgccattggagtcaggcacgaccctaatgcactatatcatctccatccttaattccacccacaaagactgtatttccaaatcaggtcccattcataggctctgaggttaggatgtggacgtatgttttggggtgccataatttattcagcttaggaggacagtggtttgatacaccgtgtagaggactggacctcacagcaaggccgtgggacagaggcagctctggcgagggactgaccaggggctgtgctcactcgcagggcctctggtgtctctgcctccactctgcatgcctacctctctgtcttctcactgccccccagctttgtgttccctctggtgtcccctttctcttcgtcttgtggcctctggttctcacgccttgcctcaattcctcctggcccagcttcagcgttctggccttggtctcgacgacttcttggctgcagtttctgctgctgactgcctcattcccatgcccatgctgtttcccagttgggttcctgagcaaggaggtcgtgccagtcatgcctgtcttctcacatgggcacagatgacaccccgccaggccaaccttggattgatggtcctgggggtcgtggggcccactcgtggtccagacagcaggatggggctgtggtacgaagcataaccacctccacctggcccttggaaggtgcaggaacatggcagaaacagggtaaaggttcggccgcctacaaaggcgactgcgtggtccctgcaggagaacttccagggcgaggatccaactaagtggaattgtcaaattgtcagttaactgaagtatttccagtttgagaggagagagcaagagataataggaacctggagaaaaagcagccacagggggtgttcggcttcaatccaggtccgttcaccccttacgttcaaaacagcaaatttcaggaatgccacagtccgttaagcatcaaagagagatggggccacccacgttcactgtattacgaccctcattagacagaaaaggacgtctgtgattgaggaaagattttccaacgacatccctcagttgcccatcaaagttgcctacttctcatttcctcaccttctgggtcttcttcgggctctcctggagtcctgtgtgttattactctgctgttttcaactcagccacagtgaatcatttcttcttaccaagttgtgtaatcccgtcatttgtctgtaagagattccatcccagggcatattgtgtccccgtgctatgggcttaagacggcaaatccgagctgtgatataaatgtaaaagtcattcccgttctcctcgagcgcatgttaacgacagcacagaatagtgataattagatgaagcatcatttcacaccatcaccagcgtgctttacatttatttatcgccattcttttctccagcatcagcaaaacagagacttgtacgatatcccagagcatccaatggggcaccgtcctgccactgttaattaccaccttatgagcgcacagagcccagcactcacctctagccgctttctgggggcctaaaggggaaactcactccctgcacatctctgtccctccatatcccagacctgtctgtcattgacatgtgtcctctgtccagctgcctagggctgatcccatgccatgtgtgtactctggctgccatgacaaggcaccgcacacggggcgacgtacgcagcagccttgattttcttgcagtcctggagaagcgaagtctgagatcgaggtgcgggcagggcaggttcctcctgaggcctctgtccttggttctctcagggtcttccctctgcctgtgtctgtgtcctcatctcctcttatataaggtgaccggtcagactggatcagggcctgccctcctgacctcactttaactttatcatctgcgaagactcgctttccaaaaaggtcacattcataggttctggggcttagaactttgacaccttttcacagggacacaattcactccataacagtcctgaagcaagatgaatctgaacctcatgttcaaagtaagccctggtgagccctgggccttgggggcctcctggcttcactcctgtataagccccggtgagaacaggagggaacttctggcagaagggaagagggatggggtctcagcttgggctcacactgggctctctgtgtgagtatctttgtctaaaggtgccctgtgtgggcaactttacaagtatctcacctatggatcctcaactgggctggggaccttggcaagaccctgccccagcctcccgagaggggtgctcactcctgtgggctccccaggcacctgctcttgttctcccccactatcccagcacccatcccctgcctcccacctgtgtcccccacactgagcacccctcattggcaggaacagtggatgccggattctctctgtgtcctagagccccaggagggtccccaggagcaggagccacagagagatgttgttttgcagagagtcctcctgcccctatacccgccaggtcccctgagaccctctatgtccctgaacccctgggtgcacagtcacatagttgcaggtttggatgagacctggtgttaccttttattttgttaatcttaccctctcttattccagaaagaactcaaggtggaaaagtgtagcctctccgtttctgcgatatcactgctagaagccagccgtgtggcctttgaaaagctcctgtgaggagccacttgtttagcctgttcctttaccgggaagttccaactgttagaaaatttcatttttttttcttttcactgagtcacaatctgtctgccaggacttctaacttcatattgaactgttagtacagaatggtcaggtatttttaataaaaggaagtcatatggtgtgtgtgtgtgtgtatgtgtgtgtatgagcatctgggtacctgtgtatatgcacaacacatatgcaccatgctttgtacaaaagagagcacttcttggatttgggtctctgtccctccacattctgccaggatccttttaactcccgtaggggatgagaagggagttgctgctgtttaaagatcaaatctgctttgtagcctgtgttccttacacgtggcccaagcttccagggcttcccggtagggcacttctctgccccagcagctgcccatgggtcctctaggcccatcacgggtggggcgcattcctgctttggcactctgaggtccctcctgagcattttggtggtggcagacctcagcgtcgtaggaaacctaggaattgtggggactaggcagcgtgacccccaggacttgacagagacagggccatctgccaaagtgagcattttctcagggagagcatccatggcctcacgcttttcccaggcacgatcctgatgtctgaggaatgcctttcatccggggactgcgcagagctagtgaattgttctgccttcttagtgacgccacgcactcaggagctggaaatagccaggtaggaacttctagcaaaattatggcctgaatgccgccaggctcctgagccggcccacatgcagatcgggcaggtgaggctgctctgctagagagggccaaggtacctcccacgactcagtggtcactggccaaggagggagccagtcccaccatccaggaactgttctttcagcagaagcagcaggtcgggggacctctgcccagcgtggaggtcagtgactgagcacacacaggtcttcggccaaggctgcgctctgagtccagcttccatggaggcaggccattcggggtgatggacttggacatggagattggagaaacacattccattttctgtcgagggcatcgtcccctctcacctacctgtctggccggggtcggatcagtcagagggccttcaaggagccgtggtcatttggaaagtctaaaaggctctgcactcggagctgtgcataaatcccagcgttgcaggataagatatgattacagtatattatgtgggcttgacatttatggcaagtataaacagagcgttattactaccaaatcatgagcctccgaccaagaggaaggcagcgctgagagcacgcaagtgagaaggagtttttatacaaaagagaacaaagtgatatgctgccacttttaatatgcctgccatgaaacagaaaagcagagagcagaaaattgaaaccatcgggaaagcgccaggtccaggatggcccagacaaaagtcactgccgttgagataagtggcactggctcccccgccatggctgggccaggattccaggagagagggaaggaggaggagaaggaagcagggagaagaagagggaggagagaaggaggaagtgggcggggggaagaaggaaaagtgaggaggggagagagaaacggctcctgggtggtaactgcatcagcattgtttttccctccagttattgggaacctgggcttcctgggtcctttccaaaggggcgtcacttttgtcatctgggaggtgacaaaaatgcatctgagtgcaggtgtgccttggcaccccctagaaagggtaattgggaagattctgcaggttggatttcaccatgtgtttatgtcctggtgtctgcacaaaggcccgacatcttgtcgggttattaacggagacacagtggctgagctgatgactctgtcccagctccaggctgtgtgtggcgtgtgtctctgcaggtgtcctcactgatttcctctccagggcagactccttggccatccacccatgggcccctttccaggaaagggatttttaaagtaaatggtcatgagccacatgtcttctgggcctcctggcctcagcccagcaggctctgctcctgcataagcctctgtgagtgcagagggcctctggttgctgggaagtggggtgggctcaggttggggtttaatttgggggtggagacctttccaagtatctcacctagaggttacacctcctccctagctggacccatgactcttggcaaggcccggatcttgagggaagagccagggagctgggatgaaagctcttcccactccgtgtgagccagcctcatcgaggaacagagggacaggcctacggtgcctcctccttgggattaatgcagttaggatgagatgtccacgaagtccacagagcatctgtaggtcccaggctctgcatgagacactcagaggccatcgcccttgaccgcctggtgaaaggaatggagacagagaacccagcagttgggaacctcgggggtcagcctaggtcatgtgtgggcttggccacatccaatcacctaccctctcgaaggcacagtttcctcttctgtaacacagagatcataattgcacaataaaattacatgagggcagggttgcacctgctcttccctgttggcagcatagtgcctggcccatctcagccaccaaatgctgtctctatacagagaacccctcatttatatcttcaactctaacctctcacctgaaccccagactcctgcatctagccacctatgcagtgactcctctccagtagctaacaggcctcccaaacttaatacaaccaaatctgaactcttttttttttttctttctctctttttttttttgagacggagttttactcttgttgcccaggctggagtgcaatggcatgatcgtggctcactgcaacctccgcctcccaggatcaagcaatctcctgccttagcctcccgagtagctgggattacaggcacacaccaccacacccagctaattttgtatttttagtagagatggggtttcaccatgttggtcaggctggtcttgaactcctgacctcaggtgatccacctgccccagcctgctaaagtgctgggattacaggtgtgagccaccgtgctgggcctgaactcttttttaaattttattttatttttatttttcaacatttattttaggttcaggggtacatgtgcaggtttgttacatgggtaaattgtgtgtcactggggtttggggtacaaatgattttgtcacccaggtagtgagcatagtacctaataggtactttttcgatcctcaccttctgcccaccctccacctacaagtgggccccactgtctgttgttctcctctttgtgaccgtgtgtactcagtgtctggcccccatttataagcgagaacatgcagtattggttttctgttcaggcattaatttgcttaggattatggcctccagctgcatccacgttgctgcaaagaccatgatttcattcctcttttaaggctgcgtagtattccacggtgcatatgtaccacattttctttttctcttttttttttttttttgagacagagtcttgttctgtcgcccaggctggagtgcagtggcacgatcttggctcactgcaagctccacctcctgggttcacgccattctcctgcctcagcctcccaaatagctgggactacaggcgcctgccaccgcgcccggctaatttttttgtgtttttagtagagatggggtttcaccgtgttagccaggatggtcttgatctcccgacctcgtgatccgcccgcctcggcctcccaaagtgctgggattacaggcttgagccaccgcgcccgacctaccacattttctttatccaatccagtgttcatgggcacctaggttgattctgtacctttgctattttgcataatgctgcaatgaacatgtgtctttgcggtagaataatttatttacctttgagtatatactcagtaatgggactgctgagttgaatggtagttctgttttaagttcttgagaagtctccaaactgctttccacagtggctgcactaatttacattcccacctgcaatgtacaagcattcccttttctctgcaacctcaccagcatctgttatgttttgactttttaataatcgtccttctgacaggtgtgtgatggtgtctcattgtggttttgatgtgcgtttttctgatgatgagtgatggtgagcattttttcatatgcttgttggctatgtgtatgtcttctgaactctttctaaatctccatcggatgtatgccttccaaattgtcttcatctgggctgggttcagtggctcacacctgtaattccagcacttaggaaggctgaggggggtggattgattgcttgagctcagaagtttgagaccagcctggccaacatggtgaaaacctgtctctactaaaaatacaaaaattatccaggcatggtggtgggtgcctgtaatcccagccacttgggatgctaaggcaggagaatcgcttgaatctgggaggtggagtttgcagtgagccgagatcacaccactgcactccagcctgggtgacagagcaaaactccgtctcaaaaaaaaaaaaaaaaaagaaagaaaaaattagccaggcattgtggtgtgcacctgtagtcccagctactcgggaggctgaggtgggaagatggcttggcccggagggggtcaaggctgcagtgagttgtaatggtgccactgcactccagcctgggcaacagagcaagaccctgtctcaaaacaaaacaaaataaaacaaacagaaaaactcaaatcttcttctgtctacccatccattttctctaaaaaccaaggagtcagcctgaatttctgtctttccctctcttccttatttaatcactcagccaacccttacacccctacccccaaaatatagctcaagtccatctgcttcttcctaccttgactgcaaaagccctctgccaagtcttccgcaatccattctccactcagcggccagggccatcttttaaatacatgtatcaggtcttaatacctcctgtcttcagatgctccagtggcttctattgtggctggagtaaaatctaaacccctgccatggccttccacccctcccctctcaggtccacactctagcctcatctcccaccagcctccctcttgctcctcccttggctccggctcacaggccaccttgctggttcttggcgttgcacatctgttcccaccccagggcctttgcacatgcttttccctctgaatactcttaatccagattttcaatagctggatccactcatgaaaggactaagcacaaatgtcccttctttgctctcaggaagatctaggtatggcatcactgtgcatgacttgggaacagaaaggttcaccaaccatccagaaggctggagagagctcaggcagggactgttgaaataatggaatgtcaaggccactgtgggcaggatgattggacgggtttgggagggaggcatggaagcccgaggtgtccctggcttcagcaggcttgctgctttggctggggtgttcttacacacctagaggagccccaggctctgctgttccctgtcctggatgaacatgcctatgaagaggtgtgtgccctctgcaggcagttcctggggcctctgtggaggccttgggcagggctcaagtgcccttggccgacaggctgggatgctgaattgcaccacacctgtcacacgctgcaggatcttcctgcctggcgctgggcttttgctgatgctgttttagcaccatcctgaaattgaagccacaccaggtgatcttgagtgagacctgctttttgaaagatgtgtccccagagcctcagagcctcttcctcctggagatgcaggtggagcctacagatggttcagggaaatttggaagtgtgcatgagtgactgccaccgcctcctcctccagtctctgaatcccagtgaatggagatccctgaacctatggaccatcagcaggctgtctgtccccagggtccctctagcatgtcagggcttggctctgcaggtacccagcctgccccattcctggtggctgcttttatagggaaacagtagaatgttggttatgaacagggcctttggaatcatttagacacaagtttaaatcctgcctcttccatctactgaccaaccgaggacaaattacttaacttctctgagccttggttcccttctctgagattaggtgggcatagtacctgcttcctggggttgagaggatgtgacaggatatctataaagccttgggcccgtggaagctgtggttcatgtcagctgctgctgtgattgtccacactcagctcccttccccccttccctcccatcatgggcttttcaatccattcctagttgaagcagaggctccccggagtccattcattctggcatctccagctccaggtgaaggatatagctatgcacagaccctactggtgctctggtggatttctcggctcagggaatttcaggatgaaaccaagggccctgcgatgtcatccagtctcctggagcatcctacagggaggaaagaaggcatcgagggatgccccgccctcccattttttcattcatgtcttcctccctgaacactgcatggagccgctatagccaagagcccaggacccaacctccctgcccaagccttgccctttttggctcaggaggggccatctgggctcctggtgaggaggggggtgagctgatttagggggcagcgaggcagaggaactgagttgcccccttgccgggctctcaagtcctggcactgccccacctggctgcagaaccctgggcaactcacttacctctctgagcttccatttctttgtaaataggggtcacgatttccatctcacaggaatggtcattctttcatttaatacatgtgagaggggtagggatgaggcttggaggaagggtttgagctggcccctctaagctatccaaaaaatttcactctttatctaaagggccctggaaagccatagaagagtttctggtttgcttgcttttgtttttattattatttttatacagatgtcctcgtccatgtgtgtttttcgtccttagggtcttatgactcagtgcttctggacctttccatggggcctgctccttttgattcagggaaatccctggaaaggactccatgcagtgtctgggcagagtgccgggctgctggagcttggggtccctgctcccaggtccctgtccccacctggaatgagataggagaccaacagcatcttccctagaaggctgatctccctcagggactctttggatggtgacagacagggccctgtgttttctggactatgctaaagggctgcttgtgtgctggagggatctgggggctccttttcaaaatgaaggtccaagcccagatctttgtggagggggggaatggacacggagaacagcccatatttcccagttccttcaagttctatttgcaaataaagaggttaattggaaaggttgtagtcactggtcactggggctacaaaaagccccacgtcctcccttttttcctctggtaccgaggaggtgagcttttcggttgcttttctgaatctgtagctgaaaaccttgacttgataaatgagatgtaaccttgaagtaaatttgcctattatctagaagtcatggaagcagacactaaaaatggactccatttattttacgagaagtcagagcatgtcaagctgctcataattagtaataaactcatctctgcttgatgactttttacactgtttgtattttttattgatgtagtcacgcttaggtggccatcactggaggcgggcagtggtggggctgcttccggtgcggagcctcccttcctcctccagcgtccctgcatgccccgcgccacccctgccccgggcagccccggctgctccttcatcacagagcccagactcgcctcgtcagacttggctacctctgtgagcttgcaggaataaatctgaggtgctgaatatagatatattttcctttctcctccttggagagcagtgatttgcagccttttcttgtgtgagccagccaccctcatgtgacttgataggcacatggtcaggggaagttgctgtttccagacctaatgaggccttggagtcttgttaatggggctccttgctgtggaatgtgttgtttatggatggacagggtggccccggctttgtctcctcagccccatgccaaggagtggatctctgatgggcagcaagggttgagaaagaagcagaggagcctccagccctgggggccctggagcctggcagctttggctataaaatctcacccttcagcagcccatgtggcacactgggaggtaggagcctcccttctagaaagttctagaggctttccctgtctgcagagcctgggatggagcaggctcacgtgcataagaggggctctaggtgggacaggtggaagagtcctttgtggtctcatttgctcttgctctggcgataaagccctgttatcagtcatgggtaccaggtgacccttttccagtgagtctctggagacccaggggtcagtggggagccagcctttcctcatctctgccatgtgcagggaccatggagaagggcatgctgagtgggtcctaggcttcataaaagagctgggcacctggacagcaccattcccagtacagagaaggcaatcgctggcctcaccaaactgtgctctggtgaggctggagagcccctccccaccccctggttttctcttggcctctttggtgccctttacattgggccctgtgaacaggacgcagaggactcaggcagcccatcctcctagcaccacaatcctcctcatccctcaccccattcgacggcaccttttcttgaagcctttacttagaattcagctccctcttcctgctctccttctgcagtttgtgtttcactcttttgtagcaggaaatgttctggagcattgtcatttgcagacatgaggcagtctgcagatgggccagtggaccatacccagatgcaacagcttcctgagagctggcatgagggctccagcctgtgttcttggaatacaagctctgaaagggtacagggtgcggtgtttgcatgataagcagggaaggtgaaacttgtcccttctgaagtggggtctgcgtggggtttttcagagctagtgggttggtttgctagggctgccgtaccacaaacggcgtggcttaaacatgggaagtgcattgtctcatggttctgaagggtgaaagtctcagatcaaggtgtgggcagggctggtttcttctgaggctgggagggaggatctgtcttgagcctctcccctggctgctggcatgtgcttcagtgttccttggcttgtagaagcatcaccttgtcctctgccttcatcttcacgtggcattctccctgtgtgtgtgtccaacccccacctttttataagtaatcagtcatattggattagtgtccaccctaaggcctcattttaacttgattacctctttaaagactgtctccaaacaagggttcattctgagatactggaggttaggacttagcatgtaaatgttaggggactcaacccataacagctacaaaaagggaggtgcatcctgttcacatgggggctgggactcagccctggggcaggttctggaggtgattcccaccacagccatgccaggacaggacccctacactgatgcactggagtgtaaatccgaggagatggtctttgcactcttgtgaatcaggctcaaatctcaggtctaccattcaccagcaggtgaccttgatcaagtggcttaacttctccaaagcccagttccctgtttgcaaaatagggttaacactacctaccttggaggattgattgatctgggatcaaatgaggtcaaagatgacaagcctcggtgtgcccacattgtgccaggagcatgggaggtgctcatgccttttgtggctctctcaggactgtgtagtccctagagctgtttcttttcaccctgtccctcttagccttgtcccattctggcctggcagagtgagcaggctgtgctggcctgcacaggtgcaaggatttgcagcaagggaaggtgtgatgagaacaagaggccatccctctcctgccacgcctgccactttctccacgccggagttgcctgcaccaattggcagtcgggacacacagcagctgggatgaagggagtttactgctgaacttaatagggtcgttttctgcttcacataaatctgtctgtgctcagctgaggatcctgggtggctggtagagcagccattgttaatggacttgtccctggaaaacggggctgtgggtgttagagtgttgttctggatgtttcttccttgggaagggagaggatttagtaatagaagctcagtttggctcttccgttgctgccggcctgcctggccaatgggctgctttgggcaacaaaataggagtggcgccatattcatttggaatctgtgatcctgcatcatggcaagtcgtcatccttggatggaacaatagggtgggtcctcagttctctctgaacattcattgagtcgtttgctcaacagatatctgctgagctgtgagcttgggccagacctgtcatcaattctggtcaatgcgaacaggacagatttggtccccagtgtcatggaactaagagtcaaccagggaatcttcaggggagaagttggtggccaggaaaagctggggaggtgaccttctagctgacatttgttgggcgagtcaaagctggccagaccagaaggggaggctggagaagcctgggacacctcctggagccacatcctcttccttcagggacttctgagatcctccctgctagctgtgtagaaggaaccagaatatccaggtcctgtgtacccagccacctgagcaacttttccacagtgtgacttttttaaaagtcaagatgaatctcatttcatgcaataaatattaacctggaaggttgggggtacattaaacttttatgcatggcaataaatttcttatgcaagagaggactcactactagttaaagaaatttggggtgaaaactgccttggtggggattatcccgactcatctgtttagcaagtaacgtaaaccgagtttccttcaagctggattcctgtgtgttaatcatctttgagcctctgtttcctttcctctctttctgcacctgtcatttgattcctcaggccctggggctgccttccttctggggtcctctttgaagaagaatccttgatatctgccctctaggagtttaatatttcttgaatgcataggccataatccatacatatgtcttagaaaaccaaccctgaaaattttctctatacttggacagggccagaaggcctaatttcaaatggtcacacctacttgcaaatgatccagtgtcttcacaagggcttgacacatgtgccctgcctgcttcatgtcctggtcatgtgactttataactaatgtttatcctgtcttactagcatttctcttatgattggtgggcctgggtagaattgatgaacttgagcagagttggtggacttgggtagtgctggtaaacttggttagagttagtggacttgggtagagttagtgaacttgggtagaactggtggacttgaataggattattggacttgggtacaggtggtggacttggatagagttggtggacttgggtacagttagtagacttgggtagagttagtggacttggaaagagttagtagacttcaatagagttagtggacttgaatagagttagtggactggtggaatttaatagagttggtagacttgggtagaggtggtggacatgggtaccgatggtgaccttggatagagttggtggacttgggtagtggtggtggctttggatagagttggtggactttggtaggattggtggacttgaatagagtgagtgaacttgggtagaggtggtgaacttgggtaggactggtggactcgaatagagttggtggacttgggtagaggcagtgaacttggatagaggtggtgggcttgggtaggattggtggacttgaatagagttagtggacttgggtagagttagtagacttgaatagactgagtagacttctgtggaggtggtgaacttcggtaggactggtagacttgaatagagtgagtggatttgggtagaggtggtggctttggatagacttggtggactttggtagggttgatggacttgaatagagcgagtgaacttgggtagaggtggtggacttggatagacttgatgcgtgtggggcaaagacaattagtggaacataaccatttatgccaacccttctagctcgcagaggtgctctgtagaagaagaaagacattgcggaagtttttaaatagggacatgataccaagtttgaaacgtgagagagtgagtaggaactgtgcccttgtctgacccaagtgctaaatcaacaggaacatggtgcccacttgttacatcactcatggacatgagctgggctgtttttcttgcatccatttcactgggtgattaatatctcttttaatgttcagctgcagtgaattcttaacaaattattttgtaacacattgaaatcactttgtaagctctttgttaacacctttaagagggctctagctataaaatattactttatcatcttcccgttgcaggacatttgatgtaacactcgtgtctcggaggttgttaataaataatggatggaggaatgatctgggggtgaccttttgtagaacatcatctgtcagccgaacttcacttaatccttcctcttacgctgtcttctggctttcaggatatagcagtttgcaaatcaggtggtttggttcctgccagtgagtgacatttcacaggatgggtgacatcggaacgattggcctgtgtggttgcctctgggaccctcagaaggatttaagccccgtgattagcaggtctatttttggccaccaagtgcaggagggagggcatctggtgtgtgtctcatcttggctgtgatgaggcttggctgaccccagcaaggactctccatgagtggagtgtggcagcgctgtggttagctggccaggtgaggggtgtttctccaataagcatttgtagatctgccctctactaaacctgcttcaccctggtagcccccctcaaaggcatagcaagccagagtatcccagggaccgggaacacttgggaacagatgcctgatagagagtcacagaaccataaagtcacgggggctaaagccagagaaaccagagtccagccccatcagcttacagagagggactgaggtcagaaaagccgagagtgcctcttccagggtagctcatgggttagaacagatttttcacttgactcctgaaactgtggtccctttagccagtgccctgcctcacaggatgactctagagtcacttcattcattcataaacaatgcttatcgagtgctgactctatgcaggtggtgtgcaacatcctgaggacactgcaggcagcgagaccagcgaggtgtcttagtccatgcatggtgccagaacaacatactttagactgggtaactataaacaacatacatttaatgctcacagttctggaggctgggaagtccaagatcaagacaccagcagatttagtgtctggtaagaggctgttcctgatagatggcaccttctatgtgtcctcacatggtggaggagggggcacacaggttcccttgtgactcttttttttttttttctgagacaaggactttcttgctctgtcacccaggctgaagtgcagaggcacaatcctagctcactgctttcctgggtttcttgtacacagatcagacctatgagtgcatggtggtcattacagcttcaacctatgctagaaggcaggcgtgaaggaggctgcagctgcagatatgggatggtgggaggcttccctgaggaggggatgtcgaaggtgagaggtaggatgcgtgagatgctttctgggcagtgggagagggtatcccagtgtgctgtgggctctggggctgcagagatgcgtgtctgtggagtttggataagccccataaaaacactccacacagtgcttctagaatcagtcggagtccatggcacaaagcaagggctcagtatatactgagtgaatggatgaatgaatgaatgagtgaatgaatgaatgagccacctgtcaaactgctttctcagatcagtccagtcaggggaatggcggtggccatgggcttctgtagtggatgtccttaggctcggtgtggctggtgatgaaggactgagagtcatcccagagagtgcagaacacctcccatgaccttccccagagtccaagcccagggagcagttgtgacatccagccaagctcacacttggcctggaggccggaccccatgaggaccaacctgtggtcttcagaggttgtcgggagggaggccccagtggacgctgaattccagcctctgtctggaggcctttgagcagcaagcacctggtggctgcgctgtggatgggcttgatggtctgaacccataacacccattcaggcatcagaaaatcaccctcgaattatctctagagttttatttcctagaatcctgaatagatcacattttattgttgaatactgaaatctcattactttaggaagtgctattactgggctattactggaaaggaattcctctctcctgttctgattaaaacctcctgttcatatttaaaaaataatttcagacctttttttttaatgcttctaaaagtataaacgtgcagccaagcgtcttctttccctaggccccgcgcctgggtgtggacttccctgggcctgctggtggagagtgagcgcagctctgcagaagtagagacaccggagtctcctcctggacccccttcttggagaatgatccctttcttttcctctggctcagttgcttcctaagattctaatgacagttctggccaaaacaggcagcccccgttaccactggtttgagacttcagctctggcttttttcaccaggaactgattctgggatcttggggcatagggtccaagatatggcttctctgctgactgatggagtcaggggagctggttccacccagagcaatacgtggggatgggtggaaagcactcctccgggcagctcctgctcctctctggaggctgctccctccgcgcacagggtcatcagcttcctgcgtctgaatccccaacctgggggtgtcctctatggccctctgggctcacttggcactatcacatgccgagcccactgtgtcatgaatattacctggtgacttgctcctttctcctcctctgggactctgcccgttctctgtgaccccaatgtacttggcacagggactggcatggggcactcagaaaatatttgtcaaatggatggtggaattcaccagcacccagaaagcagtgtgatttggggagttttatcagcgagtggccatgtgactcccaggggcagaggggatgtcttcagcacatctccgtccctttgccaatcacaccctgctcagtagagcccaccttgcctgtcctcctcattgcctgccctgttcttgcctggccgcactgagctccacatgaggtatattccacatggacacaggggaggtgacccccttctctccagggctgctcctccaaggccgcgggttgccttggagaaagctcagaatagctgtgtggccccatgctgatgctgggtgagtgtgcatgtggctagaattcttttctggactcttggcaaatggaattatttacaaccaccagggccaatatttccctgctccgcagatgatttgcagcagatgaagtagatgctctctccttgcagagagctaatgataacattgagctcttcccaccccactgatgtgtctttgatggcacagctgtggatatttttatttgcccagtcaagtcggctcctcggtgcacatgtctgaagtgaaggcccttgggtctgcaagctgcagagggcactggcgccagccttgtgcgttgacaggagactgcaggaacccgccagcttggttgctggcttcctgagctctgtctgtgggttccctccctggaatggacaagggggagcagccgatttctgatacagctcatctgtctgggtcactggttccagaagttaattttggatggaacttcacaggcacctggcgtctggttatgcaaaacctgacctttggcttcactctggggccttcccttctcctcaccccagggctcctgctgcctccctctctgtgccattctttcctcttaaaaaaaaatatcctgctgacaggagctttctaacttgtcattttggagatcatcaacaaattctatagagaggtgacctccattatgagaaagagacggggagttggctgggacccaagccaaggagctggagcctcttttgactggcaaggtgacattgagtgtcatatcagcattcatggccagctctcttctcctcagagagtaattatttctttcagagcgaaaggtccaatttgctgtaaagaacagagccccaggtaaaacgaaagagctataagctcccctgacataaaggagaccagactgcccccgtccccagccctgctcactccacatcataatggccatttggccagatttattatgtttacttgtacttccttcctgtcataacacattagggtggttgcacattgcatgggtgaggccggctcagcaggtggagctgaacaccttgcagctgacactggctcttgtatccttggccagcacctggctctgggcagggattgagatggcacctttggagaaacactgggagagctgatgcctggcatttggggccaagctgagctctgggccctctgcactctcctggtatttcctctactcctgggacattacaagaataagtggcctaagtctgtggccttggatgccaataccacgatagatgtcattcactgagtgctcaccctgacccagatcatgagacactgggcactgatggttttatttagcacaggccctgggcactcatggtttcactgggcacaggccctgggcactcatggtttcactgggcacaggccctgggcactcatggtttcgttgggcacagacactgggcactcatggtttcgttgggcacagacactgggcacttatggtttcactgggtgcaggcactgggcatggatggtttcattgggtgcatgccctgagcactcatggtttcactgggcacaggccctgggcactcatggtttcactgggtgcaggccctgggcactcatggtttcattgggcgcagacattgggcactcatggtttcactgggcgcaggcactgggcacttatggtttcattgggtgcaggcgctgggcatggatggtttcattgggtgcaggccctgggcatggatggtttcattgggcacagacactgggcactcatggtttcattgggtgcaggcactgggcatggatggtttcattgggtgtatgccctgggcactcatggtttcactgggcacaggccctgggcactcatggtttcattgggcgcagacactgggcacttattgtttcattgggtgcagacactgggcatggatggtttcattgggtgcaggccctgggcactcatgctttcattgggcgcaggcactgggcactcatggtttcattgggcgcaggcactgggcactcatggtttcactgggtgcagatacctagcacacaaagcagtcctatttgcccatctatggctgagcagagtgagctcacagtcagtgaccccttcccaggccccacccccactagcacaggagttcccgctgtgtgcacccatggcgtggctctggggtggctctgggtggccctcatcacttggactgccttttcttcttttctcgtctgccctcccctaagctgtagctccatttctgtcttgcacgctgctgcagcttcagcacccaccgtggtacctggctcgctgtggtgttccgcacatgttgttaaatttaaattgttaaatgattggatgagcctgacgtgagatgaggacctgcccagagtcatccagctgctcatccacagagcctgggctgtcctgccacgaagcccttgccagtcactatgccttcttgacttcccatggcaccatgactgtcacactgcactgtggcacagtgtacctccaccttcctccttctgcttctgtttttgggagttcagtcaaagctgacatgttgcccaagactagaggggagagtttggaggccggagaggatggccaggtcctgggtgtggaggttgcttcctgcccctcctcctcccccaccacaggggcctggagaaggtagggtggtgtcctcagtgaggatggtctgaagggggcccaggagcagagggaggagtcatggttggttggaaattaggacaaccaatgcaggaagctctctgtcacagcttgcccattctgtaggtgagatccgtgaaggtcaggaagttgaataacctacctaagtttatctggctacttaggggaagaacagagttcagacttgaacttgaggtgccctaatgagtgtaagagtttgagggggtcattcacaagcataccctcgcttctgacactaagtgtaaattcagggcaggaccactctgtggttccataattcactgaaggactcacagaacttgctgaaatctgttatgcgtgtggttaaggcttatcagagtgaaaggacacagattaaaatcagctgagggaagagacacatggggtagggtgcagacaggttctgggtggggattccagccatcctctatgggtaagttgtgggaccactagcgtctccccacagcctgtgtgtcggtgtcgccaaccaggaagctcgctgggccttggtgcccagtctttactggggctcacacatagacctggttagctacccacatgtcttcagcctccagccctgcctaggacaagctgaggtcatgggaccccaaacacacccccttatcacattgttagactctcgagcatggcccaaagctccaaagacactctcacctgatcagtcccctcctaggagcccagggcacagcccagacctctctgtgggtaaggttaattcttgattgaatagagtactatgtaggagagtgtctaggaactaaattcgggcttattccctgatagactcttctcaccccgggtcaaggtacttcaggcccttgccatggcccactggtgacgtgggtccctgctgcggcgttcaggccccttgcttacatcacggcacttctctcttttccagactgacagcagcaatcacagtcacattccacagcctctccagcacccagccagctctccgcgggggcagcagggactggtccacccaacaacagcagccatgtcctcacctcttgctacagcagcaactttatttgatttgatgtatatgaagaaataaaactcagaagtcaattgacttaaacatggaacaatgcagcttggttattatggtgtatgctaaattttaatggcatttagaaagcgttttgtgtggtagaaaatagaagcaaacccatcaaaccccaactatgctctgtgttttatagtgcagaacgtttttctgctacaatccaaagactttaaaatgtaataaggtacatttgaacccaagggttttaaaatcgatgtaagaaacgtgcacatccagaaatggagtaaaataatccattactgtccgggtcgtattcgagggaagacacacattcctggaaaggcttttaacatttcatgttccacagactcttatttattgacacgtattagtgttcaaggattaatatatcgctaagtgagaaagaaaagtgtggttgggaggggttttgatagtcggcgttcttgggtttcttgctatttttgaatgcatttactcagatatatttaaaatcacatgccacataaatggatatatcaattgagaaataaggcaaattttccattcttacatttcattaaaaacacattccgactgtcacatgtctatatcccccttgtccttcccaccaaacatgatttttcagagcccgccattattgccctgggtcctgggatatggcactttctttttctttctttctttttttttttttttgagacggagtctcactctgtcgcccaggctggagtgcagtggcgcgatctcggctcactgcaagctccacctcccaggttcacaccattctcctgcctcagcctccagagtagctgggattacaggtgcccactaccacgcgcaggtaattttttgtatttttagtagagacagggtttcaccgtgttatccaggttggtctcgatctcctgaccttgtgatcctcctgcctcggcctcccaaaatgttgggattacaggcgtgagccaccgtgcctggcctggatgtggcactttctaatgctctgggttttgtttgtttgtttgtttgtttgtttgtttgtttcgagatggagtcctgctttgtcacccaggctggagtgcagtggcgtatctcggctcactgcaacctccacctcctgggttcaagtgattatcttgcctcagcctcctgagtagctgggattacaggcgcctgccaccccgcctggctaattttttttgcatttttagtagagatggggtttcatcatgttggccaggctgatctcaaactcctgacctcaggtgatctgcccgcctcggcctcccaaagtgccgggattacaggcatgagccaccatgcccagccacactccatgttttctatcgccctgtctgtatttcagagtttcctggccgtcctcatcaaaggtgctcaggagtttctatggctcaacacagtgtgagagttctcaggaatggcccggcctctgtgggtggtgcagcagctgcctgcagaaatctgcccacatccccgacattcatttgacagatgaacccgtttccatgatcttcagtttagggctgaagaaatcctgaaatcttctggttcagtggttctccactgaggatgattttgtccccccactccagggacatttttggttaccatgactaggaagtagagggtggccctctgggcatctgatgacatctgagatctaggaaggttctgcatcatctcagatcacacaactggccagtggctgagatggagcaaaactcctggagtccagacccagcctggggaagtcctgggctgagcgtgcacctctcttctttactgttgcacccctgccccacccgggctctgacctctccctgaagcttctacgccagtagtgtggcttgggctcacagtgtcaagaacagccaggtcttcctgggttgaggctgccaggcttagccgtcctcctatcctaaatccctccccaacctcccttaatctccagccaccgccagagcccatccttgcccttcagaagctgctctccttcgtgcaatatgggtgaggccattgcaggtcctttaggggacagcacagacctgcttgatgccaataagcacaaatctaggtaagactgaaaatgttggtgagatttttgtgagtatccttgctgtatgtgtttagttttttgtttgttgtttagttaaactagcatgcagtttctttttcaaaagctcaaaagtatccacatcctaccccaccgtctagtcgagctgcacgtctttcctgggctgggtctgttgcaggctgatcactgagcagctgcggacgtagtgggcccgtgattgggcatctcgcgttattacgtagccttgcccgtgaacacgtctctgtgtttctcaatcaacttcatcaccgtcagtgttaataattacaatcgccacagtgatggagccccgtgccagcgctgccatgagtgctttgtgtgtaggagctaatttgatacccacagcagccttggagccccatgtgctcttattaccctgtcgcacagaagtgatgcacagagagatgagacacgtggcttccggttgcagagctagtcggcaataggaccaggatctgaacccaaaacagccatctagagccgcccgcatagccaccatcctacaatgcttctccctttcaatggctgcaccctggtggagcaaaggggccaggccccattgaagtggccctgggccaaccaggtagtgcttccacagtgcctttactcagagctctgtcaccaacctggtgtcaccgtagaagctccacaggttcttgccagctccttccaccccaacatgtagcctgcaggaggcatgggaaccaggggaagaaatgaattggtgattctagtgcagagtctgtcaatcttggctctatcagccatggcactgggtcattcttggttgtggggggctgtcctgtgcattgtaggacatgcagcagcatccttggcctccacctcctggagtatttctacccagtagtaccccgtctctgccagtcgtgactgctaagcaagtctccagactttgctaaatgtcgctggagctgccaaagctccagcataagcaagggttttgctaaagcccaggatttgattcgctgtggatttcagttcccccagccccagggagccccgagttggctgcgactgaatgaagtgagacgtgggcctaggcactgtgcgcagatgggtgggagtgctccacctcagtccaccgcctctcccctactcgggggaagccttgtagggtggtggctacgtggcctccacactgcagcgggggaaggttgcactcagactcactctgagtcccacagagcagaggagccaagagacaacaggaaacccaaaacaatgatcacctgcttccagacaactttgcttttttgccttgtggggaaacttataaattatttggagagcaatattagtctttttgcttctgaaaaaggttctgcatctttgatagagcctggttttgaaacataactcacagagttgtacaaataccccatcaatagtgcagtggctcatttcattgttctcagtgcatggaatcttcattatttgcactgttgataaaaggcagcattttcagcagatctgcactactccatttagctgagaacaatgatttattcctccctcactattggacatcctcaatttccttgggtaataaagaatgctcccatggatgggatgaacaggagcgaccggctgctctgagcctggcaaagtcaggaagagcaagaaggatcctgactggtggctcctgcccagggagaaggacccagagcctgcctccccgcctcactggcaaccacagcctgtggtggaagtccggagttagtacacgtcattgacaaattgcccaggaagcagccgggcccctgatggaaaactgcccatctcagcacagacagtgcgcctggtcccaaacgctcctttctacgtggaggtgaaattcgaatagagcccttattcaataccacaactcagggatgggcaaagttgtgagcatgtatgcatgcctgctcttgttttctccgtattagaaaattcacagactgctgagagagggaaaataagagtaatagcttcaaactggaaatggaagaactttcacattcaacacaaaagggaattgttgcaatcctagggcaaacgagaaaagagcccagcctgctgcttagcagaggacgcaggcatggggagaggaggaggggccgccaacaatgacaaaaaattctgcctagcagtttgctccattgcagccttgcctgggtggaagggaagaagattggagacttccagcaccttggaacagattaatggctctagagatgccacacctattggtggatggcttctagccttacctttacaaggagccaaatataaggaagcaggcgtgcggcacccctgagcaatgggcatgcacgctcaccagataccaggacactggagagttgtgtgcgtggaagtgagggctcaaggaactctctgggcttcttaccagcctctaggccactcactattcatgctgttattacccccacgttgcaagggaatgaagctcagagatgagacacgtggcttctggtcgcagagctagtcggcagcgggaccaggatctgaagccaaaacaaccatctagagctgcccatatagccttcaccctacaatgcttctcgctttcaatggctgcaccctggtagagcagtggggctgggtcctgttaaagtagccctgggctaacctggtggatgcgataaccagcagatagccaccagcccagccaggtcagacccagagatgaaacactgtttcgtttcttccctgcatcccctggggttgtctgcagggtgcttgcagggctccttggtagagctactttttcctagaaggttctagaagcagaggatgaatgaatctgtggctgggtcctttgtgttggggcattaggagttgagatgagcttctgggagatagggcaccgtggggcacattttagagaggacgccagtgcatgcagggccattgtcctcagcttccaaccaaataacaaggattacccaacccagcccctgacccgaaaccaccattggccacaccctagagactccagtggggcccttgaatcacctcaccaggcaggagcaaaatcctgtttcaaagagtaattgttgctatggcaactggccttatgcactcacctggttgccactgggggactgaggcggacgcacatggtgtgttggcagagaaaggaaaaaatgccagccctgggaccaacacccgtggggacaggcaagggagttgaggtgttcagccatcaaaacccatcttcccgtctggagcagcaacaggccgggccttcccctgtgcaggctggcaccactgattaggggacctgtgtccccatggttacccaggctggaggatggcagtaaatactggggcctcgattccaggcaagagatgttagactcaggtttgtttgtgaatgtgagaattggatatttcctaccataaaggcctttccattaattaatgcaaacattaaagctttatagagctggcttcttctaagtcaccctttgtcaacagagacagggtggacagaagggggcagggagaggtaccctgtaggacaggaagcagcggactggggcaagggccactctgctcttcccaggtggggcccttcctatcaggaggcaggcctaccaaggggtctcccagctgcctcaccagctcgcttccctcagactaagagcccctgagtcctcagtttttaaaacactaatagggaggccaaataaatatttcaaggtcacctaagggctcccttgggtcttgtttatttatagcatcctggccacctccatctagaaatgtttcaaagtgcagaagtatgaatagtaagaaggcagctcttcatttatttatttggttatgaatgtatttattttcgctgtctctgccaactcgaagggcctgggcataactggccagcacatggccctgctctggcccttggcatctgcctgcttgctcagggagcatctaagtggaactctgcattgcatttagtcctcagctgcaaaaaggaagctagttagctccagggggctcgcgaggagactgtacctgccaccacacatacacgtgagccaaggtgtgctgtcatcctggagaccctggcccaattccctggagcatctatggagacagagtataagcagtgcctaatttagtgagtccagcagtgtggacgttccataccagtgaactcatgcagcagaaggggtcagtattagctgggcttcattgtcctccctctattcctggatgataccgccctcctaagaggtaagtgtcatcacacccatttcatactagagactggaagagatcaaaattgtagccccaggttgtgaacatggaggatggtggagctaggacttgaacctggctctgtccgacgtcttcccctgtctcaacactggtgtctcttttgccctggagatggaagccaatggtactgtctgcccaggattggttaacatttgtccccagcccttgcctatgtgagcaaaatgacctctcagataggctgctccctgggagctagtctgtcctcagcctgtgtccaaaggctctaatggatgagatcacagaccggatcacagattcggatctgtctggaagtgctggacccctgctgcatgtccattctgaaaagtgctctgcccaggcaagatggcactcaagctccactctacattaatttaattaatacaattaatttagaccaaatctagtctgtccaacccagtcccaacacatagggagcactcgcctgaccgagggctgaggggcccccttcacctctctaccccaggagagacctgaccacctcccagagttcattcattcaagcatttactagggacttaaaaagcgcaaggcactgggaatacagcagcaattaacaccgtcctcgctatggggagacagacaagtaataaatgtgtaagagcagcagtgaaaaggccaggtgtagaggggacctctggcatggctcaaccaagagtccggccctgtcctgcgattctttcaatgcctccctcctccttactgttctctattctcaggccgacttccctgtgttagtaaaatgactgtagtcatctcaggccccagatattctccactgtcctaaagaagagagaacctctcttttcccaaccattgggtaaaaagtccgaggtttcgctctggatctgtttaggtcctctgacctcctgaaccaatcactgcagctagtggatacaattcatttagactaaggattgacaaactatggcccatgaaccaaatccagtccaccatctgcttttaaaaataaaggtttttgaggaggccgaggcaggtgatcatttgaggtcaggagttcgagaccagcctggccaacatggtgaaaccctgtctctactaaaaatgcaaaaattagccgagtgatagtggtgtgcacctgtaatcccagctacaggggaggctgaggcaagggaatcgcttgaacccgggaggcagaggttgcaatgagctgagactgtaccactgcactccagtctgggtgacagagtgagagcctgtctcaaaaaaataataattaaaaaaataaagttttattggaacccctccatgcacatttgtttacatattgtgtggcttttccaagactatggcggaatcaagaaggcgccatagagacagtattgcctagaaagccaaaaagatgtacagaaaaggccttttacagaacaagttcgcaaacccctcactcagacacatctgagtctgtcctgggagatggtgttagaggaaattctcccaattgtagtgagctttacataagtgctggagggcagttgatctatgcactgtagcacctgctattcctgtagccattcagccaaagaagcctgacggccttgtatgtaactaactgtgtgctctgccagagagatcctagcttcagagagagagaggaagccgtgttacataatcagagtagccaaaagcaagaagcaacccaaaagtccctccacagaggaataaacaaaatgtgctctatccatacgatggaataatattcacccataaacaggaatgaagtatgaacccacgctaccaccaggatgaacctgaggacgtattgctgagtgaaagaagtcagtcgcagcaggccgcacatggtgtgtttcatttatgtgaacgtccaggcaaatccacagacacagaaagcgggtgggtggttgcctggggccgggggcagggaggagtggggaggggctgcttcaggagaatggggtttcctttcagggtgatgaaatgttttagaactagacagtggtgatggttacacagctgagaacatcctaacatccactgacctgtacactttaaaatggtgaattttatgatatgtgaattttacttcaattaaaaaaaaatcggagaccgagtcagaggccgcactaaactatggggctggtgggggatgaggcctgtgggcccagcaggtgcatttaaagtggggacccaggggccagggcttcctgggagggactttattccagcttttccttagctcatatcttgcaccggctcctcgaggcaccccatccccatccccactctgtctctgacttgcctgggtggcctgacagtggcctgtgcgcctcagggtggcacctgcaggcaccctcctccctggctttcttgagcacctgatggtgaaatgccaccatgcatgacagagtctataaatttgcctgcaggtctggcatttatgtttggcacctttgtaaaaatattatttcccattgctacccagtttttataatgtcaatatactaagatctacctctcagtattacaatttatacacaatgctgctttctttataccctagagcacatgtgtttttctaacttagctttcaaaaatagttgattttcaaagagatgtcgcaggagacttgctgttggcagtgaaataagtttttttattgtggtctggagcaaaatatgtgatggaatccttaattgaaattcacctttaacattcaagttatatttttattacaatttgaatccattgtgagggatcgttatctgcagagattcatttccttcgggaagtttcttctttggtgatgtaatttaaattcagggagccgggaaaaaacaccagcgtctcgtatttcaaaccgctggcagaaaaggctgctggtgtcagtgcccaggaaaccgtaaaacaaagcactttctctgtctatggattgtcttcctgttgcgtcctcatcggggcattctggggcttgtctgagcttcttaaccagcagaattccctagaaggcaagggcagtggccgtctgaactggcaggcagcattaaaaggggactgaactccttcactgtctttgtttctgacacctcgctttgatctcttggcctcccgatgcctctccttgcctcttcctcctaaggacagctttccttgtgttctcattttccaaacaacacacatcagcgaaccgacaaagcctgtctgcgtgcgtctgccttgcgccatggagcagagacttgaggctgcggccaggcagaaacaggactgccaagtgagcggtggagaaaaagggctgttcttaatcagtagtcatcactttgtggaggataatggcaatttaattaattgcccaatgccagtgctgaagacagggtctgcaggaacattgctagaatttgaggaaattattacaaattgtgcattcaactcttaggatgaataccaaatccagacatcatatgttttaacatacctattatttatatgcaaatctggctcttcaaagaggatttcccaggagcccatggggttagttttcctgtaggctcagaaagtgactgtccatttgcccggcacgtccctctcctctggtatcccaaggaaggttgcccagttaagtccgggtccggtggctcacgcctctaattccagcactttgggaggctgaggcaggtgaatcacctgtggtcgggagtttgagaccagcctgaccaacatggagaaaccccgtctctactaaaaatacaaaattagccaggcgtggtagcgcatgcctgtaatcccagctactctggaggctgaggcaggagaactgcttgaacccaggacatggcggttgcagtgagccgagatcatgctgttgcactccagcctgggcaacaagagcgaaactctgtctcaaaaaaaagaaaagaaaagaaggttgcccagttggatcagatttcaccacttctggccactcttcctctttagggcctagttccatcaggtcttagtaagaatgtggcataaatacagtattggtagaaatagtttgaagagtctttctggagccaagataacaaacagtcctcccttctgatgccaggcagggttaggcactttgggctctatgaaaactaccttgcctggtccacccagctgatctgatcattctggattgctaagcaaagctgtcagggtggcacatgcttgtgaacagcagcagcagtggccacgggacaatgagagcagtggctagttggaatttattgagcactcactctgagccagactctgtgccaagggttttatcataatgccctaaggtcatgcaaggatggcaaagataagctgctttctaaagaaagtggttaggaaaatgtgctctggagtcagacaggctgtattaagataggttcagctgcaagtgaccgaaaacatcataatagcggtgacttaaataagacggtttgatttttcttttttttattttttatttatttatttattattatactttaagttttagggtacatgtgcacattgtgcaggttagttacatacgtatacatgtgccatgctggtgtgctgcacccactaactcgtcatctagcattaggtatatctcccaatgctatccctcccccctcccccaaccccacaacagtccccagagtgtgatgttccccttcctgtgtccatgtgttctcattgttcaattcccacctatgagtgagaatatgcggtgttcggttttttgttcttgcaatagtttactgagaatgatgatttccaatttcatccatgtccctacaaaggacatgaactcatcattttttatggctgcatagtattccatggggtatatgtgccacattttcttaatccagtctatcattgttggacatttgggttggttccaagtctttgctattgtgaatagtgccgcaataaacacatgtgtgcatgtgtctttatagcagcatgatttatagtcctttgggtatatacccagtaatgggatggctgggtcaaatggtatttctagttctagatccctgaggaatcgccacactgacttccacaatggttgaactagtttacagtcccaccaacagtgtaaaagtgttcctatttctccacatcctctccagcacctgttgtttcctgactttttaatgatcgccattctaactggtgtgagatggtatctcattgtggttttgatttgcatttctctgatggccagtgatggtgatttttctacctgggaaacgattggttagagggttgagaactggctgggcaactggttgctcattagagtcccagcctccaataatgcagtaccactgtcctcaatagatagccttcacctcatggcacaaaatagctgcttgagttcaagccatagtgcctgcattccagccagcaggaaaggagagaacaacgcttttgcctgtatcctactggccagaatgcaattgcagtcacatctaactacagaggagggtaggaaatgtaggcttcactctgagtgtccacatgcccagctaaatttggggattctaatacttaaggaagagaaagctgggcaaagggaaacagatagctatctctgccatagagttagatgcaaagttagttgttttccttgggtgaattgggatatgtcttctggatatcatttccttatctatgaaatcaggtaaatctggtacttggagaggatgtgcgctaattgctctgtgatgcttagcgtagtaccagatgtaaacatgggccagaaggatggaaggcgttgccatcattccccaggacaggcacagcccctggttcttccatctgaggccagcctctagtactagctatggggaattgcaagccaattaatttattctacacttcatagtttaaatactctgccacatttgaattccgtaataagccagtgtgattggtgttcttgcccccactgtagcaaggctggcccaaggactcaaacccagatccctccaatgtgaaatgcggcgctctttcatttctccatacattgatgagccctcctgcaggcaaaagaataaaaggacaacaatatttgacataaaacattaagcacatgcctctttgttgcagtgatttcttagcctagatagatacttgcttcctagatgatagatagatagatagatagatagatagatagatagatagatattcctatagcctcaaaggttgagtctaggaaattttgagaaaatgctttccttttgccaatgagttcatttatttatacaaccagtatctatttactgagcaactagtatgtgccaggcactgtgctaaacactgggaatataatgatgaacaaaaccagaccatctccatgcttgtgtggagcttagcgttctatgtgggaagaagtaagataatcacatgatcataaaaatcaagggcatgcttgcctggaaattgtacactgagaccacatggagagtgtgggtcgtaaccctgcagggcttcctacgccatcaacacactaagacctttgccgcagaaaaggaagaaggagggccaggacggacattgttgccaaatataaatagtgagaaaagcattttatattccctaaggctccttgacacccactgaacatttctctgtgcacttactcagacgcctaattattcatttactccttctcactcatctaacgtgtgtagtatagcaatctggaatacagactccggtgccagttagattcaaaccggttaaaaccctggtcctgtctgcccagtaactaaccttggacaagttaggttaacttctgtgtgcctcagtcttctcatctgtaaaaatgggcgtaggatatctacttcatagggttgttgagagcattaaaatgcattacaacatataaggcacttagaacaacatagggcacagagtgagctccatgtaagtgctagctcaggatgatgggggtgaggtgatggtggtgatcatggtcatggtggtggtgctgctgctactgtcgatgctgtcgaacaagatgatggtgatggtggtggtggtgctggtgctgctgatgttgttgaagatgataagaatgatgatgaggaggaggatgaggatgatggagatgatgataattttgataaggaggatgagggtgatgaggatgatgatcgtggaggattcttgagtccccaccatgtgccaatgacaccctcggtgcgggtatgcagagaagaacagagaatctgcccccatttttccagtatagtgggagcaaagtccaaaggtgaccacagagccccatacatgtaatggagcaaagaagggcatggaactcccttcccactgaaacacaggacgggactgggctgccacgccctgctccaactcccagtgctagatccaccctgggaaagaaaaggtggcaggggaaagctgtggcttctcttgcaggaaataccatgggaaggcttctgtgccagggatgtgggaaaagggggaatggagcgaaagatggctgttggctccattctgaaagcaccacctgcagcacaatttgtacttactgcttctgccagaggtttgaaagtggccgcagcttcacggtggctcagtggcttggttccagtccaactttccggggcagctggcctggtgcaggaaaggggagcaagctggccagggccccctaaggctgcagacctcacctggatgctaatcctgagtgcctgggtagcttcttcatgtccactgccctgtgggccctatactgtgtgtgatgattgatatgagtcgatgtgtgggccttggagggccttttgtgaatccgtggctaattttttggcgaacaagtagatcaaatgcttgatatttccctttttgttattcaaaattaaaagaaatttgtacctatcaaagcagcaaggacacacattagataaatcaatctttgccattttgtcactcttaattttttgttaatttaattagaatagagatagtcaagtctaggtgtgctaaatcacagaccataaaattctgtaaatcacttcagcatgtaactgggtgtgcgtgtggttgctaattaggaggggcagagctgcggctttggagatgagttcctggcaaggaccctgggttggcaaggagtggaaagactccggggacatgtccaactacctcttgggccactgaagcctctgcctccctgtacccgtcagcgccactgcccagggatggttcagccaggcgagcgtggggatgggcccaggactcacagcctctcctttcctgtgtgagctcccaggataggacatctctgcaggaggcagtactgcaccagctggaagttggaccacccagcttcagcagaacagccctcctatgccccctgcccatcctgcttgcctgttcactatttttttttttttttgagacagagtctcgctctgtcacccaggctagagtgcagtggcgtgatctcggctcactgcaacctccgcctcccaggttcaaactattctcctgcctcagcctcctgagtagcagggactacaggcacatgccaccactcccggctaagtttttgtatttttagtagagacaaggtttcaccgtgttagccaggagcctgttcactattaacaggacacttgattttgccggtcaaaccactgcagcaatatttccagaacaaatacagctgcttagacatttgcttttggcgttttacgtttcaagttgaatctgttgatttcggccttgctgtttgaatagcgtctctgcaggtttattctgggcacttacatttccaaatgtgcaagtactgggctcgcgggccagtgtttgaagtgatgggagccagacaggccagggaagggcccttagaggccactcctcactcacagggagagccccggggggaagagtgctgcctggagagcagcaaacaccaggaaaaaatgaggctgcagaggccaggccagccccgaggcctgttggagacatctctacagcgtgctccacccagcacgatgctccctgctttccaaagtgattctggggtgcccgctccccagcactttctcccaaagctcagctctcaccacccactgctagccactctcttccacatttggcctcccagcactgggcgcctctgacggtctgattgaaatccgaggccctcactggccatttggttgtgtccagtgcggtgctgagcttcgttccacatgcaggagcctcactcactcgctccttctgggctgtgagggcctctgggcacctgggtgttgcgtgtgcctcccccatgctaagggtgctgcagaagcccaccctggctcctccaggctcctccgctcccccagagaatgaaaggcattggccccccaaaggaagtctggcttcacagggaccattgtcaggcagagacacatgcgcacagccccagcccgctggaaggccatctgttgtcagaaaggttgcgttttgagcccgtcttttcatctgggacaagtttgtactgaactggccacatttgtgctaaagacatggttcgtagtcagcttcgcaggcccaagaggcagagctcggttagcatcttgtgcagagtccccgtgatgccctgactcatcatgagcagccgccgtcacccagctgagctgtacagcgagagagagatgcagtgtccggaagacttgggccctctgggaggctgtagccactcagtcatccctgccaaggatggtgggacaatggcagtgtcaaccttgccaaggggctgggtttccagccatggctgggccctcagcctgctcggtggagcatctcatctcccaccccacggtggatgttcttggccttctctctccaactaacatctgccaaggcctcctcctacgcagcgatgcctcccttcctcctaagaaggccgtgcaccttgacgatgggcagatggggttggaggcccagccctcccttcccagcacgtgacctgctgcaagttacttgatccccaccagcctccacctcctccttggtaaaacacaagtggcaacagctcctgtttcccaaggctaagaagtcagtaggaaaatgcataaaaaatactttcccgggtcacttggctccttcctcccctcctaacacccatacaggccactgaaactgttctgagaagtccctgttgccaagtcaaggactttggttccatctcacggcagtctccgctggtgacgttcagtgctgctgcctgctcttgttgccatggtttccatgatgctacatctccggtccctcttatgttcctaactgtttggttcccaatcttctttgctggcttgccctgaaagtcagcagcccctggaaccctgcccttggcttccttctcttcctgggctctcttcctgggtctgtctctgggtggaactcacccattcccatggcttcagtctcccccctccaacgggagacttctctcccacaaatccattactccagactgggctccttcccttgtgtatgctgttgacccctctcattgaacaggcttggaccctaccctgcttcctcccatccaccaaacacctcttcaccaccatttccaccacccagtgactggcttctctctcccaccgacatggcaccaccacacagccaccccaaccaggagacctcacaatcctagtttctgctcgcccttcacttcccaaatccaatcccttattaagaaattcccattctcttctcccatctgttttccatttctgtccaggccaggccgtggggtctctgagcttcacggctgcagctgcccctgccagcaagcagggtcccagctgccctagaccccagccactgtcctgccagggtcccagcctgaggctcacccagcccaggtgcctcctggggcctctcgtgcttctctgcttttcttaaagctggaggcaggttagcgtcaactaacacacacagagaaaaagctgcaaaacaggttttaaaatgtgcacggtgtaaaaatgatagtgggagtttggacacagatgggtaggaggttatgacagggaaagaattttgcttaatcttggaatgaaaaatactctgatcctggcagagtccagtcagaaggaatttccagcaagatctgtcttcttgccacattgtctgcaacacaattgatctttgctttgattgctttcccctccctccccctcacttggcttttcgcagataatgtacagaaagcccctttttgttgttggagcggtttactgggggaggccttcagaatcaacatccagctctcccagtgtgacctcccccttcccctgccaagtcagagatgggctttctttgtctgtgacttgagatcttggagggccttgggttccaatctgagccctgtcactagccttgggtggatgatcactctaaggaccaatttcctttttcatctggaaaatggggatagtagtccctttctccgggggtcgttgtgagaattaagtgaaatgacacagggctttaatggatggtgctgcacctgttgtcatggccactgtggatgtgagcggcagagctgcaaacacgccttgctcctctgaggtcagcccatgccggctgccctttgggtgccagccaggccgttgtgctgcagggaagggaggagaggagcctctcttctgggtgagccagacaaaaaggaacctctcgtggcgtttgtcccagcatcctctgaccgtgagccttccgatgtgcctgcctggtatgaacagaaacgtggatccaacccacactccttcctgatttcaaacgtccctgtgaatcggatgggacgtagttaatagcccctgtcttcctggaaggaaatgttcagggaggactggtgttgggaagctagaggggaggcggcccggccttggagcccagccctgttggtgttgctctctttggccctggtgaacgtcctggccttggtctcctgagtccagggggcctggccagcagcctgccttcctgaggcccaagcccctggttctgactgctgatgcgcctcctgggagcgttcctgcccatctccacttggagttaccaggaactgagttgttggttctgctggcagctcccatcctgtcccatggggggttcagacacggagaccagtgctggaaggccctgaggcctctgagccctccagccagagccagggtgtgcccagtgcatgcactgctgtgtctgcctgggctggtctccccaccagaccgagcttcctgccggactggggcagggccctaacgctctgttgttacactctccatccccgtgccattcagagcctcccagcactgagtaggcactgcacggcgagagggagggggaggaggaagggagtctggctctgtgcctgtccccggctgcctggctctgactgtcagagtcactctgcagcagcacagagcgagtccgctgggtgctgtgagacgaccctggagagatcctcccacccccagctgtctcttctctagcctgttgcccccagctccatccctcctaaccctaccccttggccagctctctgggctctgggctcggcaggagcctctttcccccatgggctcagtcagtgctccccctgcagccctgctgggtctccctggagctcaccatccggactcgggctgtgtgggcactggagttcttgatgtcacacacgtcagcgtgttcccttagcactgtgtgaacacgaccctgtcccctggccggcctgggagatggcaaaaaagaatggagtggctccctggcaggaagtgcaggaaggcaggggcacagccccattgcagcacccctgccagcacaggccagcttctccactgatttgcccttgactgttcccttagaaacagacatgagtggccacaggccgaacgaggctccgtggagagaagtgggggcaggtggtgggtgggtaatttatcttacttactgtagggtgtgggggtagaaagccagggctgaaaatcttgcttctctaggaggtgactaaaggccttcacagtggtctggacaggaaagggtggagtccaagcacagggtccccagaggagtgtggtgaggccgagggaggagggacccaggcaagggaatcttggaggagaaggcaggacagttagcccagactagggtggccggggcaggctctgtgaggctgctgttgggggtcccgtggctgcagagaggtttgctttccaagtcagggccactagtttccctcggatgctatttgtgtcccccgccttccattgtgatgctgcacaataacttttacagcctggcctggtgcctggcctgcagccctgaatcactgattcatctttacctgccgcttccctgccggacggctctgggtgcaggagccaagagcccgggcgacggcgcagggctggttccttcccacttctgcccagtcacttccccaccctctgaggaccctggagaaattcagccagggcctgggcctctaggagctgccaagcctccctctcttaagcaaagcgagcttagggttcacagggccagagcaagagggtgacacaacccgcccagggtgcctgccttctctaagcatctgacacagctcagggacctgctgtcctcaggctcattccaggtgggtgccttggccctgggcctcagaccagcctcccctcagagctctatctggacccttgtgatggatgccattacttgtctgacatgtccccaaaggagcccgcagatcccactgccaacgccagtaccagtgcacggcccaggattggccctgctgcttactactcctgagcccctgcaagtgagttctgctctctgggcctcagtttcctcctgtctacaacagggtcgctagtagtgcctgtggcagtagggttgctgttcagacacccaggctgtgaaaagttcctggaagggaccccaccctacagaaagcactcagtaccaaagaaagcctcatgggtgtaaatgaatctgctccactctgcaaagaaaaagagcacctctcccccacatgcattcctacggggcttgcagccctggtgccctcactggctgccattgagagcctgtgctctgcaccgcccgccaggtgtgccagggtgacgtgactccacaccaagcactgggggctggacttgtttagccatttctctcaagatggccatttctacactttcatgagaaggaggcctcgcctccgttggagtggctgagtggtgcatccagctggttcctgggactggggacaggttttagtgctccgagaatctgggttgttgtttttttttttatggagttttgctcttgttgcccgggctggagtgcagtgacgcgatctcggctcaccgcaacccccacctcccaggttcaagtgattctcctgcctcagcctcccgagtagccgggattacaggcatgtgccaccatgctgggctaattttgtatttttagtagagatggggtttctccatgttggtcaggctggtctccaactcctgacctcaggtgatctgcccacctcggcctcccaaagtgctgggattacaggcatgagctaccacacccggctgtatctggatgttttatgcatccctttacacagtgtgtgtgtgtgtgtgtgtgtgtgtgtgtacatcttcagctgatccttcaaagtctgtgggttttattgtcatcccctttttatagattaggaagctgctgctcagacggattaaatcatttggcccaggtcatatggctaaggggcgcttggtgtcccgcacttctggagatacaattaacatatggtaaaaattccgactttctgtggccattctgagagctttggcaaatgtatgtggtttccatcagcttggtccagtgatcaccaccacaatcaatatggagatggtttctatcagctcaaaaactcactgcacctctttgtcagataagctgctcggcgtactccagcctctgggaatgaatggcctgttttcagtccctatagcattgccttttccagaatgtcatataaatgaaatcatacaggatgtggccttttgagtctggcttctttcgccagacataatgatcctgagatttatccatgtagttgcatgtatcagtacttccttcctttttatgggtgagtggtgttccatggtgtggatatacagcaatttgtttaaccattcacctattgaaggatgtctgggctgtttccagttgacattacatgccaaggactctacacatttgcatacaggttttggtgtcatcatacatttttatttctcttgggaaaatatatagaggtaagattgccaggtcgtatagtaaatctgtttaacttaatgagaaactacccaactgtgttccaaagagactactactttgcattcccatcaggaatatataagagttttagttggctgggcactgtggctcatgcctgtaattccaacactttgggaggccaaggtgagaggattgcttgaggccaggagtttgagaccctccaaacctcaacatggtgagacccccatcttttttttttttttttgagtcagttttgctcttgttacccaggctggaacgcaatggtgcaatctcagctcaccgcaacctccacctcccaggttcaagtgattctcctgcctcagcctcaggagtagctgggattacaggcatgtgccaccacacccagctgattttgtatttttagtagagtccgggtttctccatgttggtcaggctggtcccgaactcccaacctcaggtgatccacctgccttggcctcccaaagtgctgggattacaggcatgagccacggcacccggccaagacccccatctttacaatttttttttaattagctggaggtgggcgcaatagctcatgctgtaatcctagcattttgggaggccaaggtgggtggattgcctgagctcaggagttcgagaccagcctgggcaacatggcaaaacccgtctctactaaaaatataaaaaattagccgggtgtggtggcaggcacctgtagtcccagctacttgggaggctgaggcatgagaattgcttgaacccggaaggcagagattgcagtgagccgagatcacgccactgagctccagcctggacgacagagactctgtctcgatcaatcaatcaatcaatcaatcaatctataagctgagtgtggtggttagtgcacacctgtagtcccagctacttgggaagctgaggcgagaggatcatttgaggtcaggagttcgaggctgcagtgagctatgatcgcgccactgcgttccagcctggatgacagagtgatactatatctcttaaaaaaaaaaaaaaagttttagttgctccacatccttgccagcatttagtattgttgtttttaaagctattctaataggtacatagtatttcatcaagattttggtttccatttccctaatgactgatgttttttcatgtacttgcttatatgccatctgtatgtttactttagtggggtgtccaaatttctgtggtctgtttttcatttttgttttgttttgtttttgaggcagggtcctactctgttacccaggctggagtgcagtggtgtgaccaccagctcactgcagccttgacctcctgggctcaagcaatcctctagtctcagcctttcgagtagctgagaccacaggcatgcaccaccacacccagctaattttttatttattttttcttttttttgtagagatagggtctccctatgttgcccaggctggtctccaactcctgggctaaagtgatcctcctgtcccagccttgtttgttttttcttttctttttttggctttcacatttaattgacacaggataattgtacatgtttatgggatacagtgcaatgttttgacacatgtatacattgtgtaatgatcaaatcacagtatttagcatatttagcacctcacacatataccatttctttgaggtgaaaacatttaaaatcctctcttttagctatttcgaaatatagaatacaatattgttaaccatagtctccctagtatgctatcaaacactagaaattattccttttatctaactgtatttttatactcattaaccaacccctcttcatcctccctctccaggttctggtaaccactattctactctctacgtctatgagatcaacttcttaagattccacatatggatgagatcatgcagtgtttgtctttctgtgccaggcttatttcacttaacaaaatgtcctctaggtaggttcatccatgttgctacaaatggcaggatttcattcttttttatgactgaagagtattccattgtgtatatgtaccacattttctttatacattcatctgctgatgaacacttaggttgattctatgtcttggctattgtgaatagtgctgcaataaacatgggagtgcagatataatgatttcgtttgctttggatgtatatattcagtagtaggattgctgaatcatatggtagttctatttttaattttttgaggaacttccaaaatgttttccataatggctgtactaatttacattcctaccaaaagtgtatgagattccccctttctccacatttatgccagcttttgttattttttgcctctttgattagccattctaattggggtaaggtgatatctcattgtggttttgacttgcatttccctgatgattagtgatgttgagcatttttaaaatgtacttgttgaccatttgtatgctgtcttttgagaaatgtctattcaggttttttgcccactttttaatcagattatttgttttcttgctactgagttatttgagttccttatacattctggatattaagcccttgtcagatacacagtttgcaaatattttctcctattctgcagcttgtcttttcactctgtttattgtttcctttgctgtgcagaagctttttaaatttgatgtaatcccatttgtctattgttccttttgttgcctatgcttttgaggtattatttttaaaaaatccttacccagaccaatatcatgaagcatttcccctatattttcttgtagttgtgtgtgtgtgtgtgtgtgtgtgtgtgtgtctgtgtgtgtgtctgtgtgtgtggtgtttctttttttttcttttttttttgttttctgagatggagtttcgctcttcttgaccaggctgcaatgcagtggtgcaatctcagctcactgcaacctctgcctcctgggttcaagctattcttctgcctcagcgtcccaagtagccaggactacaggtgtccgccaccacgcctggttaacttttgtgtttttggtagagaaggggtttcaccatgttgtccaggctggtctcaaactcctgacctcgggtgatccacccgcctcagcctcccaaagtgctgggattacaggcgtgagccaccgcacctggcctcttctagtagttttattgtttcagttcttacatataagaatatttaatccattttgtttttttgtatggtgagagataggctctaatttcattgttatgcatgtagatgtccagttttcccagcaaaacttactgaaaagactgccctttccccagtgtgtattattgttgcctttgttgaaaattggttccctgtaagtacacagatttatttctgtgttctctattctgttccattcgtctatatgtctgtgtttatggtggtgccatgctgttttgattattatagctttgttgtatattttgaaggtaggtaatgtgatggaccctctggctttattcattttactcaaaattgatttcactattcagagtcttttatggttccatatgaatttcctgattgttttatctgtttctatgaacaatgttattggtattttgatacaggttgcatcaaacctatagattgatttgggtaatgtgaacattttaacaatatcaattcttccaatccatgaatatgggatatcttttcatttatttgtgtcctcttccatttcttatatcaatttttttatagttttcattgtagaactctgtgacctctttgcttaaatttattactaggtaccttagttttttggtagctatggtaaatggggttgtttcttgatttctttttcagataattcactattggcatataaaaaaacctcctgatttttatttcctacaactttactgaattcatttattagttctaatgggtcttttttggtggagtctttagggttttctttatataagatcatgtcatctgcaaacagggatgttatggtttggatatttgacccctccaaagctcatattgaaatttgatatccactgttggagatgggacctaatgggaggtgtttgggtcatgcaggcagatccctcatgaatgacttggtgtcatcctcgcagtaatgagggaattcgtgttctattagttcccacgatagcttgttcaaaagagcctggcacattccctcacacctctctcttgcctcctctctcatcaagtgatctctgcacacactggctctctttcctcttccaccatgagtggaaaaagcttgaggccctcactagatgcagatgctgacactaagctttttgtacagcctgtagagccatgagctaaataaatctcttttctttacaagttacctagcctcaggtattcctttatagcaatacaaatagactaagacaggaacaatgtgagtttgtattttccaacttggttgccctttatttctttctcttgcctaattgcactagctaaaacttccagtactgttttgaataaaagtggtaaaagagggcatcattgtcttattccagatcttagaagaaaagcatttaattttttccagttcaatatgatgttagctgtgtgtttgtcatatatgacctttattgtgttgaggtacatttcctgtatatctgatttttaaagagttgtatgatgaagggatgtcaaattttatcaaatgctttttctgtgtctactgaagtgattatatagtttttgtccttgattatgttaatgtgatgtatcatgcttattgacttgcatatgttgaaccatccttgcatccctgggatgagtaccacttgatcatggttaatgatctctttaatgtactgttgaattcagtttgctagtattttgttgaggacttttgcatctgttttcatcatgtagattggcctgcagttttcttttctgtgtgagtgtgttcttttctggttttggtatcagggtaatgccagcctcacagaatgagtttggaagaattccctcttaattttttggaatcgtttggaaaacattggtaatagttatttaaatatttggtagaactcagcaatgaagtcatcaggtcctggacttttctttgataggagattttattattaatttaactcattactcattattcatttgttccaattttctatttcttcataattcaattttattaggttgtatgtgttcagaaatttttccatttcctctaagttttccaatttgttgccatatagttgttcataatagtctcttatgatcctttgtatttctgtggtatcacctataatgttgccttttcatctctgattttttttaaatttgagttttctctctttgttccttaggtagtctagagaacagtttgttgatttttttgtatcaatatatcaacaaaacaaagaaaaccaacctttattttgttgatatattgtattgggttttggtctctattttgtttattcctgctctcatctctattttttattgctatctactaattctgggtttagcttgttcttgtttttctagttccctgaagtgcaatgttaaatttttttatttgagatctttctacttttttgatataggcatttattgctataaacttctctcttagaacttgtattccataggttgtggtatgttatgtttccatttttaatttgtcccaagaattttgtcattgatccattggtaattcatgggcgtgttgtttaattttcatgtattcatatggcttccaaagtttctcctgttattgatttttagttttattccattatgatcagaaaagatacatgatattatttttatttaaaaaaactttttgagacttgttttgtgacctaagtaacatatggcctatcttggagaaagtgccatgtgctgtagagaagaatgtatattctgcagctgctggataaaatgttctgtaaatgttttttaggtccatttgatctagagtttagtttaaatataatgtttctatgttgattttcagtctggatgatctgttcattgctgaatgtggggctggatattggagtctcctactattattgtattgcaatctatctcttccttcagaagttagatataataatattgctctctctctctctctctctctctctctctctctctctctatatatatatatatatatatatatatatatatatatatatatatttgcttaatatatctgggtgccccaatgttgggtgcatgtgtatttataaacattatatcctgtgatgaattgaccactttattattatatagcgagtgtctttttctctttttacagcttttgatttaaagtctgttttatctgatataagtatggctactcctgcactcttttattttccatttgcatggaatatcattttccatctgcatggaatatcattttccatccctttactttcagtttattagtgtccttacaggtgaactgaatctcttgtaggcagcacatagtcaagttgtgttttcttatccattcagccactctgtatcttttacctgggaaacttaatccatttacattgaatttattccataagttggtggaataaatctatcaatttattattgataggtaaggacttactcctgccatttttaagtgttttttggctcttttgtacatcctgtgttcctttctttctctcttattgtttacctttgaggtttggtgattttctataatagtaagctttgattcctttctctttttcatttgtgtatctgctatagttttttcctttgtagttactacggggtttacattaacaatcttagagttatagtatactattttaagttgataataacttatctttggctacatttaaatattccagacttttaccctaaccactcccccatttttaattttgttgcttaatttatatctttttatattttgtgttccttagcaacttattttagcatagttattgttgatcattttgacttttaaccttctgctgtagtttggatatgtttgtccctcaaacctcatgctgaaatttgatccccaatgttggaagtaggacctaatgggaggtgtttgtatcatgggggtggatccttcatgaaaggtttggttctgttctcatggtaatgaatgcgttcttgctctgttagtttctgtgagagttcccccaagagctcattgtttaaaatagcctggcacctttgctctctctcttgcatttatttatcaccaagtgatctttgcacattcctgcttccattttccttcctgccatgagtggaagcagcctgtagccctcaccagaagcagatggtgatgccatgcttctaatacagcctgtagaaccatgagctaaataaacctcttttctttataagctacccagcctcaggtattcctttatagcaacacaaaaatggactaaggcaccttcatactagaggtttgaaaaagtatgtatcatcattacagtaatatagtattctgaatttgataacaaatttatctgcacccgtgagattatgctttcatatgtttcacaatagtaattattgttcctttacttctggttgaagtactcccttaagtatttcttgtgaggttggtctagtggtgatgaataccctcagctttgcttgtctgggacagactatttctccttcatttctgaaagatagttttgttgggcataatattctaggctggcaggttttttttcttccagcactttgaatatattatcccattctctcctggtctgcaaggtttgtgctgagaaatctgctgatagtttaatggggattttcttataatgacttcatgcttttatcttgcaccttttaaaattctctctgtctctgacttttgacagtttaattataatgttccttggagaggacctctttgggttgaacctgtttgaggtcttttgagcttcatggatctagatgtccatatctctatcaagacttggacaattttcaactattattttgttaaataagatttctgtgccttttaccaactgttagtcctctgaaaacctcataatgaagatatttgtcagcttaattgtgtcccacaagtcctataagctttgtttactctttttgattctgttttctcttttgtactgtgggttatttcaaaagacatgtctttaagtttagaaattcttatttctacttgatctagtctgctgctgatgttctcaattacatttttaattttattcattgaattcttcagctgtaagactttgtttggttctttttttatatacatctatctctttgttgaatttctcattcagatcatgatttgttttcctgatttcattgaattctttacccatgttctcttttacctcactgagttcccttaagataattatattgagctttttccaggcaatttgtaaatttctatttctttggggtcagttagtggagaggtattgtttctctgatggtgtcatatttctttgttgtttttttttcatgtttgttgtgttcctgcatagatagctgtacatctggtggaatggtcacctctcccaattttatagggtggctttcatagggaaagactttcatcttcagatatgtcctagagtatacgttgggtagggtgcattggctttggttccaggtaggcacagtagtaatctctatgaagtttcttttgctgtatcaatatcagtgatgcctgtgagtacctcagtggcctaggctgctagagtttgtgtggctgatccaccccacttgggtgctgctcctgtggaagtggggcaccagactagtttgcatgctgagggagtatttcaagagttctttatatattctagatacaagtcatttatcattatgtgatttgcaaatattgtctttgagtctatagcttatcatcttattctcattttattcccttaatgttgtgtctttcaaagaataggtgttcttaattttgatgaagtaaaatggatcaatttgttcatttatgaattgtgtttttggtgtcatatctaagcaatctttgcctcattcaagatcacaaacattttctatcctttttctagttttataattttatattatgtctatgatctgctttgcattaacatttgtatacggtgcaaggtatagattaagaagtgtttttctttttaatgtatgggtatacaaattttcagtaccatttattgaaatgactgtcctttttccattgaattgcctttgcacttttgttgaaaatcaattggtcatatatgtgtgattctgtttctagactagttcattgataactacccctttgccaattctatactaccttgattactgtattattatggtaagtcttgaaatcacgtagaatgtcttccaacttcattctttttcaaaaattgctttggaaattctgcttcctttgcattttcatataaaatttagaattagtttgttcacttctaaaaaaaaaaatccttctgggaatttaatcggaactgcattgaatctatagatcagtttggggagaattaacgtaactattgggtcttcacatcaacatggtatgtttctccatttatttaggtctcctttgatttctttcattagtgctctctagttttcagcatccagatcttaaacatatttagtttgattcattattaacttttttgttgctatcataaatgatactgttttttcctcatttccaattttacattgctgttatataaaaatgcagtttatttttggttgttgtatattgacctgagcttaggtctttatggctccacatccagctctatgcttcccactccccaccctctaggctgtttccttagcagcaggagcagccctgggaactaggttactatgttatgatccccatgcctgactctgagtcaccttaaaggagtgagtcaccagcctctcttgcagtagttttcctctccctaaagcaaggattaaaccacttgctctcttattgctcccaggaatgttaaagatgagtgactaaggcagcaagggtgtcagcactctgacatgaatagtttgacgtaattgagacctggtagttttgtgggttttttcctaatccaggtgttattgtcaattacatgttgggaaaaagagataaaggtgggatgagtcaggagacagctgctcacactctgtaggtctccagcggctttcctccaccctctcacacagcctcagaagacccctggtcctcccttgttttgcctactctcccaacccaaaagtacctctttctcccctcacctttctattttaaccatctgagagatccagcttgagccttccctcctcaccttcttctgctgcatgacattacccagcacctgtcaatctccctgaggccatgataggcagcactgtcccccagcttggggttagatatctgtcccatcgcccaaaaatatgaacgtgaggagggcatcttttctgtggcctgtcatagggcccattatatgctgcagtcgtgatgggggcttaacaaataagtaagtaaagccacgctatgctcagggtctgcagcttttccttcccctcctttctttgtggtttgcagttgtcttgggagggccttctgtctgggtttgacagtgaacatgagtaaagtgagcaggggctttggcaagaagagtggtgagcagaagctggtggagacttgggggctgcacaggacctaacttttgaaactgaaagcaaagtcaagtctaaaatacatcacattaaccctcttttggtctgtctgtctctttctcagacagtgtccctgctgagagtaagaagtgttctcaaagccttttccacagcaggaatggggcacgcgggactcgcatccattcattcacaaaatggtacctggtacagagtaagggattagagaatattgtttgaataaatgaacaaatgattctgccttatgtgccaggcactgtgctagctctttgggacactaagatgaatagaaaatgatattaatcacccaggcgcggtggctcacgcctataatcccagcaccttgggaggcctaggtggggggatcagctgaggtcaggagttcgagaccagcctgcccaacatggcaaaaccccgtctctactaaaaatacaaaaaattagccaggcgtgatgacgggtgcctgtaatcccagctactcgagaggctgagacaggagaatcgcttgaacccaggaggcggaggttgaaccaggatcgtaccactgcactccagcctgggcaacaagaatgaaactccatctcaaaaaaaagaaagaaaatgatattaatccccaagcagctcatggcctagtgagggaggcagatacaaacatataaataacactctgtggggaatcccagtgagagagatctctttaagtgtatgtagcgagatcagagagcggaaagtacctcctggaagatgtaacactaggctttcaagaatgagtaggagctggtcaggtgttagtgaaggggtgaaggggaagaggcacagggacaacctgagtgtggggatggggagcagcatggtgctttggtggtgctaccggcaaaggtgagtagtctgtggtgttccctctgaagccgaggaccaccaccagccctatggctgcagggtcagcactgcacctgggaccatctagaacctggttgatctggcatgggaagaagttgttgagtgataacaggtgctggcttctgtgctgaggcttccagaggtcctcagtgaatcctcaccgcaaccccccaagggacgtaccaggactagtcattttacaagtgaggaaatgggtgcagggaggcaaaggagcttccccaaggtctctggcttctcagtggcagagtccgggcccctgacccctgcgggatcctacctgcctagagtgctcctggagagcagcggggagggatgctgtttactgaacaccttttgtggcttggtgctgggctgggcagcagatatctgtgatctcattttattctcacaaatatatgggtgggtggttttatctgcattttacaagggaggacactgccccatccgatgtcacagtttttgactcagagatccccactcccgacaccacccacactcttgtccctccatggcccattggccaacgagctcgccacgctctggacccgtttctgaacctctttctggggttggcgccaactcccggaagatgcctttgtacttgctttttctactcagacctcactctggccactgagcctctccaaaagcctcctccaacacccaacaccctattccgtacaattctatatgcatttgaaatgggcttctgatgtcctctggtgttggtcacccccaagtgtccacgagaaggtgagcccctttgggcagagaccaccttttgtgcgggcttcccgaggagagtggcctgttgccacgcacagagctgatgggaaatgtgagctctggagttgtggggtgacactgtctatgttgtatcgttgctggagaatttgctggcccaggagttttggggaccctctcctcagcttgagctgcaggcccacgtccgtcccctcaccctggctccccaggagtcctgctgagggcttcctataggaagccaagctctgagacatggagccaccctcaccagagccgcctacgggaaaggaagagccagcctcctttcctttggggcagctggaagacaatgtacaacacattttgagaaagtctctgcagaacaagaaaattgacaaatactttcaggtctgtagtcaaaggaatctggagtatgctgcctccttagttcatgactagcagaaaataaaagggtctttttttgtttgttttttggggtttgtttgtttgttttttctgttttttgttttttttagtataacaatgacttatacagttgaggtgaagtgaaaatatcattacaatagaggtgacattaacttgctaccgattgtgcctggtactcattgcaggtaagaggtgagccatgctgttggaggctggtctctgtgggctaagaggtccccgggccttccctcctccctcacttcctgcaggcaagtaggatgcgtcctccatggagtctctgcattttctaactcaataatggagtcagatatcccggtagaggaccaggcttgggggccacaagatgggcctaaaagcgcatcttgaaggcctagtgtcacctcctccaggacttccttggtacttctctctctctgatttcactatatacacttagaaaaaaagcttttcttttctttttttttggtttgtttgctgttgttgttattttgagatagggtctcactctgtcacccaggctggagtgcagtagcacgatcatggctcccttcagccttaacttctcaggctcaagcaatcctcccacttcagcctccagaatagttgatactacaggcatgtgccaccatgcctggctaatttttgtatttttttttagagacaggggatcaccatgttgcccaggctgatcttgaactcctaggctcaagtcatctgcccaccttggcctcccacagtgctgggattacaggtgtaagtcaccatacccggcctgcaacaagctttgatcttgaacatgtgagttatttttaccaggcctcagtttcctgatctgtaaatgggtataacaccacaccgggtggatgtgaggcttccacacactgataggtcaacagcagtgcagtgccctggaggaggaccaagcatgcctcagtgttgaaagagtaactaactaggtgctggctgaggacagcacctccccagctgttgggggacagaagggggcaccgttctcgaagcagctgccctgctgttggggatttgggggattttgctgttgtgagggtgagccctaccgtctgcaccccctgctcgggccccggcactgcagtgggagactcacagaacactctggacagaggttaaatggtgaggaacaggggtccccacaatggcagagctggagcttctgcagcagcatgggctcctggtgcctgtcacttcctgtgataagtaaatcttgtccagtctccagattgctttggctccagaggatgagaagggctatgccaagtgggcaatgtcctgggcatggcagagagggggccatgatatggaccaagaagcatgaaccagcttttacagtatccagcaccaggggtgccccaaaccctagactctgacaaggaaggacgaggctgtttcagagcacagttggcaccacagctaaccagtagtaagtgttcctgaaaggtaggacatgaggccagaagccactatgcagggcagtcctccacgtcttagatgaacaatcgggatagggaagggcctgaaaattctttttatactggacactcggagagtgtctttggtttgacaacaatatccatggctttgccttttctcaccatcttcaattgctcacatgtccatgcaggtgtacacacacatgcacaggcacacacatgcacacaagcacacacggatgtacacacacacacatgcatgcagacacacacgagcacacacacgcacacacatgcacacagagagatgcatacatgtatacacaagcagggcttacgtgtaaaggggactacttcctaaggcccctgggcctgggcggcggctctacccagaagcatttgtgtcctgtcactccccaggtggcccactgctgcccccacagcccccctcccgacaatgggtagagttactcaggcttttcaaaaaacctcacctgagtttctgccagttttctttctgagtgatatttgcataaaccactcctaagacacgcacatccaactgtgagaggggacattctgaggcctcatcagtttcatgtctcagcccccaaccacctgtctcctgggctttggtagagcttggaactaagtgcccgcagcccggcggcacatgcaaccttgcacttagtgcgagagacatcaggcggctgctgaacactgctcgattcattgaaggcaggcggccaagcaggcccttctgagcaggttctggtgccatcgccgctcggccccatgcataggttagtgataatatgctccttcctacccagcctccctgaagcacctgtcgactggcaaggttactaaaagaactgacttggggggctcatggctgctggggtagtaactgcaggggaagatacagaggctattaaagccagggcctttggtgcagcccaggctcggggagggcacaggctgtcttgggggaccacagacaggcacctgcatgcagtgtgtgactggagggtctgggaagggccctgctctgtggggcccctcactcctcactctgaagtctgaagtctcagggctgaggaagaggccacccatggtgagttgggaggagctgagctgccctagagagtggagccaccttgagggagttggttccctgtgttggcctcacctccccacccccaaatgcaaaggacatgggtgggtgttggggggtgactgcaaaggtggtctctaggcccctctggctttaagaatgaaagccctttgatttgcactgagacagcgcgtctccgtccaacgcactggggatgcccgtgccagcctgcaggtctctgccaggcatgttcacgaggtgctgcttggttttagaagggagcctgatgcccaggccaaggtccaggcatggatgtaggtgaccaaggccatcgcagggcattgggggcctggggacagtcccccaggaagggagggagccagggccatcttgcattctatcccatttttaccttggcctaccctgcattcaacgaaggttctcccaagcccactggagaggacttgtttgcttcttagaggagccagaagttctcaacaaacaccaatgcaagcagagagctggccaaagaccctgagtgggagaaaggttggaagcaggcctggcaccggccacgaggcctggtcgtgggtgctctctgtcccgcctgctccgtccaggaggcatctcagggacagagctcatggtggtcctctggcccatgtcaggtgtcatctgaacgaagtggttgcaagtggctcagggggaaatcggagaccagggcccccggcaagcctggcgatggcggggcagacagagactcctgagaatagggaccaagcatgtctgcgttagctttgcatctttgtgctcagcaaggacttggcacagaacagctgctccgcgtgtctgtggagtaagaggtggagcccctgagccttctgcgagcagcggggctggtggggtcccagtcattaggagcagcccctcccctcctccccatgcctcgcctcgctcctgccaggtgtgctgtcttggccaggcctctgctgacctcagctgtctctatgtcctgagccgcttggccacttgtgggagcctcagaggagatgtagggacagggtagggaggaggaagccaccctgggcagcacctctgccctggctggagtctccctgctgagccacagcttcacaggctgctctcgattttggtgatggtgccaggtgggcatgcatggctatcagcttctgggcactgccatctacagtaagccctgggcgccaggcggcctgggtcctcagcctccatagcacgccttgctgggcaagcatcagagccgagaggacaatggtgatcatctagttcatctctctgaattggcaggtggggaaactgaggccccaagtctggcactcattggcagcagggcccacggttccccctcccactcacacaccttcctttgccaccccttggtgcctgtctgctcagcgccagccaggtgttccaacctccctgcccatatgaaagcaacagaggccagaggctgctccagaacactcctcctgtcccagcctcccctggccctcagcagacaacacctaggcgctcctttaagtacctgcctgtggccctctctccaaggtcgtgaccacggcagcctgagagaaggagctacacatggagcccaagggctctgacctcccagcagtgagctgctgagaggctgagaagaaaactgggtccacctactcagggcatgcaggctggacttccgtcatctactagacaatcccagatggagagacagagcggaccaagagggggatggtgggaaagagcacgacctgattgtccgaatacttcttcttggagggaggagagcccactgtcagcccaagatgtccggagacccctggcctccatcagagctggcccttctgtcctgcaggggaggccttccatcctgcccctctggccaccagccactaagcttaccagtcccttagccctacaggctggtcgagagcctggccagtgggaaatgagacccacgccccgcccttgagggcagagtccagcatgaggactcacctgacacttgcaggctcccaagggcttcctgggccatggctggcatttcgtgactatcacctgtcccaggtttgacttcccacttgactgtgctgagccctcccagctgcccacggggtaggagggattgccgtctccacagggaggaacaagggctcagagaagctaattctgcccaaggccaccagctcacacaggacaagagactaggaccccctcatttagctttcaaatgcaaaataaattaatttttttgttctcagagggaaacccccaactcctcacctcatttttctctcctgggcacctcagcaaggtgacacccaagttcttttggaatcggacaaatcattgcagggtctttcaagctcaagggaccctgttgatgggtgggctgaggcctggacctggccaagaacaggaggtcaggagagttactgagcaggaaggagccgggtaccctcagctgttgctttctgccactgcctcaagacagacagcttcgaagggaatgggggccagtaggtttgtgtttcaaagagcaaaggatgtggctggaggcttttctccagttgctctcccctccttgaaggaaagcagtaaggatttgttacagttgattttaaagtgagctgtaaatgcgtaaacttaggttaaggcagaattggaaaaggactagattgggcatttttcactggagtacagcctggacctgggaaatagagacagaatggggaagaaagaaccaaagacgtgggcatgagcccccaaaaactggtggacatggggcccagggcctgcggcagagctgccccctgagctgctgggtgagggtcccacccctcaccgtcacctggctcgagcctctgaatggccagggcccctcccgcctgtcgtcaggagcccacgtgggtgcagagtgacacgtggagcccatctgatggcttttgcgtttgaacaggccagaccacaattcctgattcagcaacatcttcaaagatttgataaccatagaaacaataactctttgcaaaaaaggaaaaggagacaccatcacccaaagagggagaggaggccctggtgaatatttatgaccagaggctacagaattcagaatgtacttatctcagctcaggttgaagaactcgtgacctgagagtccttgagtgtggaccacttgatgacgtccccacagcccatgtagcggggctggaaatacggagccctgaagcttgcaggcgctttaatgccttcaaaatgcagatgctgtggaaaagcagggcgttctgggcccacacggggcgctctgctgggagatacttgctagttgtgtcactaaaggggttgtgggttcccaacgtgcatggagggtgggcgtctgtgtgtgtgtgtgtgtgtgtgtgtgtatgtctgtgtgtatgtgtgtatatgtgtgtatgtctgtgtgtgtatgtgtgtgtatatgtgtttgtgtatgtgtgtgtatgtctgtgtgtgtgtgtgcacccacatccatgcacgttttagtgtcttttttggagaagcaaatagactccataatatattcgattctcaccacggtcatcctggttttctaagctattatcttgctctgttcctctggataaggagccagctgcttcagaacaggtcctcacactctttccatcactgtggtttggaggggccgcgtcggaccctgggatggcaagttcagtcatttcgaagcctccctggggcatgagcaggggtccccctctttggcgcaatgacagttctagtccccgactgacgcaggatgtttcagcgtcctataagagaccatcctggccaacatggtgaaaccccatgtctactgaaaacacaaaagattagccgggcgtggtgacacggccctgtaatcccagctactcaggaggctgaggcaggagaatcgatagaacctgggaggcggaggttgcagtgagccgagattgcaccactgcactccagcctggtgagactctgcctcaaaaaaaaaaaaaaaaaaaaaaaaaaaggaattagtatcaagttaaataactttctttttttttaagccatgattcagaagaccgaggacacccttgctggcagctgatctttgaagaagtaccagctcagagagagactcttggcccatgtcaggactcaacaaatgtggctgaatgaacgaatgaatgattgtgatgggataaagccagcttttcctttttttattttattttattattattatactttaagttttagggtacatgtgcacaatgtgcaggtttgttacatatgtatacatgggccatgttggtgtactgcaaccattaactcgtcatttagcattaggtatatctcctaatgctatccctcccccctccccccaccccacaacagtcctcggagtgtgatgttccccttcctgtgtccatgtgttctcattgttcaattcccacctatgagtgagaacatgcggtgtttggttttttgtccttgccatagtttgctgagaatgatgatttccagtttcatccatgtccctgcaaaggacatgaactcatcattttttatggctgcatagtattccatggggtatatgtgccacattttcttactccagtctatcgttgttggacatttgggttggttccaagtctttgctatcgtgaatagtgctgcaataaacatacgtgtgcgtgtgtctttatagcagcatgatttatagtcctttgggtatatacccagtaatgggatggctgggtcaaatggtatttctagttctagatccctgaggaatcgccacactgacttccacaatggttgaactagtttacagtcccaccaacagtgtaaaagtgttcctatttctccacatcctctccagcacctgttgtttcctgactttttaatgatcgccattctaactggtgtgagatggtatctcattgtggttttgatttgcatttctctggtggccagtgatggtgagcattgtttcatgtgttttttggctgcataaatatcttcttttgagaagtgtctgttcatatccttcgcccactttttgatggggttgtttttttcttgtaaatttgtttgagttcattgtagattctggttattagccctttgtcagatgagtaggttgcgaaaattttctcccattttgtaggttgcctgttcactctgatggtagtttcttttgctgtgcagaaactctttagtttaatgagatcccatttgtcaattttggcttttgttgccattgcttttggtgttttagacatgaagtccttgcccatgcctatgtcctgaatggtattgcctaggttttcttctagggtttttatgcttttaggtctaacatgtaagtctttaatccatcttgaattaatttttgtttaaggtgtaaggaagggatccagtttcagctttctacatatggctagccagttttcccagcaccatttattaaatagggaatcctttccccattgcttgtttttctcaggtttgtcaaagatcagatagttgtagacatgcagcattatttctgagggctctgttctgttccattgatctatatctctgttttggtaccagtaccatgctgttttggttactgtagccttgtagtatagtttgaagtcaggtagtgtgatgcctccgcctttgttcttttggcttaagattgacttggtgatgcgggctcttttttggttccatatgaactttaaagtagttttttccaattctgtgaagaaagccattggtagcttgatggggatggcattgaatctataaattaccttgggcagtatggccattttcacgatattgattcttccaacccatgagcatggaatgttcttccatttgtttgtatcctcttttatttcattgagcagtggtttgtagttctccttgaagaggtccttcatgtcccttgtaagttggattcctaggtattttattctccttgaagcaattgtgaatgggagttcattcatgatttggctctctgtttgtctgttattggtgtataagaatgcttgtgatttttgcacattgattttgtatcctgagactttgctgaagttgcttatcagcttaaggagattttgggctgagacaatggggttttctagatatacaatcatgtcatctgcaaacaaggacaatttgacttcctcttttcctaattgaataccctttatttccttctcctgcctaattgccctggccagaacttccaacactaggttgaataggagtggtgagagagggcatccctgtcttgtgccagttttcaaagggaatgcttccagtttttgcccattcagtatgatattggctgtgggtttgtcatagataactcttatgattttgacgtacatcccatcaatacctaatttattgagagcttttagcatgaagggttgttgaattttgtcaaaggccttttctgcatctattgagataatcatgtggtttttgtctttggttctgtttatatgctggattacatttattgatttgggtatgttgaaccagccttgcatcccagggatgaagcccacttgatcatggtggataagctttttgatgtgctgctggattcggtttgccagtgttttattgaggatttttgcatcaatgttcatcaaggatattggtctaaaattctctttttttggttgtatctctgccaggctttggtatcaggatgatgctggcctcataaaatgagttagggaggattccctctttttctattgattggaatagtttcagaaggaatggtaccagctcctccttgtacctctggtagaattcggctgtgaatccatctggtcctggactctttttggttggtaagctattgattattgccacaatttcagagcctgttattggtctattcagagattcaacttcttcctggtttagtcttgggagagtgtatgcgtcgaggaatttatccatttcttctagattttctagtttatttgcgtagaggtgtttgtagtattctctgatggtattttgtatttctgtgggatcggtggtgatatcccctttatcattttttattgtgtctgtttgattcttctctcttttcttctttattattcttgctagcggtctatcaattttgttgatcttttaaaaaaaccagctcctggattcattaattttttgaagggttttttgtgtctctatttccttcagttctgctctgattttagttatttcttgccttctgctagcttttgaatgtgtttgttcttgcttttctagttcttttaattgtgatgttagggtgtcaattttggatctttcctgctttcttctgtgggcatttagtgctataaatttccctctacacactgctttgaatgtgtcccagagattctggtatgttgtgtctttgttctcattggtttcaaagaacatctttatttctgccttcatttcgttatgtacccagtagtcattcaggagcaggttgttcagtttccatgtagttgagcagttttgagtgagtttctgaatcctgagttctagtttgattgcactgtggtctgagagacagtttgttataatttctgttcttttacatttgctgaggagtgctttacttccaactatgtggtcaattttggaataggtgtggtgtggtgctgaaaaaaatgtatattctgttgatttggggtggagagctctgtagacatctattaggtctgcttggtgcagagctgagttcaattcctgggtatccttgttaactttctgtctcgttgatctttctaatgttgacagtggggtgttaaattctcccattattattgtgtgggagtctaagtctctttgtaggtcactcaggacttgctttatgaatctgggtgctcctgtattgggtgcatatatatttaggatagttagctcttcttgttgaattgattcctttaccattatgtaatggccttctttgtctcttttgatctttgttggtttaaagtctgttttatcagagactaggattgcaacccctgcctttttttgttttccatttgcttggtagatcttcctccatccctttattttgagcctatgtgtgtttctgcacatgagatgggtttcctgaatacagcacactgatgggtcttgactctttatccaatttgccagtctgtgtcttttaattggagcatttagcccatttacatttaaagttaatattattatgtgtgaatttgatcctgtcattatgatgttagctggttattttgctcattagttgatgcagtttcttcctagccttgatggtctttacaatttggcatgtttttgcagtggctggtactggttgttcctttccatgtttagtgcttccttcaggagctcttttagggcaggcctggcggtgacaaaatctctcagcgtttgcttgtctgtaaagtactttatttctccttcacttatgaagcttagtttggctggatatgaaattctgggttgaaaattcttttttttaagaatgttgaatattggcccccactctcttctggcttgtagagtttctgctgagagatccgctgttagtctgatgggcttccctttgtgggtaacccgacctttctctctggctgcccttaatattttttccttcatttcaactttggtgaatctgacaattatgtgtcttggagttgctcttctcgaggagtatctttgtggcattctctgtatttcctgaatctgaatgttggcctgccttgctagtttggggaagttctcctggataatatcctgcagagtgttttccaacttggttccattctccccgtcactttcaggcacaccaatcagacgtagatttggtcttttcacatagtcttatatttcttggagacttttttcgtttctttttattcttttttctctaaacttctcttctcgcttcatttcattcatttgatcttccatcactgataccctttcttccagttgattgcattggctcctgaggcttttgcattcttcacgtagttctcgagccttggctttcagctccatcagctccattaagcacttctctgcattggttattctagttatacattcatctaattttttttcaaagtttttaacttctttgccattggtttgaatttcctcctgtagctcggagtagtttgattgtctgaagacttcttctctcaactcgtcaaagtcattctccgtccagctttgttccattgctgatgagtaactatgttcctttggaggaggagaggtgctctgctttttagagtttcagcttttctgctctgttttttccccatctttgtggttttatctacttttggtctttgatgatggtgatgtacagatgggtttttggtgtggatgtcctttctgtttgttagttttccttctaacagacaggaccctcagctgcaggtctgtcggagtttgctagaggtccactccagatcctgtttgcctgggtatcagcagcagtggctgcagaacagcggtggctgtagaacagcagattttcgtgaaccgcaaatgctgctgcctgatcgttcctctggaagttttgtctcagaggagtacccggccgtgtgaggtgtcagtctgcccctactggggggtgcctcccagttaggctgctcaggggtcagggacccacttgaggaggcagtctgcccgttctcagatctccagctgcgtgctgggagaaccactactctcttcaaagctgtcagacagggacgtttaagtctgcagaggttactgctatctttttgtttgtctgtgccctgcccccagaggtggagtctacagaggcaggcaggccctcttgagctgtggtgggctccacccagttcgagcttcccggctgctttgtttacctaagcaagcctgggcaatggcaggcgcccatcccccagccttgtgccgccttgcagtttgatctcagactgctgtgctagcaatcagcgagactccatgggcgtaggaccctctgagccaggtgtgggatataatctcctggtgtgctgttttttaagccctttggaaaagtgcagtatttagggtgggagtgacccaattttccaggtgccgtctgtcacccctttctttgactaggaaagggaactccctgaccccttgtacttcccgagtgaggcaatgcctcgctgtgcttcggctcacacacagtgtgccgcacccactgtcctgcacccaccgtccggcactccctagtgagatgagcctggtacctcagatagaaatgcagaaatcacccgtcttctgtgtcgctcacgctgggagctatagacccgagctgttcctatttggccatcttagctccacctaaagccagcttttcgccatgattttaaaaagcaagtctgaagacccaggcccttcctcctgtgccaagcatcaggaccctcacctccttggccattcctcagctagtcttgggtaccttggtgtggtcgattgcccccttctcttggtttccaagacaccaccttctcccagctttcctcctaccccttggtttctctatttcaggatcttttctccccgctctgggattccagagtccacttcctggtcctctttctgctcttcaacacttctttttgttgttgttgttgagatggagtcttactttgtcacctgagctggagtgcagtggtgcaatctcggctcactgcaacctccacctcccaggttcaagtgattcttctgcctcagcctcccaaatagctgggattacaggtgcccaccaccaatgtgcctgactaatttttgtatttttagtagagacaggatttcgccatgttgcccaggcttgtcttgaactcttgacctcaggtggtccgcccaccttggcctcccaaagtgcttggattacaggcatgagccaccgtgcctggcttctcaacacttcctgatgacctcctcttgtccccaggacctgaaaggctatctctgtgccagtggccccagatgcggatccctagcccagggccttgtgttgaatttcacatttgctgatccacctgtccactccacatcgccacttggctgtccaacaagtgtctcaaatatcaggagcccaaagctgagcccctgaacttcccctcctgagtcccacttcactgcagcctgcccatcttggtcagcggcaaccctgtccttccaagctctctgggcaagcacgttggagcatcctggacgctgctctcctgcccacctccaccccactcagtgcagcctgttggctctgcccttgcatgctgccgggacccgaatctggaccaccatagccacctccaccccaggcgcttctggccattatcaacactgcagccagagggatcttcagacacaggtcagatcaggtcactgcccgccagaaaccctgcagcagctcctgcctcactcaaattaaaagcccagtcactgcggcctctgtattcctaacctcagagctccaccttccatcccatgttgtctgtgtagacaggtggctgagcactcctcattcatgcagcactttcttcccttcccgaacttcttcttctttttatttttatttatgtatttatttgagacgaagttttgctcttgttgcccaggctggaatgcagggcacgatctcggctcactgcaacctccacctcctgggtttaaatgattcttctgcctcagcctcccaagtagctgggattacaggcatctgccaccattcctggctaattttttgtatttttagtagagatagagtttcatcatgttggccaggctggtctcgaacttctgaactcaaatgatctgcccacctcggcctcccaaagtgctgggattacaggcgtgagccaccatgcccagccccaatctccttgactcatgacttttggggatcccagggctcccttcctgggccacctctctgtctgcacacaatccctaggtgagctcactcagtctcgtggttctaaacaccacaaggcacatttaagctgatgcttcccaaactgattccctgggcctggcctctgcccctgaagtctagactcagactcctaagtgtcgactcatcctcctgacctggacgtttgcatttcaaactgaccacggccacatggagcccacaccccaccaccacccagcagcctcctcctgtcatcccacctgaaccaggacatggcagttttcaccttccagccattcagccaaaatcatcagcatcatccatggcccaccccattcttcctctccaccccccacccatcaggagatcctgcgggctcttccttcagagtgctttctgcttctcaccacccctgcagttttgccacgctggaccactccaccatcccgccctccatcctgatcatcataacagctgcatgtttctgccattggcccccgtggtctctttgttacctggagccatcagctaatgtcactttcctgctcagaagccaccaggaggaggctttgcagcttactgagagcaactgccccaaccccagtggggacctccactctgggcccgcacaccctcctgaacccatgctgttctccacgcgtgcccctcctttggccttcacactcacgagcccatccacctggagcacctgcccggtcctgcacacttggccgcctggctcccccacctctcccctctgtctgggtaggctgagttccatcaccccagcggagagacctttccagacctgctgcccagtgccctgctccttgctctgtcttgtttttctccattgcttttcttaccatgtacagtgctgtgtttactcatttgttcgctgtctgtctctccactagagtggagcttcgtggggccacatgtgtttgctgctgtatcctcagtgcctaccacagcaccaggccctggtggcactcaggaaatcatgtctagtgaaggactaagggagtgaataggccagggagggtttcccttccatgtggccctcgtttgctcttcccaccgagcccccaccagcttctccacagagctgcgatgtgtcttggctctgtcaataagtttctgttctatgctcagtctcctggaaatccatgcgtataacctcccagtccaaatattagcaatgccctgagccaaaatcagcatattctttgagcctccaagctggtggagaagcagacagaaccgttcaagtacaaatgtgtctgtgcagcagggcctccacaaagggcacccagccaggggggcagaggggcctcagctgggtcctgaggggcacgttcccagccacaggtgctgacatcatcctggacttgagcctgaagcaccctgaggcacaagctggacattctctgggatcctgagatttgccacaggccacacaccagtgggggcttctcaggggaggcctccctgggatgaaagtcccaactgtctcttgacctgagaaaagcaggtgctgcccttctgtgtcctggctgtcttctggccttcatccaggacatttccagcaccccttggaatagcggctaggtgccccgttcagtagatattggttgaatttcttttttctttctttcttttttttttttttgagttggagtctcactcttgttgcccaggctggagtgcagtggcatgatctcagttcactgcaacctccacctcctggattcaagcaattctcctgcctcagcctcccgagtagctgggattacaggcgcccgccaccacacccagctaatttttgtaatttttagtagagacggggtcttgccatgttggccgggatggtcttgaactcctgacctcagctcatccgcccgtcccggcctcctaaagcactgggattataggtgtgagccactatgcccagcctattggttgaatatttttaaccagataacactggagtggagaggctgaacgtgacgagtgctggattgctctgggacttattagtgaggtcacctggacaagttactgaactctctctgggcctcagtttcttcctgtaggaactggaggtaacaacggcctccccctcttgggctgtgtgaggattagttgatgtgaaatgatcagaatggcacctggcacgcagaggggccttccatgccagcactcactgttgccacctcattggtggtaccaggtgggtccgtgatggaggatgggaagggaaagaccaaggaggcaggaggccgttctcctggggttgggtgtctgtggtcaacagacagaggggaccataccctcctgcaggcccacggggcactggggcatgacccagcagcgctcactccacactggaagcctccctcccctggcaagcgttgctctgtgtggcatctgtgctgtgcatctgcaggtgccctctcggtgcgccgtggctgggggagtggaggagggcatggatctccagcattcctcatcacctcttccagctcctggagatatttacaatcagcccagggagaaaagtgccacatgtcagaaaccatgagaacataaagcagggctgactggcaggagggtctgaaggggcagagtgggagctggacagggcagattgggccctcccctgtgcaggggcctgtgctgtgggtcgtacatgcaggcgtggtctctgttttcaagatgcctggtttccagctgtgggtcctggtgcccatgctaggagctgaagggagacagtgagtgatgcaagaggctcagaggaaaggccgggggcttccatccagggcctggtggatcctcctgctgggggtgggtgagaggggcttcaggaccagggaagccaccctggaggagacagcagatcccggcttccacggacaggcgagaggacatagcaggaaaaagggcacatgtgggcaggaagagggttgacaacaccaatggccagaccccctctgtgctggggggatctgtgctgtgctgctgcccatcacagcagcctagcagagatgggatgccatgaggatgatacatcttttagacaatggactacaaatattgaaaatgaggattttaatatccctcttttacagacagggaaagtggaggtcagagaggttaagaccaaggccaagcagcccacagccaatggggccaggctgtgaacgctgcctgtcaaccctagggccctcacacccactccataggcagcttcccacatggggctggcacatgccacctggacacagggctccctgcagtccccacacccccctacattggggtctgcaagcaccaagtggagggcatgctttccattggctcttagagactggcccgtggatgcgaggggccctttgcaaacctttgatggatttgtatttgaaactgcaatgaacacctttcccaggttgccctgcaagatgcattttcagagcatagattaatggcagtgccatttaagtgttttgaaaatgttttctccattaatctcaatcaggagccgattactaccaataaggctcatgaagacagcatgagttagatggagtctcagggcaaaagagccccagggcgaggcagccctcacagccccaggtgggggcctggccccgggccaagccttcctcaatggtttagaagcagtgcacagggccaggcgtggtggctcaggcctgtaagcccagcactttgggaggccgaggcaggtggatcaccagaggtcaggagctcgagactagcctggccaacatagcgaaaccgcgtctctactaaaactacaaaattagcagggcttggtggtgggtgcctgtaatcccagctacttgggaggctgaggcaggagaatcgcttgaacccggaggcagaggttgcagtgagccaagattgtgccactgcactccagcctgggtgacaagagcaaaactccatctcaaaaaaaaaaaaaaaaaaaaagaaccagcacacagataatgcctgctgcctgcctgtacccagcctccccccgccgggtgtcattacctcattctctattgttctacttaggtgagatgcaactacatattcaattttatatcctgcttttgtcaatgaacatgaattccacaagggtcaaactgtgtaatctctctgatcagtttttcttaccaataaaatgcgcaacgacttcccttgcttacctcccagggccatcactgggtcagctgtgatgagcgaaggaggatgtcgtatggccgagtgtttgtgctgttaggattttgcacctgctcttttttcattcattcattaggcaaataaatatttaacataccagatggaaaataaagcaaggtacggggcgagaggacagagaggggagggactctgaatgctgcttacacctttatcaaccaggcggccaactctttgcccaaatgtcacctctttctggctttagggagcactgtgagctatttggaagcccttgccgtctgccccagcaccatgcggcacctttcttggggtgaggtgcttggtgggcacctgatgggggcagaaggataagcccacgtcagccttcctctcaccaccgtccccacgtgggctctgtgcttgtggctgtcttctctcgggcatctctttcctaccttcagggaggctgcccctcaggtgcagccattgcatacaggcagctgcttctctctggtaccaacatggagcattttgcagtcatttatcacataaacatcaatagacattttttaaaagaaaccaaattagaggtcctccccaacccacttcctctgctctacaaattaaattgctttgatttttcttattctctgccagatcttggaaatatcattttgtattgcgtgtcacagtgaggggcctttcatgaagcagcattcctgttttggccacgctgggaggatgagggggggtgggggtgggggacagctagggatttgcctgcctgagaggggatccacatggtgactcccatcccacttgctgcatgggagcaaacagggcagccacgtcctggcctgaaactaagcctgttggtgcagctgacacgttgtaagaaagcaggccgctgtggatggcactttctcatgggctaaaccctctccttccttcctctcagtctctggctacagttgagtcatgctccaggctcctgggaggtgaaaggtggcttcagagaccctggaacgtggcccaaagctgtcatgttgcagctcggataaggtgaaatgggtccttggccaagttcaacagtctgggcctgcagtggggaagccatccctgtccctaaaaaccgctccactctgacataaagataataatgtgtgggtttgtcatggtggcgctcatcctcccagaacgctgtcttctagccagcagttgaggggacaagaagggagtgtccctgcatagggagggagggaggcaggatggacttggcttcacttccaggggggctcggggaatccaatctgtgcccttagacctgagagcactgcttatttacttttgggagaacttgaatgtatctgagaattggaccaaagctgagaacctagtccccataaacaaagtgtacaccggctcactattctcacgtttgtaaggtctcaaagagcccacagaccccaggccaagaggccttgatccaggactgtggggaagacttcctgctctgagaagaggctcagagaaggtgcactgcccaaagctcagggaagacagagcgaggcttgcaggtggcccttccatggtgccctgaggagaggccgcacagttccctgggggccagcggggctcttggcattatggtctgggtgctcaggtggcacctagaccctgggaaagaggccctggcagtcccctagcccatgtcagtcatcctctgtgaatggcgatgggggcaggaaggacagtcctctaggagtttgtctggggtggacgctgcaaggccagggtccttcagagcagcctccatggcagataaagggagagtgtgaatgaggctgccaggtgggaagctatgggtcggggtgtctaaagagccaggcacttcttgctgtcagaggagagtcagagggggcaggagcaatcccccctccaccatactgccccttctctatgactcaaagacgtcaggcatggctgctacccaccgagagcccttctgggactggcagggtccatccacctcactctgttgctgagaccagcaaacagggagcaccccttcccacttgctcgcttcctagacgaggggactcccagtctccctttcactttgggccctggtctcactctgtagccagaggggcccagttgtgactccagcttccccatcttctccctgcccccatagccactgggccagccactgaaggccaatgtttgtgatttcattgattcatgtacctgccctgtgccaggcatggggccaggtgctgagaaaagaggctgcagtgactggcactacacatgcttgagatcacaggtgagctgcggtcctggaaaaggtggcagggtaggggcctcctggcatctgcagggctcctccctccttctgctagtcccatcagccaccccatctctaaacacttctgagcagattacctttccagcctgactttaacagtttaaaaaggtgagggcacctcccccagaccttgctctttaactatatccaggtgcccagggccagagagagctgcacggtccgaagctcagagcatcctcactagcatttctgtagcccctcagagtcctagggtgccctgcctggtgggtgcatggggccagcaagggcaggtggtgtcaactcccatcctggcatcggatataggaccagcggtagtgatctcccccaaaaaactgcctacctgggtttccaacttgcagcccattatctattaatactaaataactgcatcgattcgattgatactacttgttagatcaagcggagggccctggccagggctgagcaaggcctgatttacatggagatcgtttaaaagattaactttagtgaaagcttcgaggtttggcaaatccataattaatcagcctggctcagagcttctgtgattgggggctgatggcgactgtgcaaaaaagcaggggttggggcgggggaaaggtggagaaaacttcgctcaccgcatttgggcaggagaaatctgagattcagagacgtgggagttccgaatgagatcatttttgtgcctggttgcagcatattagcttgcacgtgacttaaaaataatggctttcgtagaattgcaaaattagagttaaaaagacctgaacggctgtcctcctgggagtcaggttgagatgaaatttggtccttaaatctggcctgtgtttttagtaatttatcaggccaccagcaaggcctttttgctcagcggtggcgttcagaatcgtgttttccttactcaacattcccaggtgtcgtcccctcttaagctgtcctagatgaatcttccagaagcagggcagccgacttagaggcctgaagaggtggcatccatcctcaaggacaagcgaggcctccagcaggtgggggacaggaggtgtctgagccgagaagagctgtttattacaaccctgaaaatgagcttggccatctttgataaaaaattaatgctgcgatgacatcaaccttttgaccgcttcctaagtggcccacaaatgtcagaaaagctccgttcctatttgtacattgtgaattccagcacatttagtcactaatcttaagagattaatgcttagctatttgggctgcaggagcacaaatgtaatatttataagtagattgcgagtgatccaaactcagtatttctacggcaatgggttcaaaaagacctcctcagacaccactgattgtcactcctgccagcatatccaagctgcaggaagctctgcagagtctaaattggaatgtgaagatttagtacggggctacacaataatttgctataagctgtataaatagtattttatttgggaattcattgaaaggaagtgtcgaaggtcaaatccttcccagcagtgagtgcatacgtatttaattttcaatctctagtctcttttataatcctgagtggcttggcttcagaaatatttttagcaatgggaaattaaatgtcaatttgagaaagctctcccctgggatgggctgtcctctccctctgcacacattctgccgcccagggacgaggcgcaatcccagctggtcctctgggggagagtgggttacccctgagcactcagcccctcagacattgcaggtcctctagggtgagccttgaggtacagggagctctgggttccagaatattctcagggccccttgcgactcatcctttcctttctagggtaccctctttggggattacagaaatgagctccaaactacagagcagacctggcaagggaggctccaggacgtgctgctgccacgggagggaagcaggaagcaggcagcactggagtcggcgtccgtgggaaacactgtgtctctgggaagcactgtgtgtctgaaaggttctggccagcacgcagaagtgctatctggagggagggtgggggcaggaagtccacgggcaaccatcagactctggagagctatggagacgttggtactgttgggaagcacagcctggggcagggaaagttgtctcttgcacactggaaggcgaatttctagaggggaagacctcgtcgggcgaatgcactgttccattgccagcacctagaccagtgcccagggtgtaggaggcgctcactgagtatctgttgtatgaatgggatctttggggtgggggctctgaaggaagggaggagatggaggcacaccttgctgcctctaggattttaccgagggccgatcaccacatcagggattgtgtggctctcatgaccctgccctgctcagttgcctctggtggcttcccggagcacatagagtcaagtccagatgccttcccgcataggtgataggtcagggctctgcagtggaggcccagcactgcctcccagcagcgtccctaccacatcctcccctgagtcctattctaaagtcatccagagcacctggctcttcctctgaccccccacactgtcctctccactaggatgacatcccctctccctcatccatcactccttcaaagccatgactgccccaccccaccacccctgtgcctaatcagagtgattccctgagtgccacgtcttgtattgcgtggcctttgcatattggtttcggagctggttgtctgtgtgcgtctgattcctgcagctagcaccggtgcctggcaccactgtaagggctcagtgggtgtttattattaaatgttattttctctggtctgctggcagcgatggcagaagtcatcttagcagatggttattgcatacaagccacaggctgaacgaaatacccagcacctctaatggacgcctctaatggagaagtttcctccccatcttgagatttcttggagtgctttctgcttccacgaaatgctcttccatttgagagtgttgtcagaatttgggagccataatgacctgggttgcgattagagccccaccacctacagggtgtatgtccttgagtgagttcctaacctctctgagcatccgtttccatactggatacacaattggatacacgtacctcatatggtggttgcgaggttgaaatgtaatgatttatgtcaagcccttagcatagtgcacggcatattttaagtgttcaacacatggaaactattcgcatggtgatgatggtgatgaggatggagataatgatgggcataatggtggtgatgatgatggtgataactatggtgatcatgatggtggtgatgattatatcaatgatggtgattatggtggtgatggtgatgatgacagtgataatacgggtgatgatgatggtgatgatggtggtaatggtggtactgaaggtgatggtgatgatggtgatgatgatgacagtgataatatggatgatgatgatggtgatgctggtggcagtggtgaatggtgatgctgatggtggtgatggtgataatgatgatgatggtgatgacagtgctgataatatggatgatgatgaaagtgatgatggtatgttagttctcacattgctgtaaagagatacttgagactgggtaatttataaagaaaagaggtttaattggctcacatttctgcatgctgtacaggaagcatagtggcttctggggaggcctcaggaaactttcaatcatggcagaaggcaaaggggaagcaggcacatcttacatggctggagcaggaggaaaagagagtgggggaggtgctacacacttttaaacaaccagatctagtaagaattcactgtcaccacgacagcaccaaggggaatggtgttaatcatgagaaaccacccctatgatccgatcacctcccaccaggccctacctccagcattggggattacatttcaacatgaaatttgggtagggacatagatccaaaggtggcaaatctgctgctactgctgctgctgatggggatgttgatgacaatgatggcaatgatggggatgatggtggaggtgatggtgatgatgacgatggcagtggtgatgacggtgataacatggatgatggtgattatggtggtgatgatgatgatggtggtgaatctgctgctgatgatgatggggatgatgatgacgaggatgatggagatgttggtagaggtgctgctgctgctgatggcagtggtgatgacagcaatcacatggatgatggtgattatgatggtgatggtgaccatggtggtgaatctgctgctgctgctcatcaggaggatgatgatgatggtggaggtgacagtgataataacgatggtgatggtgatgacagcgataacatggatgatggtgattttggtggtggtgatgatgatggtggtgaacctgctgccgatgatgatgatgggtatgaggatgacgatgatggggatgatggtggaggtgatggtgacagggatcttgatatgtttctaccattttgaggctccatgaggatccatggcttcaggtcttggcaagcctctctgttacctgaccagggccgggacatagaataacctgccccttccctctcattctctgcatgttcacccacagggaagcctgctggagaggcctctatttctgccctgtgggccagtaaaggcaccaagtaaaatctttgctaaatccctgcacttccaaggctcgccatctgtttcctattagagtctcatgcatccctttgacatatttttattgtcaggttagaagaaaatattccactcatttgcaacattctcattatattccctttataacaatttctaaaagagaataaatataaaatatttctctgtattgtggagatatttcagcctgactttaatatgctgcatagttttccaactcacaattcttctaaccttgtgatgacagttaagaaatcttcaggctggggaaaacatgtggatcaatgagttagtggaagtgcaggacactttatgaggactcagggagagcggctttctgccgactcagagatgccttctcagccttttgagaataaactgttccaacagtcccaaagtctctttcccttgggccatttctaagaactcagagatgtctcctttgagatcgatcagcagctgggtcctcaaggagcctggccaggaagcttggtttgaaagggcaaaagtggaaacccttgtccacagcctctgagtaagcctggctgctccaggtggcagtcacgactgaccctaccccagaggacccagtcaaagggcatccagatttctcatttccacccgggagtacaggtcctactgtgccttcagccccaggcttgtggctgccccaggtccctgatcgctgggaagagcgtcctgccatagactcagctccacactgggcagccccacttggcagatcgaagaaggcagcattcccaactgccctcccgaatggacggccactttggggtgggcgccaggcagttaagcctgctggtggcctctacttcctcctgccgtggcgccgctcaagcataccccagcccatctgcagatcaggtccccttaggtgaattcctgcccctgctcccttgccaagtgtctcccactcccagtaagcccttccttcaaactgcctcttccctgcagatctttgagaccaactctctaaggcttttctgatgcctaagcccctggagaccacccttacctcctcctgccccatccccaagctcccaaagtcctatgtcatctgtgcagaggccctttgcacatgcagcatgggagccactcatcctaccagactctaggacccccgaaggcagcgactgtaatgctggtgccaggggaacaacctgggccctgagccaggcagaggcaaccctggtccccaagaagcctgcagtcagttctggagaacaagacataaacctgggaagatgatcgaacaacgctgacaaagtggactagaaacaaggctgaccagcgcagagcccaggggccctgggaagagccggagctgtgagaaccgctgttggctgtgggtatgctaggtgccaggagcatccgtattctcttttaagcctcacccagccttgtgagctaaacataacatccctattccacagacccagaaacaggcccagagagggaaagtgacctccccaaggtcacacagccggaaagtactgaagtcaggttttgaattcaggtctaactataaattggtgtcccagggagttcaatccaggaggcctttctgtgggtgtttaacataatttagaggatctgagggaatgggaggagcatgttccggtagcggccagggaattgaggcacagagaccattctatgcagcagaagacaagtgagaggtggctgcgtggcatgagaagtcagggctgtctgggagaggaagcatcctggtggggtcaccacggggccaggatgctgaggggccagggccagtgctctgcctccgtccgggcctcagcccacctctggtgctggggtggtccgtcctgagcaagccttgggaagggaatctggctgctccccacacagcagctgcctttctgttgtctgagctccactcagttgaacaaaatttgccgtcccccttgtggccctgcatctcctgttatctctattcagggcccttctgcctttcagcttcaccaggagaggattatttacggccttgtttatttcgctctctgcaggcaatgcccaggctgaggagacaagtagcagtgggcagcctgcagccagggcccagccagcacctgcctttcttcgtgcataggttctgcaccggggccagccccagagggatctccagacccgacagacccccagccttggtgaaatcacctcctcagaaggaagcaggcagcctccctctgaccaccgggtatgccggcccccagtccccatggctgaagggtacttggtccctgtggccttattcaatagagccaggttgcctgcctcctgctcatggaggtccctgagggaggaattgcccaggaaataggccagcctaaggcttgtggctgccctagcaggctggtgttgggtgtcagagaaggaggcagggcagaaggaagggctgtgctgcctgcatcctccacctgggcatctctatctaagcctccagcaacctgagcaacctccttggtggccacagctgtgtgactccctcctttccattcctctgcagcccttcagatgggactgtggcagctgggagcttctgaaagccacggcctgtgtgattcccactcctggccaggcccagcctttgcctttgaggctcccaaggaccacctagcagtttcttgctgcagggcccctccaggtacccacttctcagggaggggccaggtccaatggcaaggtgaagccactactacctcaccaacggagaaaaaaggacgagccaattgatgtacgtgagcacctggaggaacccccagagaacactgctgagcaaaacaagccaatcccagaaggccacatactgcacggttccatttagataatatcattgaaatgacagaattatagaaatagagagcagattagtggccgccagtggttaagaaggagttgggctgggagggaagtgggtgtggctgaaaagggtagaaggaagggcccttgtgatggaagattccgtttcctgactgtcctggtatcaacatctgggatgtacaggaaagggagactcatggggccaggacagcagtagccccagcctcagccccacaagccagcagcacaggatcagccctcctcattcaatgcaaggggagggggccctggtggacggggaagcattaagcctattgcctggaccttgggcttcactgctgcctgcttcgccctgtcccctgtccctcccccacatcccttccacctcctggagagtccctcccccacatcccttcctcctcctggagagtccctccccaagcatccatgcctcccagctctctctcttttactttccaaacttgctctcagaaaggaggaggctggccctctgctgctctgagcatttgcagaactctctgctctttcccaagggatcagctcatgaaggcaaccatatcctcaccctgtgcaaaaaattgcaggatacaggagccacggggagcatggcagtaaggacagctccctcagccccgaacactgcacagacgctggccttctccatctcgccagggcagacactgtctgtgtgacatactccccatagggtggctaggcagtgatgggttggccacccctggggcttaggaggaaagcaccattcattcattcattcattcattcattcagattcagcaaatccccactgagtcccccgctaccttctaggacctgccctaggtactgggttctctaaaatgagtctgacatcatcagacattggcttgagccttagtctgtttgtgctcctgtaacagagtgtctgagattgggtaacttagaacagaaatttatttcccatcaatggttctggaggctgggaagtccaaagccaaggtgccagcatcttacctagtgagggccttcttgctctgtccccgagtggtggacagtagtggggaggggagccgggcatggtggctcacgcctgtaatctcagcactctgggagaccgaggcaggctgatcgcttaagctcaggagtttgagaccaacctgggcaacatggcaaaatcctgtctctacaaaaaaaaaaaaaaaaatacagaaattagccaagcatggtggcacatgcctatagtcctacctactgggtaggctgaggtaaaaggatcacctgagcccaggaggttgaggctgcagtgagctgagatcccaccactgcactccagcctgggtgacagcaaaaccctgtctcaaaacaagaaaaaagaaaaaaaagaaggcagagggcatgctagctgaatgctgcctgaagccttttttataagggcctgaatcccattttggcaggaggagctctcatggctttctcacctcttacagaccccacctcttaaaacaatcacattggcaacagctgcattttggagggggtgcattcaaaccacagcagtttgcctagacctgctgagctcacagtccagtggggagatcaggccccaggctgcctttattctcactgtctcaggcatgaactcaggccagaatcccatcattctaaagcccagaatcccagaactccagaattccaagtttgggactcctgtacctctccctgtgggatccctgccctaggctgggttcttgctctgctgctattcctgttttgaaacagaaccttccggtttgttgagggttgggtcatcatcccctctgttaccctgaagagagcaaccggcagtgggctcttcagggttctcagcctggttcactgtggtggcagtggagcgcagtccccatgcttggggaaagtcccccagctttggcggaatcagcgcctcagaaagaaccaggcagcctccttctgaccaggcaagggctggccgccgttctcatggctgaagggtactcagttcctatagcccgatcatggcattgtcacggtggcacaggggcccgcctatctgaagtcagggcaatccacgcagagagccctcctcatggcccggctcagggagccaccctcccattcctgcacccttgccttctggcagggcttgcatgcctccgagctcacagcatgacccaggggcctggctgtgctgcaccctggggaagatactgtcttaggtacaagaggcacctcaggagcagaggagggagctgggaagctccccatgccaccaccctgagcttgcagcagagaaccagcccaatttgcaagcaggagcgggaggctctgggctttcttagaacattatttatcaggtagactctcagcctcatggcagctcgagccacagcctgatatgaatattgattggaaaaaatgtctctcccctcgtcccccaggcccggggctgccagggagctctccaagcagtctgggaggcgagagggagccgggcatggggagaagaggctcatgggaagagagtgtgtttgaagctgggagatgccctgcgtgccgcaggcccctgtcctcaggagcagatgaagccctggcttccgggctggttccagcatgggattgttcaggattgttcagggagggggcctgggagggaaaaggggaagagtgacgccccagttccaggcagcagacttaatgctaggcttggaggggtgcttctgtcctagcactaagcacctggaggggtgctcccagcttcctgcagcatctaaagctctgtcttgtgggcccggcagagcctctgggccgccctctgcctgcagaccacagggccccagggaacctgaggtgggaggagcagggtgaggtcggtaaggggtccctccttgccagggcctggtccctcctcccagctccccagctctagaggtactagagcagttgaaggctggttcctggacttgcccttcccgggcctgtggcatctgaaagggttattacttccagggtcattttgtttagtttctgtctcttattaacttgtagtccctcgcctctgtaccctgggaacggcagtggggctggggtcccagcggggcggatgcagaggtagaatgcaggctgtggctgggagctgagggccctgcaatctgggtgtgggatgtaaagaggtaactgaggctggaggttgtgggtgccgggtaccaaagtggggcacattctgagctgtgggcaaagcctgcacgttggggggaatggcagggcacagcggcattgcaggaggatctaagtcccccatgtctcagcccctctggggcacagctggcaggcttggccaggtgggacaggagcagaaaggggaaactgacagccgcaggcaagcagaggaggccgcagaggaagaggagggaggcccagcagaggcccttcccagccctatcctccccggatgcctggatgccggaggcaggtctccggtgtccaaccagcagcctggcccctctttagcctccaggcctggaaagcggatcatcctcctaaggggacagatgagcctaaaagcaccacagcctgggggcttaagccacagggatccatcctgccaccctggaggctgcacgtccattcctcctgagggcggtgaggaaaaccctgttcggggcctctcttgccttctaatgctttgcttggtgtccctgggctgggagaagcctcatctgagctctgccctcatgtttacttggcattctacctgtgttcgtgtctgtgcccacactccctgccgtgtaaggacaccagtcatgctgaatcagggcccaccgactcatctgaactccttacatctgcagagactttccaaattaggccacattctgaggtcctgggggctaggacttcaacgtatgaattttgggagacaacattcaatccataaccgggggcctctgacttttaagggaagagacccctcccctgggaaacctcagattctgggtctgtagaagcctgcagcttggtgggttggagggcctgacacagggtgctgcctccccagctggccctgtggggtaagtcccgggccagcaggcgcattcactcattcagcgagtacgaccggctcctacacggtcgggcggtgtgtccagcacatgggtgaagcaggccgcacgacagccaaggttttaccacctgggtcttgctttctgggaagaagccagaggacaaacaggtcaacaaatataaaaaatcatctcaagtggggatgagagctaagaatgaagtcacgtgacgggaaatcacagagggccttgctgagagtgggacgtttgagcagaatctgaaggagaggggctttgaggaacccaagaagaacacctcaggagtaggggtgtagaggcggaggcagaggcagaaggcagggctgggtggtgttgggggaatcagagatgccagctctcaccccagctgcggcccatagggctgccacctccaggcagctgggcagggcctgggtaggtcagaggtcttgagactggggtgaggggcaagacgcactgtccgagcggcaggtttgcgggggtggagcatggtggagaaggactctgttctagggaaaacccagatacagctttctttggagtcttttaaatcctttgagaagaagccaaagtgatgagtgagccagggtggccgggaacaaggggaagttgtgactttgagctggtctcggtcactcggggcaaccatggctggagagactgggatcccccaagggcctgggctcagccaggaatctctatcctcaccctgagggcatcccagggtccccatcatccaccactggcccctgtgtccaggcaggaggggtcaactgtacccagagccgtgggaggcccctggcttccagtttccctccttcctgtggctgcaatgcagctgtggccccaacatctgtctcctccgaggggcaagggcaggtggaagcaggcagagggggtcccgcacacaggaatcagacaggttttagaactcaaagggcctcgagggtcctggtggagcagaaagagcatggcctgtggagcccggaaggcctgacctgctgttactgagcagggttggacaggaagaaaagtcctggccactctcagcctcagcttcctcatctgtaaaacccagtgtccacctccatatcatagtgagacagtgaggatggaatgaccatctctgagagtcctgggtgcggtgcctgcacagagaggtgtcacggagccgcctctcatcacaccagggccagagtgagcagggctcgtgctggctctgagagggaaggccaccacaaagaggggcagcttctggctgcaggcaggtggtcggtggggggctgcaggcccagagctgcgtcctcccagggccgagggcccctccaggccctgctgctcccaggtggggtctgcggtcctgggtcgggcccgcccttgctgactggacacaggtgggacaggctccccatttctgtcatactgctttctgcctgggtccatgctgccactgacccctcctaggtgggggatctgtgtcccctggaccacactgagccatcgttggctgcgactctgatgttcttcgttgtctggaatcgagcccctccctgagactgtgcagtgaatgagccccctgcccctgcaccacccaggtcaggccgagtggacactaccctgaagcacgtctcccggtccagcccccactcctgcctcactgcgactctgccacctgatgcctccatggagggtcgattcacctgcctgagtctgtgtgggacccaccacccatgcaggaccagggctccccactgaggaccctctgagctactggttaacaggctcaagcctgcgcatggtacggccaccgtcctacataggtcctgggatccagcctccagagtgcaggcccataggccagacaccacctgggcagcttctcattcaggactgccccactgtgatgatggggaggaacggaagtgtgcaggcctctagggtgcaggtctctgagctccccaggtgcagatgaaggggtgaagggagggagagtgccgagcccagcctcccaggaggcaaagcctgggtatctgaggctgtccaaggtgcggagtgtcggagtcacgtgagctgcatctccaaccttggcttcctcatttgcaaaatgaagaggccccagtgagctcggagatcccttcacagaatcatcgctagaattccgtgaggctttgttgaggcccagcaggcctgtctcagtggcaagggaggcaggtggctcctggaacgcaggcagcactgggcgggtacccgcactgggcatcccatgtgccccacatctctggcacattagcccatggctcaggtggcactggccccgtggcataggcgagagggcaggctagggactgctcctaccagtgtgtcttgggctctgtgcccactacctggtggggagaggtgtccactttgtccacttcatggcatgggagccgatgcggcttcaatcctgactccgcagctgcctcctgaccagtcagcaatcgggagccccgacctcttccctctccatcctcactgcagcctgggcaggccggaggccaatgtccccagggcagagctgggacagtcccagtgggaaggaggcctggccgggccagacagcagcctgggaaggagccgtgtgttgcctgggagttccacggcaccggctgaacctgcatcttgaaggtttgattgattgcgtcgttcagagtgaatatattttttaataatcggtttccaaaattagtctttctctgtgtagcagctatcacaaacagcatgagacgcactccttttattttttttttacctgccagaggcagatatttgtttttccttcaagagagcagcaggtgaaggtgtggtccccggatcccagcacctggaagctgcggtctggtcctgcctgcttggagcctgtgggccgagaaagacaggggcagaggcagcctgaccaaacctcctcttgctcccactctccgtggcttgcgggccaagcgacatcagctctgcacccctcggtttccttagccgatggcgatggtttgattacttcatcacactgttttgggattaagacaggacaagcttagtgcacacattatagctgctcagtgcccattcagtaactggtagcttggtcctcctacctcgtgcccttgcggtagctctgggaagccaactctgtctccatttgactggtcctacaggtgcgggttttaaaccctacgtcacccacatctccttttggacatcacaaaactcctgaggtgcccagcccacttacccccaagtgctcaccttctgtgagctcctgagcttcttcaccagctgagatttttccttgtggagttttctacttctgttgtttgtaattcaaactaataagttcttcctgcatttgaaaaatgaaaacatggtgtaatattgaatgttgctgttcaaactgctccccacacccagcattttgcaatgtcccccaggggcacacacccttgatgcttgactgaaaaactaccataccagtgactgtctgtatctcattggcctgagaaattaaaagctgctactgtgttacattaagtgtctgctgtacgcaccgccctgggctgggccagtcctgggggataaagaacagtatcagaaagatactcagacagagctgtctctgtggtggaggagatgagagctaagagaagtgaaaatgcagagccgaggccaggccatcccgcagtgtccactggtgcaggggtgggctgcgggtcgcgagccacgggagcttgcaaaagggaagggcatggcttgaagtcagcttcccggaagaggaagaggcggtccttggctgatggcagaatttgcatgggctgataggaagggacggcttcaaggttgagttggctaacaactcgagccaaggcccagaggtggggatgagtttgctgccaaaggggacggctggcaggaagctactcagtgtgcttgttcgtctcgctcattaattgggcacaaagagcagcaaatcccatccccatcccgaggccctgcagcatggtaggatcatgcccacttctccctgctcttagaccaacgtgggttctgcctcccctgcccaaagcgtaggcgcagactctgggtggaatcaaggtgcaaaggaggcctcgattccggcggtttcagagggctgctccctgcgtaagtcatccacccatcctcttgttaccccacctctggcttctgggggccccaggacttccccagcgctgtcctcagccctgaaacctccatggggtttccatggagaagtgctgacaattttgtttctactctcccagttcttcctgaaattcatctgcatcaaagtgagatcccttatgctcagcgctcagcaaggctgtggtgattaagcacttaaattgattaatcaaatttcctgtgatgagaactactgtcattcattaatctgagcgggattataaataagagatggcagatacaggagacaaccgtgttgacagatggacacggtggcctgaatcacaagtaggtgcctgcttcctgggggctttcgctgtgggcagctggggacggagcttccctaaagacaaaattattcggagattgaagtatccccattttaataacgaaatatgcatagatgagcaggcagccggtacagggagcacgtaggttcgcataccaatggcccggttgtattcatggaggtggtagcagcagctccaagagataaagaatctgctagaaaaagaggccaaagcaaagtggcacacgggttgagaatatgggtttgagggtcagagcagccctgggtgcaaatcctgcctccatggtttactcaacgcgtgacttggctgaggttctcaatctcccagagcctccattccctcactggcaaaatgcggatgctgataatcctgattccactgggttgttgttaagagtaaatgagacaatatctatgaggcactttttatctagtttacaaacatttattgagcacctactgtatgtcagtactgtgctggtatttagagattggcaaggaataaagcaagcatggtccctgcccccagagctggtgttcttatggagaaggcagacactgagactcaagggctatgacacagtgctactgccctggccttcccagatgccacattctctgttgacctcctggactcaggatgtcctttccatccctgtctttgaacacttcttcctgcctgtggtctctccttgcccctgcgcagatcctcctcctgacttcttggcctcattcactccaacagaactgtccctcccagctcaagtatactgtgtctctacccaagtcaaagccctggatgacggctgcaaagcataaggcttcgggttcccagctcagtcacacataagcttcataccctagacgtgtatgatgatctgcatgaagtccatttccccactttcgtggggtacagtccccttgaggcagggaccaggtctgttctggtccccatcgcatgctcagccccagcatcgggcctggcccatggcaagcctagctagtacttgttgagttagtagatgctgcatcaaggtggccttgggagcacgtggagatgatgatagccatgtcagacgacagcagggagagtggaaagtcacccagccctgggcatccgaatcagcattttctggagactggcgcctggaccacctcagcacaatacctaccactgattgagcttctgcttggcatatggccctgctagggcactgggaacccagtctcaccttccagccatattgagtggcacagaggaggctcgcaagcagagatgattgcagtgccctatagtgcaccgttggggtagagggaggcccagagcctggggcattctgggtgagctgatgccagaggtgggttttgtagatgtggaggtttggtaagaagggagaagtggggctccagagagggtccctcaggtctctgcaccctcttttccatttatttgtacctcctgatatcctgtccagggtcccaagacagcctctacagggggtcccagctgagcaggccagagggaggaggcacagcctctcacccatgcctctgcctggacacaggaccaggaaatgccatccccagtcttgttgggctcagacattgtgatccgtcggtgagccatcgagcccctccttcaggcccccagaggaagctggaggagtttgcggagggtgggagctggggctgggagcagggaaaagtcagattccctcgctcagaggaaacccgctggtgctcagtgagattaaaactatcactcctggctgaattggcctcttctactgttttgctaaatatttaaagaccccttattaaaagagttaccatcttaaaaatgtcagatcttcatctgtcatgtccttcctctggagtgtggcctcagggctgtatccaagcaccccagaaacagaaaccctctttgccctgggccccaggatcatttcaagtggtttctgaggacccactctgtacccagcactgtggctgcccgagcatctgcctctccagccacagtagcttctgccacgtgatgggctggcaccagcctgagcaggtctcagggaatatggtgaggaggcagcttgggctgcagtacgtggccatagtgcactctgcccagcccaaggttctgtttgctgcttccctcctccctgggcaccaggctgggctggaggcagagaagctaaggacagcccagcctagggagtgaggaagcaggaagtgaagccctgagccacggcaaggtcttggccctgctgatgatgttgggcaagcagagggtcatgggggcaccgagcaagaagcatccacttctgcctggaggaattagagccagattagaggagaagctgttgtaggattaggatgagaattaggtctttgagcagcacctaaaaggtgaataccagttcactggacatagaaatgggggtttcccccaaccctctaaaaacaaagaaaaccagacaacacaaagacatacaggttcaaagacttgttcaacaagcaattgagcacctactgtatgccaggaaccatgccaggccctgagaatatagaactgagtgtgacatgttcctgcttcccgtaaaatttgcccgcctagctggggaaatagactaaaaacagcccatgatgtggaatcaaatgtgctgtaataaaagcggttgcagctgcctccctagcacggggtaggaggtgggggatggggtgggggttacctctgtgcctcaggtgggaggtgggaggggtgcctcaaggggaggtgatgtctaagcaggttttgaggataccctgaatccactaggaatgtgcagtagcttggtgtggcctggacagatggggagagagggaagtactgatgaatgagaccagagaaagggccccagagtacaagggaaaggcatgggaaagagatatccagagccttctggaatgatccaagcagagagggatggagaagccgctgctatgaggaaagactgccccacagagacaagggtggagacggagctggtgaggaaggggaagcccatgggagctgtggtctgagctgggtctgaagggctggtcagccgggggatgccccactgcccacagatggtacagtgaggctggtgccagtgtggcccacagggaacgaatgcccagccagagcagaaccacccaaggtgaccctggacgggggaggggctcagcctggagggggaggcggagctggcctgtgtcccctcccaggtggaaagacctgggcccaaggccacctgacgccggaggagccagagagaagaggggacacaggacagaacaaagacatggctggacgttcactcacatccaccctcatggtagaagagtctggaactcagtttaaatttttcaagtctttcatgaaaggggaggttgcctcctcttcctaagcgatgaacatctcaatttgctgctgctacagagggccaggggtagcatcactgaggctaggagatgtcaccggatgtcagccttgacttgagcgaacattcaggggtcaggatggtgtcatgaatggagctcccagagcctgcgagtccaaagacctgggtcccatctgggtgtggccacagatgcctggcgtgaccttggacacagctgtggctgctccaggcctccctcctcacctgataaacaggggagttgggctggtgggtggacaatccctctctgctccacacattttccatcccggtgcatcctccgcccgccgctcaccttgctgtcggcaagagttaagttttactgagaaaagaatttctctctggaatattgagtataattaaaactctgctgtgaaaaaaaaaaaaaagcctagcaaacactgagagacctagaggaagtgaaaatgtaaaaacacgacccccattttcctctccctatgacatggattattaagtcaggtttgaaaagttcctattaaatatttaaatatttcattaaatattcatcatctcaaaaattgcttcctaacagatccttaggtaaatataacaatatttgatcacaaaagctgcttggcctgactgaggctcaggaagggtgatactctgtctggggctctggtcccacgggtacagggaatcctgcttacgagagggaggctgagagaccgggaggggaacacacgcctggccaccaggagggcccgggtggccacggacttgcctactgggcgaatgagcctcagaaaggtgatacggcaaacggagctcatgtggcttgtagtggtgcagctgggagccgaacccatgttggccggacccctctgtgggcgatgaagaaggctctcccacagtaggggctgcccgctggcttaggccatcccaacactggccacgtgcaggggacattgtgaaagggaccttctatcagaccagcagctgggctggaaacccttgacatcccttccccggggctgtggaggggaggggtgctcccctggggttctgtggaactggattcacagcccggttgttccttgtaagggcacctggtctcccaaagtggagtataaacagctttcagtgggcaggacatgtggcagccaccctcgcctccaccgtctttcttacctcccaggtatggtgctggggtctgcaggagggtctcaaacctggagctgtcggggtttgggccagatggaggagtcaaggtggagaccgtcccgtgcactggaggatgcggctcccactgggcctgcacctagtagatgccagtgtgccccaacccctcatgcccacctgaaatgcccagacacttcctatgcccccagggagccatactgcccctggctgagaacattgctttaccagaagggcactttgtaaacacgtggtgcgcgtggatggtgtagcaccatctggagggagagagtaggggagggaagcagagtgactctacaagaagggcacttggtaaacacgtggcacgcatggatggcatgacaccgtctggagggagagtaggggagggaagcggagtgaagtcaggttgatagtgttgggcctgcctttggcctgaagggctttgagtgggggcggggtggggggtgagggggtgggggagctgctgagtgctggatttcagcagccacggtgccagctttcagttcccacatgggcttcttctcaaaggcctcaggggatcgtgccaggctaaggggtccctggctctgctcacctccacctggcactcgctaggcatatgctgcagcccctaaccctccctggggctcaggactcagtggaacggcagggactcagagcagccctgccagtgccacgggcctcccagccctgtgtgggggttctctcgtccacccgagtgctttcactggccctggaagcctccccagcctgaatgcagcccttggagggtggggacactgtcctctcctgccttcctgtgctgagtgtgaggaactcccatgagcattccaggtgggctcgctgctgaacaaggtagaagctcttcactgctttttatagtgcaggcacctgggtgcagagaagcaaagctatttgcccaaggtcacatggcaatcaatccaggtttacacccaggttggtctgacctcagagcccatgctctgaagcaggctgtccatgcacaccacacagactgcccatgtcactgagtcctcggagcaggtcagcgggtgctcctctgcggccgctgtcttgatcctcctcattccaaacgcatgtgtttgcagagcagagagggagtcttggtgcccaagcccagtccccgcacctccctcctctccttccctgggcaaattctggggtgaggaggagggcacaaagattgatgggctcccctcactggcagcaggcatggacatggagtgggggggctctcccctccagaattctgatgcatgacacctgctgccagtgccaccctctcaggctcctgggtgacaggaaggtgtgaaacctgacgtttccttgggtctggaatgtgtgcgaacctccatgtcctggaggaaggaccctctgcctggggagaactggtctccaggtgggtgctcagctgaggcctctgtggaggccgaggctctctgtgctgtgtccaagctgggagctgggcaggcgccagccctccttgtgggtgggggacagagcctgtcccagtctgtctgggctgctataacacaatctatagactaggtggcgtataaaaaacagagatttatttcccagagttcaggaggctggaagtccaagatcaaggtaccagcaggttcggtatctggtgagggccttcttcctggttcatagaccgtgccttcttgctgcgtccttacgtggtagaagaggcaggggtctccctccagcctctttttataaggacactaatcccatgcacaagggctctgtccccatgacttcatcacttcccaaaggccccacctcctaatcccatctcctcggggtcaggatttcagcatatgaatttggggacacaaaaacattcagacattgcaggcccctctgtgggcgcccagcagcactgcctgcttgctctgaggcagcgatccaggctgttttgcacacacaggtggaaatggctccaaggtacagaagcaaaatgtttcccaaaacaaacaataacctgtcgtgaacattgataccaacatggtctgtggggcgccatgggctggaggcctgggcagctgctgggggccactgccgagcaggaagggtggctggcggtttgcacattcttaaggaaaacagcaaagaaagaagaagctgaccctgggagcatgggctgtgtctggattctagacaaaccacaaggctgataaagcgaggagatgtaggcctagacatttgtcaggatggggctagggcttcttaacccagcgaagctgcacccaacgtggtgtgcgtgggccaagcaacatttttctgacacgaggtctctaactctcatcagagaagtcagaagcagtctaagaccaccgggccaggcagagcagctcccaccagggtaggcaaggatgctggcagcgtgtgggatccaggagtcagagccctctgacctcgtcttttccaagggcctcagttatctcacctagaagataggaatgagggccagggcagtggcccagccctataatcccagcactttggaaggccaaggcgggcggatcaattgaggacaggagttcaacaccagcctggccaacatggtgaaaccccatctctactgaaaatacaaaaattagctgggcgtcatggtgcatgtctgtaatcccagctacttgggaggctggggcaggagaatcacttgaacctgggaggtggaggttgcagtgagccgaaatagtgccactacactccagtctgggcaacagagcaagactcggtctcaaaaaaaaaaaaaaaaaaagaaagaaagaaaaaagaaaagaaagtactggggcccagtactcagtggaacggcagggactcagagcagcccccgaggagtatgagcctgactccttgctccatgcagcccccaggggagaaaggcgtttgataccacacttcgcaacaagaccaccaggtggcttgggggtaggagggaggagaggggcagggtttgaattctggcactgccatcatgttacccttagggcctggtgtcctgcttggagagatgaggcccaggatgaagccccaccagccagcccagcagggatgcggcccccttggggactgcaggcaccaacttggaggccaccatcccgcaagccatgggtctgaatccctgtggaatgtgtacaagtcctgagcctctccaaggcttgatactccatcctgaaagaggatgtgctaattccctcctccttgaaggttgttgtaaggaccaaaagtgaggatgggtgcccatcagccagccagtgaagacactaccttaggcaacagtggcccagagatacaacagctcagtgagacaacctggggagacttccctaaaaatccagaacacagaaagtgtggcatcaggcaaaggatttccattatgagcagccacaagaaggaaagcaggcgccctgccacctccacccacctctgctggaggggaggggatggaaggggcctctgcagctttcacaccttgtaagcagaccagatgcagaagtagagacaggtgggattgaattaaccacaggtgcccggggctgcaggccccaccgcctgcccgctctgcctgcaagattcaataccgccccgtgcaggttagcagcacattggattccaacgagtcatattttaacactgctggatagttgcaggtgacagaaaacctgtttctttcccattttatacatccaggaaatttgtaccacatgcagcctgcatgtcattacacactttaaaatactgcattctctctttctggagcccgcggacccatcacaaggcagataaaatgcaggaccgagggtgagagcccctctattggggcagagagagcagctaaatgcagggcatctcatcttactgttaagaactgattcctcccttccacccccaggaggatcatcctagaggctgcaggacaatctgttatttccccggggaggtcggcgaaggtgttagctcgggagaagcaggtgtaattacagaggcccaggcagggcactgcattaatagatgtaggctcttcagctagagacttatgtacatgttgctgaggccccagaccctgctgaggctccaggtccagagagcaaacctcctgcctggtcccattaaagcactgagccagccccatctctccccgtccctgactccagttgacagccatttgcatgatgttctcatctgcagattgcacttcttgctggggagctgctcagaacctaccgggaggggttttggaaagcggatttccagggctccagatcagtgcactgagctctgcagctgcctggatggccccaggcagctcagcccccaggctttacctggtgcagggatctccctcctactgtggccaggtggccgccctcgccactgcggcactgcctacggagggtcacagctctgcctgggggatgagggatgagtcagctcgccccatccctgctctccgaagccccaggtccctcctgagccacctttccaccttgagtccttagccccctgagctttaccagaatacgcactgtgtgccaagtgctgtgtcaggttggggaggtggtggggaacttgaagcctagcctctccctgagaacccttagaatggacagggaggcctcccttcctcctgtcaatgaaccatcactgagcacgttctctgtggctgctccctgtgaggcctggagtccacagctgagtttgggcagaacctcagccctcagagctccagagggttctcacccaaccagaagggctattggctccctgccctcagctcccctggtttcctctgagctgggtcccagcaacacaccattgtccagtagctctgctgggccgcgtgtgcagacccagggatgcagaaatacatgaaaggtcaagttcatgcccacaaggagtcagcagcctcattgggcaggtgggccccttagaagctaatatggaggggacacaagaggcaggcagctcccagccgcagtgctgaggtttggacctcaggctcactgggctaggctacacagaacaccaggccggggggctaacccccctctaaactggaggcctcaagggcaggacaaactttgcctggttccccatcaaatttcagcacctcgaatggggcctggaatataataggtgctcggcaaacttgtcagttgaacagatagactcacggggggtctgtgtctcctgcatcccccctggttcctctccaggcccccctccgccctgccaggagggtgtgtgtgctgaggcagcttccccagggactggacagagtggaatccctggcccttgtctgtgcctgggccacggtttctttttgtttgttttcattttggtcagattcacataatgcaaaattaactttttaaagtcagcaattcagaagcattagtacatttacagtgttgtaccgtcatcaccactatcttgttccaaaacactttcatcaccccaaagggaaactcccaatgcattagcagccgttcccccttcttccctccctctgcctctagcgaccaccaatctgcattctgaccctataggttgacctcttcagaatgtttcctaggaatggaatcatacaatgtgtggccttctgtgcctggcttctttcagtgagtctgttttcaaggttcatccatgttgtggcgcatgtcagctcttggttcccctctcggggtggataacgttccattgtatggcgagcccacatttgcttacctcttcctctgccgatgggcatgtaggctgttcctgccttgtgtgaagtgtgccactgtagatatgtgtgtgcaggtacctgtttgagtctgttttcagttcttttgggcagttacctaggagtggaatggctgggttgtatgctaatcctatgtttaactttttgaggaatgggccacagtttctctatgaagttcaaacgaggttcttgaatcggcttccagttgactaactagactccaaggaaacacagatgaaataagaccccatcccagcccccaggacctcctggcctgctctcagcccatgtgaggcagcaaagctgctgctgggacaggaggaccctaggggaagctttggagagtccgagctcccagcagcatctggtggcagaaccttcttttggcttcgtccctgaagcataaatgtggaatcgtgtccagcggcagcctgggttccccagcctgggaggttcacgggaggaggctggcccagaaagcacatggcccagaatgagccacacggggtgactgtggctttgggcaggtccccctctccctgcacctccctccccactgtcattatctgcagagtcaggggtgggcctgacagcttccagcagtctgtccaggtgcctagatctctatactcctggaccccaaatctaggaaccactaatcaggaaggaaattcctccaccaatccttccaggcctttccacagagaaggcagcccttttagcattttatgtccggatgaaatagttctaggcactatgctggaacccccagctctgagccaaacaggccttccctggtccccccaagtcctgggggaaggctgccctgcacctgtccctggagggggacatgtgggcagatggcacaaaggtggtactggccataaaagccatgttgcaggcaacaggctggtcccattggccttccctgctctctcctcagtaggaggcaaggcctagagagctgacccttaggcagaagaaggggtggctgtggcagacaaaagacccccctgagggagggaaggaaagggacggtggggttcccactttccttggagctgctgtggagtctttgctcactcatgctgggacccggccccccgcagcagcccggggacctggaggtgcatccactgtggtgagctgcagcaggcgtgttgggttaagacctatgtggttggttctgaagagagctgggaatttcaggggagacctgagcggaaccagggaggatctgacatttttataaaaggaggtccctgtgctcatccagtggggaggggatcccagagcttatgtccccgaggggagctctgactctgtccccctttctgtttgcacttgggcagggctctcgagtccttggaagctgccgtttattttaaaacagcccggactccttgaggaagctgaggagagaggaaatggcagaggcgacctcgcctcacacttcctgggcgggagtccccactaggtggccgcctgagccatggggagctattaggaggatcctgctgtaatcaagagatgggcaggcaggggacagagtgccccgtgtctggggaaactgaggaggtttgtgtttatcgaagaccttttatgtgccagtcactgcaaacgtattgtcatttaatccaacaaacctgcaagatcagggtcatccttcatcccctccctactaatgaggacattgtgattcagtgtcgcggccactggcccacagtcatcagtgctgctaagatgtgcaggcgagtttcaaacccaagtctggcttagtgcccaaacttccaccaggcaccccaggcccaaggccaggcaccccgacctccatccaggaggaccgagtgagtttctctgcctgatcagggaggataggaaggggcctctacccccgcttcgtcctactcagctctctcctcctgagggtctgaggcctggacagcagtgctgggcgggaggcctcagtcagcctgggtctgagggtgcagagctccctggggacattacctcttcctgcaaggggcaaagttcctcagtccctgtgttaaaggaaggttggcttctcctctgcccgagatcccagagcgctcacagtgcagcccttctttctgctaaactgcagacttattttatcagcagttattattgaagtctcaccattactattattttcattctgcagatgatgaagtcagggctcagtgagactgagtgattcagctggggttcatccccctgctccgtgccagagcctcggaggttccgatgcactcagggccctgggggcatccagggccggcctggctggggcagcgcatctgcaggtgtttgaggcacatttgttttcaggggaaggggcgctgctgtgcagaccctgctaagtctgttccaggacaagacatgctgcccatccctcctgcttctctagtgcaggagccgcggctcggcatggttctgcgtgtgtgtttccgacactggctcccaggtggaaggcctgatgccgccctgctgtctgctctcttttgtagagatgttttcgtgaacttgagaaaaaatcgggaaaaggccgattccctctgcccagcccattaattctgcatgctcaggccgaattaaccttggcaagccttcaagaggagagagtaattctaaccttaaaaatctgctgatgaaagctggtttcaggaatccaactcctcttaatgtcctggcagacagctcagccttgcattaacatagccacagaccggcccggcgtttccctccacctgcttcataagcaaaaccctgttgtccgttttaagcaagaatccctgcccagactccctggccacatgcagccgcacatgttggagtgtgccgtggatacctacgtggcgtcacaggtgcctagagcgggcggcgctggggagctggatgccagcaggctctggagctgagtagtaaccacagccaggaatcccggcagtgccagccccgcagacgcctgcccacaggagaagagagccactgatttctgggcagcacttggccctccgtgccgtccagaatggcctcggggagtgggctcctggcatctgcatctgctctcctctgggaatggcagatgagtagagagaaaggccggccacctggggctgtgtagccgaagctcccagcgccagagggtacagcctgagcctccttaccaaggctcagggtcccaccgttggtcatccctgaggctgaaatacacaacacccctgctggcctaacaggctgttgataaggaacacatcagacccagagctacttgcaggcattcgtcagagatcccttgtgcttaatgcaggcagacctggtgaagggtgagggggtacccataacagagggatggaggaagggagggagggagatggaagggagggaggaaaaatgggagggagggaggaagaatgggagagagggagggagagaaggagggagggaggaagggaggaaggggggcagggaggcaagaagaatgggagggaggaaggacagggagcgggaaggaggaaggcaggccatcaccagtatacaccactctggagaccagctctagccacttggcagggctccaagaaataggtctcagcggtacattttgatgaaagagagggaatttcactttatttatatattatttatgcccagtacttttaggaagtatttgagatagcaacagcactgatacattgaaataggctaaaagaacaagagccagtgggtgggagataactgagcaagaatatacacgtacactgagcagagctcctgctgatgacaggaccgcagatcccagcagcctggcacacccagctcagagaaagcctgttctttgctggggcccgcagggagccaggtatcaggacagatttctgagacacgaaaggtgcaggtctccagctcccgcttggctgggcctgtgcagggtgaggagctgggctgccttccccaaagcggtttggcaggtgctgggacacagcaggggcccatgtgggcctggctgaacgtcctcagagggtgggaaaacaggcaggtgagagtggccaggttcctggacgtgaccctaagcagcaggcgctagagctgacgagaacagcccatgtggagcgtgcagcaaggcccagatgggagcagcccatgtggagagtggagcgaggcccagcagagttcggcgccgccctcccgttcctcctccctcccattcttcctccctcccttccatttcccctcacccgccccgccccctgcgccgccgtgcccctcacccgccccctgcgccaacgtgcccctcacccacccctggccttctctgacttgagattcatgacttggatcaactctttctctaaatctaaatttaccttattatcaatttttagctattattccattttatgcccactaatttattaatcttggaacccccaaaaacaataaagctgaagctccagatattttatttatatctttcaacatgatttttatggctttttatctaaaaattcattgaatttttattgccctcctcactcatgtcgtcgttaggccggcggccgctttatttagatgtttcccctgcagatacttgggggccccaacaggaaggagctcaggtgaggggaggtgggtgggggcagaggcacgggtgccagcctcctaggggactactaggttaggtcccctgcccctcagtgtccccgggccaggctgtgtcccatgcccctcagtgtccccgggccaggctgcacacctccctggttcctttctggagcacacactgttctccgcgactcttacctctgctcccattttgccttccagcttgcaaaagggcctatgctgcaaaagcaatctagaacattcctcagagaggctgggggagcctccagcttgaagacccagtgtccctctctccatgacccccctgcagagtttctcactggtcttcatccagaccgaggggccctccttcctgttccccattcgacggcacacctgtcctccctcctgagcagagctctggggtctccagggtccccacctggcgggtcttcttggtgctctctgcctgcccaaggatcccccttccgcggagctccggccgacccagatacccaggggaggagtctgtcctgtcccccacggccagaggcccgcaggcactttctgcctcatgatggggtggggcgcccacgtgtcctgcgcctgcctggcgctgcctggttcttctggctgtttccctcaccagcttcctgtctgggggtggggactagggggtggcgggtggccagctttttgacgtttgctgccgttcctggtttctatctgctcttcaatcgcctccatctcaaaggaaccaaccttcatggccagactgggccacctggtcccctgtgtccctccagggtgtgcaccagggcttctgatgagggagacggggttaactcctgcaggctttgccggccaggggactggagttcagattctagctttatcatgcccctgtgacctctgccaaggaaggaattgatgcctctgagctgcagttcccacatctgcagagagggattcatactactcttccttccaggagggtggtgaggtccctggaagggctacccttcctcatcctcctgtgtccactatggcagaaagagtgatttaacattgtggaaggacaggaccagccagaatgccaagccaagggacggctactctcccagggagccctggagaatgaattttggggagccttcccgcccctgcccagaggagtcccccaagaaagtgcagtgttaaggggctgttttcaggagagcctctagtcccacttggggagcctgggcctgagctgtggccggcacctgacttcataacctgaaggcatcagggtttggggatccaggccagccctcttgctgtctggcctcagtcccctggcgtggcagggccacaagctgctttgggagacaccattgcagattgtcttaggaaagaggccaggctagagccctggtcaatgacgatctaatattccaaatctctgctgtgacccaaccctggaggctgaatcagactgcaatccatttagctcaaactcgttttaaagcaattcactatttaacaagttctgaggcgccatgcttttgcaggcaatatgtgaattgaatcatttggtctaatcttagattaatacaaaccaaatccttcagcgaggacagtcttgggagcagctccaggacttcatctcattgtctttgatgaaggcgggtcccaaagaagacctgactctcagccaatggcacgggtgtctgagcgaggaccagggggtggcctgctggggaggaaggagcaagggctttgcggtcagatgacgcttgtttgaatccttctgcctgttcctagccgggtgaccttagacaaactgctgagcctgtctaggctctggtcttccccacagatgcctctgtgcaagacacttgtgcaactagagaactagggtaagaggaatccatgtcatcctctccttgccccacacaggatcttgccaaggcctcccaggatctgcgtctgcgttcagggtaccctggggagcaatagggctgcttggtcctcctcctgtgccttgctgtacctgctgctggttagggagctctggaaagtgctggaaggttttcactcccacctgctctttgaggagcacctacttcttcctgacgtctaggctttgacaggaaaggaaccacatttttacccccttctgtgagccccacagccctgcccttggacatcagcgtagcacactcaggccctgcttctgctgacagatctgccctccaggctgcaggcccctgctcaggtgctgccctaccccactgacagtcctgggcttgcagtccaggtaagtcaaagtccctccctggtgctgtcaccccaaatctggaagagagagactttcctgcctcttgggtcacagccggaagaaggggactctggctacgtgccacatgaagtcagcccaactgtagtgggagagaaacagcgcagggaaggcatacagagaggagaaatggagacatgggatggtgagcgggtcagagccaaagttctagtcctgagcctgcacttgagccatcagttctcagagcaatcctgagtccttcctggaaatctgcttcaatacacagagtctggaccagtggagaagggcagcgccataaaatcacagggcctttgcttcaaaggcaaggccatctgccagccgctcactgtgggtcccttaggggagattctgcagaactgtgtgtggagtcatgcactcggcccctgcagcttcaccccgcatgcgggacgcggatgagagagctggggaggggcccgccgtcctctcccgtggcggcccctctgctttgcatcccttttgtccacctggccaattccctctcaccttttttggctcagcacaaatgtcacttcctcttaggtgactttgctgaccttgaatgaaaaggggacacttcatcctccgggctgatcctgccccctcggtactctgcccttagcaacagggctctttgatttggtctcgtgtgtttgcccggcatgtacacgctctctatctctctcctctacgagactgggggaggctggaggacaagagctcaaggcaggcacagagcagacagcagtgaaaagttactcacatgggatctggtcccacacgttccttggatgtccaagctacggcccagctggtccaggatgccccgttctggaggctgtgactgccccccccaaccccagcctgcccccagttctgcctctcacctgctcctgtcccctcattgcttgaggatagcattaaaccctcatcttctaggtggattttcccttcccttctatgagctcttttcttccatcagctttataccctggacacattttaaaaactgttcatctttgtcgtgggtacatcagatacaagcaagagtgataaaccaagcaccaacaaaatctatgttctctctgattgcctttgtgtagacagccacttccctagcggcagagagatgggcccagtggagtctctggggccagccacaggggctgtggtggtgtggaggccaccacagccagcctaacgtggtgctctctgacccctaccggtggcctggctgctaggactggggcagggctgtttgcagaggaggtagcagagggaccctcataaaagaggattatagatggagatttgctggtaaacacccctgtctgccgcccccgcgggtattatccttgcattagagaaggttttagggaagagaggggaggggagctcaggaatgagctttgccatcacaggcacagaaggctctggggaatcttccctggttgattcaggcctgcccaggtagaacaacaggtgccaaccttcaagcatacggactccccaagtcctcatcccttgaagccctgactcccccagatcgtggcccctggggtcccaagctcccagtgtctttgccaaacatctctgaactggaccctaacccatgttctctagcgtgggagcatcggtataactttctgccattgctgtgctgtccaatgtggtagccctcggccacatgtggctgttgagcacttgaaatgtggctgctgcaactgaggaactgaagctttgattggatttaattttacttcatttaaatttgaattcgaacagccgcagtgactagtggctgccaagttagatagcccagctttaaagacacctgttgagcaatgccaaggatgtcttttccagtgatccatgaaattagatgctggcctcacattttcccagaatgggaggtcaacagcaagccctggcttctgggggttccctgcctccttgtgggaggtggacccaaggaaacagcataaaaggggcttccctagaaaaggtcttcatggcagaccaactagaagttctagggtcattttgttcctccaggggaaaagggccatgcatgctcatactcaggaccagaaaacaaacatcccaaacgaagtacaattggaaagacatttccagtttcctttgtgtctgtatcatatgcagtccatgatctcccatacgcctgggccatgctccccttccctgccctgcctaagggcgcacaggaaatcacacatattgagcacctgctatgcgaatgtcactagcagtgatttaaaattgggaattttttgaaggacgatataatccacacttgtcccaacctgacaggtcacaggtcagcaagcaatgctccataggccaaatccggcccactacctatttttattttatttttgagacagagtttcactcttgttgcccaggctggagtgcaatggtgtgatctcggctcaccacaacctccgcctcctgggttcaagcaattctcctgcctcagcctcccaaggagctggtatttttattttttattttttgagatggagtctcactctgttgcccaggctggagtgcagtggcataatcttgccttactgcaacctccacctcccaggttcaagcaattcttctgcctcagcctcctgcgtagctgagactacaggtgcatgccatcacgccggctaatttttgtatttttagtagagatggggtttcgccatgttggccaggctggtctggaactcctgacctcaggtgattggcctcccaaagtgctgggattacaggcaggaaccaccacacccggcctaactacctatttttgaacagctgtgaggtaagaatagcttttacattttttttaattgttgaaaaatagccaaaagaagaatactcatgacacttgaaaatcatctgaattcagatttctgtgtccgtggtagtttgattgggatgcatccccaccccattcctcctgccgctcctcccctgccctggcagggacctagtaacccccgaggccacccggctctcaaagctggacacatctgctctctgactcttagcaggaagtctgccagcccacaggatgggtgaggtgaggctgcagaggtgaagagtgaaatgacccgaggcagagtccacatcctccctccacccgtgtgcccactgtctcgctctgatgagtgttcccagcgtctgctcctaggccactgggtcgggggctcctggagggggacctgagctggactccagctgagcggggtcttcggaggcagcacagggaggttgtcctggtgaatggcactgtgtgcggcagagcctataggtgggcacataaggcctcctggggccgggggttcatgtgagcagggacacggggagggctgccctgtggcccgctgtgaccttcaggccccatctgctccccggggctccatgccctaagcatgctctgctcaggacgccttgggtaagttgctgaatcctctgcggcttcccccaggcagggcatgggaggtggaaggaaagggatggagggtgtgtgtgtgtcagacacagagacagggacaggcaagggaaacagagacagggagagacagagagacagagaaagatggagagagatagcaggagagacagagacagatacagaaacggagagagaaataaagacagacggggagagacagatgggggaaatgggagagagacagagagaggacaagacagctgcagagatggagagagagagaaagaaagagactgagaaagagattgagagacagggagagacagagagagaaagaagatgagacagatacagagatagagaaagatagagacggaagaagagagaccaagggacagagacacagagaggcaaggagagagagacagatacagagataggaagagagaaacagatggtgggagtaggtgggggcagaaatctgctgcgtcagatgaggccgtagagagctggccgggaagggaggtgcccacaacataccaacctataagtgatgtgcttccttcttgggccactaagccatcactgcccagccttcaggagccctctttggtgtgggacccccactgcgtttgagggggctctgcggccatgctcccttcagaaacgccactttcttttttgaggcatttactttgagctgaagggagctcttgtttgctgttggtttcccctgtaatttcatctttacttttttataaaaataaataaataaataagccctatagtgtcataaaagcaattttgaatatttaccaaaaaatttttccttgctcaactgccatgttaaggggaagctgccaggccttaattccccaatacaactgattcaaaggttgctttcatctgaaaggtgatgtcctcccaggtttcctataaatacctagttgcttcctttctctctctttttgtgtatacacaaaaataagggaacccacggcatgtactccctcacactcccacacgcgtgtgcacctcacacgcggatttatccacgagccccggaatgtggctccctgcagtgaaaagctcaactggggaaaccccagaggaccctgagagcctgatcaaaaagcgccaggagtttgtacaacacaaatcactacagacaaacttgattgcttttttgattagtggataaagggaatggattcgccacacggcctcatggaatattgtgcaattaatccccaattggcttggtaatgaccttgtcatatggcctggaatctggtgaaaagactgcagagtgagggcggtggtagcagctagagcctggggtcagggctgggctgtagggtggtttgggccaaggggtgaatggaaggggagagggaatctcctgtccttcactggctgcttttcctgctgctgtgcttccctcggcaaaccctgctcatccttaaagcttttgcagcctcctctgatgtccccttccggtgacaatcactgatgagggtgcacactcacggggggtccaaggagcatcccgagggttccattgctgcataagctctcagcccacacagccacccgagagaaaggattagaatcgtacccatggtgcagcctggcaggacaaggactctctgagcccaagtcacacatctcccaccccaggcaggctccacctctcgccgaggccctcacagccaccccggctcatcagcaggggattgccgtgagctgctttccccacttggacagcaaagcgcgactccacacaagtctgctttccttgaaactgaagctcaaccctttaagccctaaatgtagagccatttttcaaggttgttttctagtgtgtattagaagtccttagcgttcagggtgccacgggcaaaacttaaacattgaccgtctctggagtcctttcctgggacctgtgtcctggagctgccagtggggagaactgggatatctttattcaaaaagcctaaggccctgtgccctcaggagcccccattctgagaaggcagatgggtaaattaaccaaataaccaaccattggggtagcccagtgtgctgagccaggcagcatggaaggggtcccattccctgtgggcttcctgagtccctggggctctttgtgtagcttttttctttcctcctctggtactgtttgatgtgatccttgcctattggggatctgccttcagccgcacttcccatccctcccaccatccagggaccacgcttctcatccaaggagaccaggggcatgggattgccacagtggttagaggagtatctaaaaatggagtaaccgggttctggagtgagggcccgagggttcctctgattcaaatgagtgagccttgatgtagaaatggcagtgtttctttcatcttaacttcattttgtttatcggatggttctggggcagttgtgggtaggccagagaggtgttaggaggcttcaggggaaagcgggcctgggccttcctcttcttttgtaggttcacagaggaaacacagttggtgtttgggaaattctcacctctgagtgtggggttcagagatgctgaagcccagtccaggcagacaggcaggcaatcgagggagaagtgatggtgaaaaccaaccacggtcttttcaagtccaagagaaagtagtggacagagaataagacaggtgaagagggaaagtcattgcaaagtctagagaggaatagagtggggaaacagcagatggaaacctcttatttcaaagggacgagagaaacacccctcagccgttgatatctccctccatttggctcatcacatgagtcaaagtaatgaacctgcctgtgagaacatgcaaattccaaaggaaaggagatggtgaatgtcacaggtgggttgcttgttcattgcaaccaaacgcttagacaaaaatgtctagacatgcgtctccttcggcaaggagtgagttatcaaaccaccaaaacaacgaaaacaaaacaccgtgtcttgaaaaccagaaaagtcaagaaagaatattgctttcttaataataaatacatttcatgggcaagaattgcaagggaattgtttaaattaatttccgctttgtatgtttggtttatacagggcttaagtcccagctgacagtgatctgtaaaagttctaacatattgaaatctgattttcttgcagccagaatcgcatagtccaaaatgatttctctgtcaactctgctaatcagacaggcagggctccgatggactcctagttcaaccaaattgcacccgctcttttgggggtgtaaataatagctgatgaaagctttaaagcagagctggtggcatttctctctggagagctggttcaagggtatggggacaacagtgagattaaaatgagcaaggagaggtgggggaggccttttcccacctggcagatgtcctgtgtggctctgaggaactttcctcccctctatgccccaccccttctagagcggatgcagtgggaagccaggggaactctgaagctgatggaagggagatcattccagtctggaatcagaggcaccaaaagaaaagctttgcccctggctttggtgggggcccccatcactgggtgccttgagacttccctctccaaattgatgacctgctcaaggctgggcccctccctcccactcagaccttccagctggattgcaagagggacctgatcaatggttctccttaggcccctttctccatctcaccagcaagcctggcccacggtgcccagctctacacacgcaggcagcaccagagaatcagagcagggcggccttcctcaccaacatgccagccccaatgaccccacccactggtcaactctgctcacctgggtctaggtgatgggcccctgagagccatcccgacccacagtccacccttcctgaccttgactttccacccaccttctccaacctggctctggctgttttccaaaaccaaatccatctgcaaaagatgcaggattacttaacaaatatatgaataaacagtaggcaaagtcaacaagcagggatgcacaagaggccccacaagctctagaagcccatcctgggaagtgccgccccaccctgtcccccctggttgggctcgtaccggccagggccccctggccaggaaaggtctgtagcatgtatgtttcatgtgtttaatgaattctgtaaccatcagccattccctgtaccccaaagggtcttaacctaggctctaggaatgaactacagagtaactccaagcccctaaaattataggaaaatgcatacgtaggtacatttccctggtccttggctgtcctgggttctcgacgcctctatggctcccggagggtaaggccccagctgcccatcgagtctgccggctggtgtgtccccacggggcttcgtaggtgctgtcccagagccttagtcttggagctggagccagacgcagaggtgccctcggtctccctgggccgctgccaggcggctgtggccccttcttgctccttctctgttgcgccgtcttccttccttccttccttccctctttccaactgaattctcgtttttcctctctccctagtgcttgtacggctgctatgtccattcctccatcatccccaccttccaccggaggtgctactggctccttcaggtaggtggctgggactggattcttcttctgtctctggtgctcgggaagggtctgtggagggcactgagggcgcggggctccgcatgcgacacggcttcgggctgagagccctggtgagcttgcctagggagacttcggctgttgcggcactgaggccagctcagtggctgggctggtgttgtcatgtgtcaggaaggggagaaggcctggtggcaggggtagctgtcacccactgatgggaaataaacctaggtgcttccagcttccaaggcgcctcagttttcttttgatgaggacaagaaagaaggccgagtatcctgccctgaaatgcctgttggctgaaagctgtacattcattttctctcatgggttagttacaaggcacatgtggaaaacaggctcccggaggttgccaggcacagctggattgattgggatagctgtggggaaaggaggaaggagctccgtaatcgatttgtgatgtctgctgtggcagggatggaacaggttgtggctgggcatgctagccattcctgtgggagagtggcctggtgcccagatctctgtccatggtgtttgtgcacagcgttgctgaaccaggggtgggtaggtacgggaggcccacctggcctcttgccctctggggatcgtctgccagctgtcttgcctgccgtgtgggcgggaaggtctgagggatccatgcagtcggactagacataggtccttttcaaaatgcatcctctgatttgcagctgttcttggtagaacccattccccatggcctgcctctgtcaccccaagttcttactgttgcctctacccaggagttgctgcctgaggcctttcccaccatggttctactttctgttgttcaaggcagcaaacccctggaccttgatggtttagggatctctctgacctggcgggggtgtagttggaggggcctggcagctggggaagcaagtcccccagtgctatgacacaagctcagggagaaaagagtcacacatgccacggagtgcagagaggctgatggccacaggagagctggtctggaaggtgcccacagggccggagccatgtcgatgtggaggccgggctcagcctagacagggccctctatccatcggctctgcccagccccagcctccaaaccctttccattctccctcagttcccagaaatagccgtctgttgttcagcaagttcaaatgatgcccgagaccatccggggacgtgctgatttgcagaggctgcttcccaatacctcaccctgtcatcagtttccctggctctgcctcccctggaggctgacgtgctagcacctgcttttctaattgctcagacctgtgtgcttgaggaggggagttgtcacatggtcatgggatgaggcttttggggtcttgttactaggaattggtcccaaggtgttccaccccttggcagagggttttctcctctacccgatgaagggtggggttccacccgaggccagagttctggcggctgagtcagagtcagagcatgtccttgagtccccagggacaaactctggcttcccaagaaacaccatttatccaaagcagcctgcagccctgtacactccttcctgggcctccagccccatgggtctggtttctgcccttttccttttcggtttcatgccccctggtcagaacacctctttggccattgccctcctgtcggggcagcacctggaagctggcatcctgccagcagcccagccacccgctcctccaggctggtctgctcctccaggccttttctcctgcacccacgcctccgcctgcctcccctcattccatcatgcccttgtggctttttaattccactaaatttactttcctggaatcagacaccattgggcagccacgaggtctgagctgatgacttcccaagctgcattctgctcattccgggtccctcctagattcagctgctcctgttcctcaactcgggccaagcgaggagaggggtcctgctctctgccccagccctccctcactggcgctcctgttttccagcctccgtatgctggaggcatacctggactgattcatgtgtgtctggttcgttacctcccagctggcggggaagttggagtctccccgaaggccaggatggcaggaccaggcttcttcatggccgagctggggcctcttcatcttctctgcccaagcctgggggagccatccctccccatccctctcctctgtgtcctccagcatcagacttgtttctgtgatcagatcacaaagagggagcgcacacaggtgtagggggttcctgctcccccaggtctgtgcggggcaacagcaggttaaggagctaaggccaaagcaattagcacaatgcacgccctgctcggagcccagagcctatgtggcagccggtgccgctcagggcaatttgttctggtgctaattacaacaccaggataatgatgctgtggccaggtttaatttctctgatgttaaataggaaagaagccatgagttactggctcagatggaaattggctcaagtgtgtctctgacaccaattaccaagaaaaaggattaggtggggtccaaggtgtcagggcagtgcccatgttgggagctgaggaaggaggctgctcagatgccagccccgagccagcctggtcctctgaatgcaggaggcactaggaaagggagtgatgggctggccatgctctctcagccccctgcagggggtgagccttctagaaaggtaagggcattggaggaaagagggaggaaggaaaggaagaagtgcttctggaaaaaggagactttctccaaggaatagcacccactgccccacctttgtagcctcagttcagtggccgcctcctgccggcccactgtgaactcgctcctgccctctgagatgctccagctgatgtcacccaaggccacttagcacttagtgggcacgtctgcctatgttggcctcgattttcctctccaactagtcagctcccaagggagagacatgaattcctgtctcccctgagtgcccagcccagagccacagccaccacagggcaggagccagcatttgggagagccatgttctgctgtggtgacgtatccaccccggggcgggaatgagcaggcctcgcagactcggggcctggagctcaggattggtgccaagatttacagagaagggcctgagttgacgtggcacgtaagcttctgagtcatcgggctttcaggggagggtgctacctctctgtctgtgtctgtctgtctgtctttcaggctctctgtctctctctgcgtctctctctgtcatgttctccctccccatctctccattgctgacaaatattctattaggctatgagcgaggagacgggcagggagcctctcacaggcagggcactagagcccatgtggcccataggctcataaagccattggcatgaccagtaaccaccatgtgaggtcaccaggacagctggggagggaccagatgacctgagctcagcccactccagctgggcagggccagagccatgacctggaagaggccacctcttcccctctgctggtggcacccatcctcagcattgctgggggctctgtgtcacagctgacagggccttcaggctcccctgagcctacccagtgcattttctagaaggatttctgagacccagcgagagcagggccaggcccaggtcacccagtgggtcaggggaggagcaggcagtgctccgttctcccgatgccttggcctctgcccctaccgcctgatgtgggtgtcactgcagccgcaggaccctgagcctcgtgaggtagaggaggcatgaaggggtgagctggacagagcggtccctcctgtttgggattttctgatggtttcgaggggtaggcagcagaggttcagggccccctgacctcctcatgtgcccctttctcctggtcctccaccttccgtccttctctgcattctccgcctgcccccgcaggggaccaggcccccattccaggccagacttccctgcagattctgtatggctcatttggaaactatttctgcttctaatgagtgttttcctttgtgcccttgtcctctaaaatgcttaatgactgctttccgtgctcgagtgaagcgggggtgtgtccccgcatggctgccattgccaggccggagctgtttggctgccaagcccggcttgcttgggtggaggcagcggggggtccttcctggcccacgctggcagcacagaccaagcctgtgggggcaagagcacggctgcggggagacgaggaccctggggccttaggagaccacaggacagggtggcagtgcaggtcggggctcccacatcactggaacaggcagatctttgagcctgagttctaggagttgagctccttgggggactctggattcagagtctgaggagctggattccagctctgcctggacctacctgagcaccaggagcggtgaccatgccactggacacctctggtgctgactcctggctgggcagtgagcctccaccacgcaccacacttcacctgggagaaaacagcctccgagaagctccacagttgctcagtcaatagggggcaaccatcgctgccctccgctgcctcccctgggggcaccaccatcacccctgtttatagatgaggcatttgagaatcagagagattgggcaccttgtagcagatcacggaagtggccagaaagtgggacagctgctgggccctcagcctggatgctgtctgcttgctgcccccacatgagcctttgccagccctgggtccccctagaagtagtgggtgcagggcacaggggtgccatcaccccctagagcaggcaccgtgagactaagcaccacaggcattgtggccagaacagagcccagccacagcagcctctgtggctggtgctgctgagtggggactcggggcggggacaatgccagttcaccatggggttcactccaggcggtcctggccccaaagggcccccatgtccaggagcgaagttgcctttacctgggactcaccaccccccaggagaggaagaagatgccttctccatggggctgcctctgggcaggatccaggcttccccacaaggcctggggctctgaaaccaggttcacaggggagagatgaagctccagatccccaaatcagtgggccttccatccccagagtggtcagctgcttgtccaccctggggctgagagcagggtttcctagggtagttcccagagaggggagaagggcaaggctgcagggagaggccctaggggagatgccccggttccactcctgccccaggccatctgccctccatgggagccctgcagagttagccagaacatggatctctccagccagagcaggtcccattggcatacttggccttttggcccataggaggaacagctggggctggggcagctccatggcagagggaccggcagtcctagagcccaggctcggggctcccccaaggaggaggaggaggacaagtggcctctccaggctgctacagcctctggagttccatactcaggccctagagaagccacttctgctccttgttcaggagaccttgcagccaacagccttttcagcctctgccccagacacaggccctataggcctcagcccaggcatgcccccagggagtcctcccttcatgctgcagccctcaagaggggccgtggggccccctcactgctgaagaatcttttcagagggacaggccctgcaggtccctgagggcaactgagtcccaggcacccccagccaacagagaagagagtaggccgtgagccctcctggcccagctccagggaccgtggcacctcatggtgggtctgagatgagcccagctccacactggggcattagtgtagtttttctccactgacgccggaacctggctgtggaacgcgatggcctctctgagccgactgcctctggctccccaggaagggtcctcaggatgtgtctcttctgggagcaccaaagcgtgctgctgtgtcaggtctaggcatcctgcagggtccctgaaccccagcccctgcctgctgcaaccacacaggaggctgcccttccggggccacccccctggacactgggtgagtggatgggcaccatcagccctctgtgtggggtggggtttagacccgtcaaatagtggggttaggatcacccaaagaagcacctattagctgtgtgacactgggcagtttgtctaatttctccgagtctcagttagctcatccataaaatggagccaacagcaaagaagcagctattagctgtgtgactctgggcagtttgtctaatgtctctgagtctcagttagctcatccataaaatggagccaacagcaaagaagcagctattggctgtgtgaatctgggcagtctgtctattttctctgagtctcagtttgctcatccataaaatggagccaacagcagcatggaatacagaggctgttggaggagtggaagtctgcattgatgccgtgcataaaatgtcacccagtccctggcacagggcaagcatccacgaatgatagcttgatgctgccagcaccaggtagacctgtaagtggacatcctgaatcccggagaaagcgtctgtgacatccccaccccatccctagcatcccacctctgcattctctctcccagaggcgttgagctaggctgagccagcccctcccaaagcctgagccaggcaggagccccgctggtacaggcagcctctctacccttcataccaccctcttctgcagcccggacagagaagggagcagaggctacaccagggtggtgctgtcattgcaataaatgtcccttagccacccaagagacttgatgtctatttggagaatgagcagctctttggcaacccaagtgtctccccagaagtgcagcctctccccgcaccccactccaggaccatgccctgcagccctcaggaaggactgccctggcggtgagctgtgagctcggtcatggaagggactgcaggccaagtgggacaccctgaagagtatggccgcgctcgcccctcagcccgtggcctcctcctggtggtggggacctctccacccggatgagctgggctcttccctggcaggccatctctaggaagcacaagctagcttaacaggatatcatttctttctttctttttctttcttcttttttaaaaatctttcttaaaatggagaatattatagcttcataaaaaatacctgagctttttgctcagcaaccatttttatgtttcatcagggtgaaatagaaatggcttggaaataaagcctgacggcactggctctgtacctgggccttctactgccatctatcgctggggcagggctccacggctcccaccaaatgaggcttggcgggggggattagagcaacaggaggccttgctgtcaggctgacactctgccccaaagaggacatttggacccatgtgcttcaaggaaaggaagcaagtcgctccctgaggggtcctggcctccacatctgggctcagcagggaggggaaggtgtcccaggcctgccagaccctctgcgcaccatcccgcagcccagccctggtatctttggtgttataagcaccctgtgttaccttcagccaccaagagtggggacgtggctgatgccgaggtgcccctatacacgctcaccaccgtgcatggctcaggagaccacagccctggccgtgcgtgacggccactgagcgcttgatcagaaacttcaaggcctggcttttggttctcacagctaccctgggaaggaaacagggcaggggtgagttcgtcccagtgtttcatagaagaagaaactgagggtcaggaagagaataaggggctccaaaagacatagggtaggcagggccctggtccaggccctttaaacagacgtggtccctgtcctgggggagcccacaggccacagcggccaggcccaaggtgcacacatgtgcagtgagcagagatgagaaggaagagcagcttccagagcctggatgtgctggcctcacagggaccagtcctgatgccaagaagggcaagagaaaggttgaccgaccctgacataaaccccaagtttcccctgccctggcccttggcgtccctgtgaggctggggtctgatgggacctttcttccacacctttggccgccacagctgagctgaccatgggcacactccagagcacttggacctcggcaggggacactgagccagcccgctgtactccaaggggtagctggaacttggcagcagagacaggagtggccaggccctgacatttgggcccttggatccttgcatggacagcagatggaggaccctgtggtgtcaaagccatttctgaccctagcctagttggtggtccctaaagctggtcaagacggtggatccagagaaggagacacagaatgggcggggcggtcaggggaggcttcctggaggaggtgagcccaaagttgaaggatggaagaaatggggagggggtgtttccatgccctctgacatggggcaagcatgggtcacagtgctaagtgctcagtgagactaacaaggccacttgaggggtcccagttcccatgagccagttccacacacctcacccggcacagggctgtctgggaagaggccctcaggacaggtgtcccagcaccggtgccagccaggtgatctggaggggagcatggggaagggcctggaatcctcctgactctctgctgggctcagaagagagcaggacaggaagagcctcaccagaccagtgcatgcagcttcaacatggccatgcaagctccccacagctgacagtgacagcagtggccatcctcatcctcatcctgtcaccagtagcaataacaacagtcatcgaaggctgcgggcaagcactcagcctgcctgtgaggccagcatttagtcactgtcaccatgtggaaaggaggctgggtctgtgcttcaggtcaggcctccgcagcccccgccatgcagagggaaggctggctgaagacccagacactggctcgcttcacagaccttgcaggaaagacaagaccccagcagacgcttgcgccattagataattaggagaagggcaagggggtgtgagggaggccagggctccagcggtgccccaggtaggaggaaaccctggcaggagtgaccatggtgacactgagaaactcactcagtccagaagctgcgggccagggatagaaacccagccctggtcttagaagccgcctcgaaagcttcatctggactagtaaacggcaaagccctcctgcagctggggaggggcgggttttggaaaagagagttgaggatgaaaggttgtgtcagccagagggttcctaagctgcctcctgggtctggcttcattctagctggcagcttccacatctttctccatttaatgtcccttgaataacgtgacgaggagataaggtagacactgggaatttacggtgctgtgcaaaaaattgctcaattccattaagatttcaggacccttgccaaggctgcacggcagagcggacagtatttcccgctcagacatctttgcctgattgcagtttacgatgccaaggccactgctgtacccacctaaagcctccagaaaatatggcagagctcccaaaacggccattatcctctctgagaaaagtcactgggcattttctagaagattccctcttcccgattccttccttcacccctccccgcctctggggactgggcgacaggaggacatccagtcggctttctcagagggtccccttgcaggccccattgctcacccttcaccttgcagactgcggcggccaacgtctgctatgtggccagagccctctggggaggggcaccctctgctcccgccgtgtggacgagtgggtactgagtacaggggagacctcggggcatcaggaaagtcttcctcctggccacctatgtgggaccaccagagccaaaggttttgaattcatcaccacccttatgagccaagtgactctggccaactgaatcaacttctttgaaccttatttcctttttggtaaaataaaataaaatacctccctcctgagctgaatgggaagatgaattgagctaagacacacagaggtcttttggactcggcagccccctgggaagtggtggctgttttcaccccaccaggaccctttccagcagcttttactctaggggattggacgggtggaatagcagtggtcggggaagggggtcccctgagaaggtcctatccaacccagtttgcaaatggcaaaatgctaggcttgtgagatgcaactgtgattaggaacaaaactcacttgttccgcagcctcaggcgggaatctggtgtctggctgagtgagatggaagctctgccttctggcacttgtctcctgtgtgccaccctccccgagcctctctgctccacaccatcccctgtgactgccaccaggacctctcctggcctggcctgccgacgctcctctgtccctcagcccttagggactgggctgcccaggcttgactgggagagaggaaggatgaagcttccggagccgcagttccttagagatggaaattattaattagtcttattatccagaacttgtcagtctcttaatccttccgtcggcagaggggtttatgcctccacagcgtgtgctgtcagcttggctaaacaatcgcttttcatatacagccagaacaatgggcaatacagtttggttactatctttatcaagccaaacaattcctgccccctctaagaacatccttcaaagatgtggagaatgcagaagctgcttaatttcccttctagatggcttataatatggggcttttgtttaattatccttttcatgtaatcttcagctgacattgtgtccttaatattctaatctcctttggagcaaaggggagactgtagtttccaaagcaaaagacaaaactttgcctcaaggaaacactttctcttttgcctctgacgtgattcaaagggcaaagagtgaaatccagacgtagtgggacagaatgcagtggaagacgtgggcggtgggtgacccactctgcgtgtggacgtcagcagcttgctgggcctccagctgcacccagctggtgatgttggtctgtgtgggcgtgtcagagactctagctcaacaaggaagtcccatgacatggtgtcatcactgcttttagcaccattaatatttcagtggctctcgggatgcaggttgtatattcccacgggagacacaccacctgcttcggactcctggcaaatggttttgcctagacaggtgaagacaggtgcgcccaggtacccacaggtgcacacagctgtacacaggcgtcactgcgccacaagcctcccctctcagttctcctgccttcatgctggagtaaggatctggggtgggggtggtacctgaaggaggcttcttgccatccccatcaccaccccaaaatgggcaggacgtcctgggggattttatgctctttttccagacatgccagggtccctgtaggtgatggggaatattaacagagctgtcctctcactccacctggctgctgggagaaggcagccatgagcccagggtgtgtcttccccaggcctcattgggctgtcatgtgagatgcgctggtgctggcgagcctcctgcccagcccagctcagcctagctcagctcagcagcatcccaagcctgaagcctctggaacctaggccacctcccagcatgcagagccatcctgcctcatgtctttctttgctgttcctgcaattctgcctctctacctagtcccttatctgcttctgccagagcagccccactggctggcagccaccgaacccacatagccaagtgctcctgtgggttcagcttcccttcagctcagtgttctgcacccctagaagatatatgtgtgtgtgcatgtgtgtgaatgtgtatatgtgtgtatgagtgtatgtcagtgtgtgagtacacaagtgtgtatatatgtgaatgtatgtgcatgtgtgtgaatgcttgtgtatgactctgagtgcatgtgtatgtccatgtgtgagtccgtatgagtgtgtttgtgtgagtgcatgtgtccgtgtgtgtgcctgtgtgtgagagcgtgtgtgtgtgtgtgagtatgtgtgtgtgagcgcctgtgtccgtgtgggtgcatgtgtgtgtgcttgtgtctcagtgcatgtgtgtgcatgtgtgtgagtgcatgtgtgtacgtgtgtgtgagtgcatgtgtccgtgtgtgtgcatgtgtgtatgtgtgtgagtgcatctgtgtatgagtgcgtgtgtgtatgagtgcatttgtaagtgtgtgtgtgtatgagtgcatgtatatgtgcatgtgtgtgtttgtgcatgtgtgtgagtgcctgcatgtgcgtatatgagagtgtgtgtgtgtgtgtgtgtgagagagagagacagagagagatatcctcgcccctagttcccctctcctcctcttctccccctgctccttccagctttccttctcctccaggccccgatgaggctcttggagaggtcactaatgacctctgccttgctataccagaaggtcactgtgccatcgtcatgtttcctggcctcccagcagcacctcttcaggcggccattccctccttatgaacgctccctgctgccgagacttcccggctatctccctcctttctgttcttggcaatccctcttgctcaaccccccgatgctggactatccctgagctgctgaggccttctcttctctgtctacactttctcctgggatcatctcatccagccccacggccccagtgccaactgtatgctagtgactcccacgttcatatctatgtcctgcctcactgctctgcaccagatttttacccgactcaacatcctctcttaatgcagaatctgcatctccaacttctcacggctagagcaggactcatgatgatttcctccctgaactgctcttcctcctgccttagagcatcgatggctcgccgtcatgcagaggctcaagccaaccctccattatgcccctctttccctcactgcctctttcctgctcagaaatatgtcctgaacccacctccttctctccctctcttctgcttcccaaccctaagccacggctccctcctacccagagctggagtccctccttcttagcctgtgctgcactctccacaaagcggtgggggcagccacttaaatcccaaatcagatcacatcacccttatgcttcaggcagttcaagaagtctccacggcacttaatgtccaaaaccttaccgtgacctctgaagacctgtacccttgaccttggtcttcctctccctgctcactctccagccatactggcttctttctctcctcaaagagtcaggtcctttcgtgcctcagggcctttgcacatgctcctccctctgactggaggctgccctggaccttccatggttcacactaagattcaggtctcctttcaactttcaactccacatcaaagccctcttgacactccatctactgttccctcactctctggcaagcccttctgttcctccctccccagcattttatgatgaaatgtttatgatatacagaaaagttgagagaattgtacacacacccgtacagctgccacccagattctgccgttaacatttgaccatatcatttgatcacttacgtgttccacctatccagcaatttttcgaggatttcaaagtaagcaacagccacagcacacctcccccaagtctttcaaggtgcatagcattaaccaaagttcaatatttgcatacagttcttttttttttttgcttttgaagtaaagtttatacactgtgaaacaattgaatgcatacatgttaagtgcactagttgatgagttttgatcgatgcgtgcgtcagtcataccctaagcccacatcaagatttggaacatcgccatcaccccagaaagtacccatgtgtccctttgcagtcaatacccacttcacccccagaggccaccactgttctgatttctccactataggttcattttttctgttctagaacttcgtagaactggaatcctgcagtatatgcactcaggtatatacttggcttctttcactccacatcgtattttgccattcatcatgttgctactgcctactgtgttatttatgccttgtctatccccccaagcccagccccatccttcaagcataagctccacagggtcaggggcatgatctgttttgttcactgctacatttggagtgcctggagccatgcctagcacataagtacttgtttattggataggtgtgaatggtgtccatccatccagcaccgggcttcctgagggcagggccaggtcactacttcctggggtttctcctaggctctcccacagctgcccctaggtccagctgtgccccacgagcacaagcgtcagcactcggtaaagacaccagaatggatgcgctctccacgcagtgtgtccccacctccctccatcctcctgaagagggagaagacatgctctttagagatacagtttaaactggccttagcttgggcagaactaaagcatcagagagcctttggaatgcccagaaagggtgaccctggtgacaccaggcatgagaattctctgtgagcttagcttggaggattgagaaggaaattcggggcagaaacgtttgttgatcctgaattgctaaaaggtttcttagtttggagaccaagttctcagaaaaacactgtcggttccaaagaaatgagctcccatggggtctcattttgccctatctgtgccctcagtttctctgcagcagaggaggtggcattggggtgcaggcgtctcctgtggaaagtccccagctcaggtccctgatgcaggggctctgtcaacacctcctctcagtcagagtgatgtgagctgtaaatgtgcccaggccccaccccatgtcatcccagggtgagcctggagccagtgccagccaactggggccacctctacagcctgagagggctgcagaactccagacaggaggctgagccaacccctctgcattcaatatgtctcagcctctctcaggaagctgggccccagcagcccgaggtcaagggggaatccttcagccccctgcaggctcaggacatatttgagagcaggaaagaggcagtgagggaaagagaggcatgaaggagggttgcatggatggagatttgtcattgcagtcagaccggaggaagagagctcagggaggaaatcaggagtcctgcttcagccacgagaagtttaagatgcaaattctgcattaagaagggatgttgagttcaatctaaaatctggtgcagagcagcccgtggcagcgacaagaagccaccacggccagagactgcagtctgggagcctgggccggagggagaccctcagctcggggagctcttctccccaccctgaggaagggcagagacaaggaatgcagccccctcagatcgcagccaaagccactgggaagaagcaagttcccttcctttcctggggagaactgtaaaagcctctgggcagggagatcagccaggaaccagagcaggggctggaggattcccccttgacctcaggctgccggggcccagcgtcctgagggaggctgagagctggcatcttgctgaccccaggacagggcagtagcccagggcggggagcagggggttgcagaacagagtctcgtcccaccctggggagggaaacctcaccttcctgcagcctcctgctgactggaggactcctcaggtgcacagggagctggagaacgcagcccacaggccgtggcaggaccccaggggtggctcctggagtcggccagcccctgacctggctcccgtgagcagcctgagctccacacacctcctgggcctgttccctcctggggcagaggacctttctatcatttttattcccactttgacccttggccagggagactgggggagccccaccttggccctgcacttactaccctcgtaggtaggaagtgctcacttcattatgggctaaaatattgtagacccagcattcactctgagcctcaccaagcaagagacataaaacacagccacttgcagaccgtggcctggggccgcagggccatcaccagctcatcccagggcagacccggtgtgggtaggtgggtgagtacctggcacagaggggggcccacctcaggtccgccttccctcggggggctcaccagcctgactcaggctggcccccagtcccaggagactgagcctctccccaggaggcctggaaagggttgtcctgatgcagccgcaaggtcaggccctgggtgttcacactgacctgggttctaatcccccttcttcaaccacgtggagctgtgtcacctcgggctaattaacccaaaaccaggggctcagtttcctcatccgcagaatttttaaagcactttgcacagggtcggacatagaccagcattcagataacaatcgtggccgggcacggtggctcacgcctgtaatcccagcactttgggaggccaaggcaggtggatcacaaggtcaggagatcaagaccatcctggctaacacggtgaaatcccgtctctactaaaaatataaaaaattagccaggcatggtggtggacacctgtagtcccaactactcaggaggctgaggcaggagaatggcatgaacctgggaggcggagcttgcagtgagctgagatcgcaccactgcactccaacctgggcgacagagcgagactatgtctcagaaaaaaaaaaaatcgtggctgttgtcatgaccgttgtgttgttacaaaaccacgtgataacccctgatagagccgcccgtgctgagctgggcccacaaagaccccgtcctaggctctctcccctctctggccatcagttgagttgtacactgtgacccaccaggccactgcttccagcattcacagccaaagaccttggccaagcaccggcccacgctcaccatgggccatgcctgccctggtgactctgggaatgtccccagagctgcccggacctggatccagccccttctgttgcctccaaaaggcttggattcagaattccacaggaggatcttctctggctgcccatccccagtcccccaccctttcctggccaatggcctccctgtgtcccctgatgtctgagcctgaaagccacggcccttgtgcgcgcattacatagctgcagttgccagttgtcacccatgtctccatcgtgcctcgtctctcagggtgtgtcagagcagtcactcccactgccttaggggagacaagaaggaagccccatcccaccaccctcctgacagccactcgtgctccctgccacatgctgctctcagctccctgggatcagctgcctttgggggcagctggggaaggtgaaagggtttggtcatggagcctcttctgccaaagccataattctgaacttggagtagtatgggcagtgccgggctgagagccacagcagagagagtgcagcatgcttggggtttggggctgacgttccttgccagagtcactggcaggatcttctgctgctgggaccctgccaggctctgggcccctgggtgagtccaggagagcccctcccactgagtcacaatgactctgccccttccccaccaggcgaggcaggacttcagaaaccatccggcccagtgccttgctttgcatgggaaagctgtcacctagggcaggccaatgacttatccagggacacccagtgacttagcagaagagctgggcttgaaccccaacttcctgactgcatggctgggctctttctgagacttccctctcaatagagatggtgggcaacccacagcacttttaacactccagaccagcttctcaggccaccccggcatgcacctcagccgccagctgttggtgtctgatcagagagtgcacgctcacaacattagcccaagttgagcttaattagataaaagatcattctactgccagaaacagaccatgctttcccagctccagaagtgacgtttgcatataactgctgtttgagatgatgattgcctctttcaggaagagacatgcaactgctcctcaattcggtgtgacagtttgcagaatggccagattttcgtaggtgttcagattttgtcctgcaaagcagtggtatgctggaaatgcctaacagttggctctccaggagaaagaaaaaatttctgattggtaacgtttgccaatttctatggtgtaaataccaccactgtagctgtcttcaagctaccaacatgatatcatgatatccattgcaaaattctcaaaaatgtaccaggctgctttcatgagccagtacaggccagctccaacaacccagtcttgtattgcctctgcacatccaacctcctaggacctgtttgggcctctctacttctggccaagactgataatgctcatgccttaaggaatgaaaggcagggtctccctcttgagcctcccctggggcaagtcatctgtcgccatggagacttccaaggctgacgggggcctgctttaggcctctgagacctgacttccagggtggtctctgtcccctgttgctacagctcagctcctccagacctaaggcttagctaatctcaggctccctgtctgtcctgtgtccgggatgacccaagtgcatctttcatcagggtcatggcagtgccgctgttgggttccactttgatggtcaaaatgacactctgggtgaaccttgtctttcctccctggagctccatctccccaaggcaggatctgagggaaggtcctgcctctgaaagccctgtgagcaaccccctggatacagaagcggcggcttccccagtctgccctcccagcacacccaagctctacccctgacttctctagggaagtggcttaacctcagcctctctgggcctcagcttcctcacctgtacaacagaaatgagaatagcacctgactcaagggttgttgggaggggaaaaatccctaacaaatgtgaagcacttagcgtgatacacggcacatagtagatgctcaatgagcacagatgctcctgataggaggggctcctttctgacccgcagctggtctgtctcccatctatgcgtctcgtgttcctccctcctgtagcaagtgcatgaaggcccctccacggttatcggctactcttcaagctcctcagttaaccatggagcaaagagttgtggccaccaagagggaactaagaaggcagcactttggggtaagaaacctttactcagggtcaagccccaccccagctctggggccatgcccagctacaccaaagctttaaggcaaagggaaaaatcagtcagactgaccctgtctttatttaaaatgttgatattttgttcatcaaggattcttggattaattttgatattttaaagtattgcactgcagtggcatttgtcttgatggctgagtgtttgggcacctcttgagatttccaccctagtgccagctctgtctggacgtccatggaggacctgcccgtgctctctagcatcccattcagatgctggacctgctgcagcctgcaggtgaggctgaggctgaggatgcggtgtcttctcagctctctggtcccgcacagggcctggcttacagcaggtgctcagttcttgactgaagagcagagggacaagactgcaagaaactgagtgtccccaaaggctgcactttccagagcattcttatcgccccccagaggaagggatcccaggcccttgtctgtccttcaccctgatctcctccatccccttcccctctgtccaggttctttgctgtttctgctgagcccctcggttgctcacgtcacagctctgcctcaggaccccaggccctgctgggagcatcttagccattccccggagtggtgtcgtttgccgccacctcccacacagcctctcaggaaaagcctgcctgcctttggagccaggctctcccttccctttctctgagactcctcccatctactctctgcagtctctctggaatcttgctagagtctctctgggtctctctagaacctctctagaatctctctaaaatctctctggagcctttctggaatctccctctagaatctctctgcaatctctctagaatctctctaggtgcttgatcccaggagctctcaggtgaccagagcctttccagcagcagcgcctggacagggggctggagcagctgtgaggctgggccaagtgtgggtgctcctggtaggatgtgggatggaggcctggagtggccagggatggctccagaccctggtgtctggcaccccactggctccaaggagtcctcattacccccagcttcgctcctggagccccaaggagcaaagggaccctgagaggggctgggatcagggacaacaactcagcctatttctgcccatcccatcacacacacacaatacacacacacgcacatacacacacatgtacacacaatacacatgcacacacatacatctgtacacatgcatgcacatacatctgtacacatgtgtacacatacatgcatgatacatgtaacacatacacatacaatatacatatacatataagcacatatgtgcacacatataaacacttgcatacacacacatatacacataaatatatacatatgcatacatacccatagtacacataaatgtacacatatatacacatacatgtacatatgcacatgcttgtaatttgcaatataaatacacacatgtaatacaaatatgtaccttaacatcacacacatatgcacatgatatacacatacatatatacacacaatacacattgcagacgtgtacatatgtacatttatacacacatgcatacccatgcacacgtcacacacaatacacattcacacatacacatatacatacaagcacacacacacacacgctgccacccccagcgccacatgggctctgacatttctgcaaagagggacacagagcctctgggtaaatctgagctctccccacctcagtcaccttcggcaacagctaccacactccgtggcctcacatgcaagaaaaccaggatggctattatttggggcctcctttgccacaggtgggccctggcctgggaaggggggccatgatgcctgccgccccctagacacactcccatttgtttctgtcccccgtttccagatgctgaaaaagattcaacaacctagataaggccctctataggaccttccagaagagctcaaatcaaatcacagccaagagatctttcgagggtctttgcaggggaaggaaacagctgtcagggcaaggcatggctgatttgaggcagctctttagagagaggctgtgtttggagaagatgtgtgccattggcatgcagggcactggggctcccggcgagcctctgcatctcgttctccaggtgtcggaggaactcactccttaggcatccatgcgtgttaggggtcaggtagtatgccaggtgctagggttgcaggggtgatccagcccttaggaagctcacagtctaggcaggtggagactcacaagggacctggtggcaagttatttggaatgcaaagcattgcgcagaatttatccatttggtaaatacacactcgttaaagtggcacgcatccagcctccccaccctcctgaggctgtagtggtggaggcgatcctcattcctttcctgtccagccctccacaacccctggcccggagcagttcccatgccaggggccttcggccagcatcccatgacctagacgagggtgggacatgtccgtccccactcctccatgtctggccccgagcagacggggtgactggctactggcatcatcagcttgcttctggctgctcagcagatggggtgactttcagcggttacgggagggcacttggatccccgaggaaatgttccacgccgggatattggatctcacaggcctgctctgtggtgacgtcctgaaggtgaagccctccgcggcagcctctgcttcagggtgactgctttctgctacaggagtgactcgggcatcctagttaatgttgcagagtacgataggagcaaatagctcttctccccacatccaggaccagcctgtcctctgggtgaatctggtgctgagcttcccttgctatgcctcctcgcatgggattgcaccgtgcacaatgtggagatgtgctttccataagagatgcagttaggaatgtgcggtcactgccgcgggcatcgattgcccagaacacaacagtgagccctccataaagtcggaactgtcattatcaaaagcagtgattggccgggcgcgatggctcatgcctgtaatcccagcactttgggaggccgaggcaggcggttcacctgaggtcaggagttcgagaccagcctggccaacatggcaaaaccccgtctctactaaaaatacaaaaattagccgggcgtagtggcacgtgcctgcaatcctagctactcgggaggctgaggccggagaatcgcttgaacccaggaggcggaggttgcggtgagccgagattgtgccactgcactccagcctgggtgacgagagcgaaactccatctcaaaaaaaaaaagtgacaaagcagcccctctgccagggagtggccagtgtgacctgaggccttggcacccagccaccgtgcgttaccttttgaggtctgtgctagaaggtgctgctgccgcaggagtcctctgactgggttgtcaggccgagatcctctccttgatgcagaaagtgggaggtgctttcctctctcaggcaggatgctctttcctgggaagactttgggcctccaggctgaggacataaccccaaagcagtttaggacttctggcttcggtagcaaagatatttccttctgtgcttgtctcttccccactccagctccgatccattgactcagcttttgttctgtgaatgtcattttctttgaatttgtgtgagttttgttgtttgcaaataacctaatgaaactccttctgttcccttccaaaacaaaaaggaggctctagcatggtctacctccacatctgaactcctccaagcttttctgatggtgtttgggctgtacagcaccctgagagaccacccccggcctccatgtaccccctgccatcacctgagccgcactcaccaaggcagagccgggaggactccacccaccctctttcctgttcataaggtttctcaaggagcctcttgatgcttgtttacttaaggacgggcacgggtgaactctcacccccacctggtgatttcacaaacacaaaccatagaggggaaggctatttctctcactttctggaaaaggccaaaactaaccctgaatccccccgcccatgtttagagtagacacagagggaagatggttccggaatgttctgcgtgtactgccgattgtccaattgcttaaaacagggcttggcgtgcattgttttggtcattagttaaccaatctgggcggggaaaaaggcagagcgttaaataattacaagcacttcggtgatttttttttctactgactaaggttaaaatgaatagtgttgatccgttgcccaggcagcaggcttgttaaaggaaatggtatttaaaatgatttttgagccaaagcaatttggctgcttcaaggcatcctttatcttttgctttcaagaggataataatgtttaaaaacgaagtcactcataccatttcctgtcgcgaagccagctcagtgatgggcagagcttcctctgggtttgtttacttgctccatgatggaaaatgcaaacttaatgggctcccttctgccgaggctttggtgttccgacgaaacaaagacccatgctgctgccgaatctgtgtccacagctctggccagctcaccctggaagtcttgattgccacattgtggatgtcagaatgtcacctgcttggttagagcttctaaacaggaggctcaaggccactccctggctctagggtggagtcgaggaaacctgtctaggatgggacacgctcccactaggctcagggtgccctcccgtccaagagcatgatggtcaccccagctgggaagttgctaagcaagtcctccttggtagagcgtctttcccatcatcctctgcgaggaaggccagggcgatacactcagcttatagagtgaagtcggcagaaagcacaacttctcagtgaagaggataaaaggaaggcactacgggggcccaggacctgctctgccctgcttagggctgggcagggcttacgggcgtgacatgcatagaggctcagaagagctggctccggccttttgcagtctgggatcctcagctggggtgtgcacatgagcaagggtgctctatgcccctgccaccagcccccgggctgctcaggaggcagcagtgaaggatggaaagggtttccatggccatgaaagagagagagctcatccgctcctgcatagcactgtgagggcttgaacacacacacgcacgcacatacaaacgcaaacctacatacacacacgcgtgcacacacacacacaaatgtacatacacgcgcacacaaacacatacaatcacacaaacacaaacatacgaacacacacacacaaacacaaacctacaaacacacacgcaggcacacacacaaacacaaacctacatacacacacgcgcgcacacacacacaaacctacatacacaagtgcacacacaaacacaaacctacgtatacacatgcgcgcacagacacacaaacatacaaacacgcacacgcacaaacacaaacctacaaacacacgcgcacatgcacaaacacaaacctacatacacacgtgcacacacacaaacctgcaaacacacacgcacgcacacataaacacagacttacatacacatgcgctcaaacacaaacatacaaacgcgcacacaaacacaaacctacaaacacacatgcacgcacacacaaacacaaacctacatacacacgcgcgcacacacacagacatacaaacgtgagcacacaacacaaacctacatacacacacgcgcacacacagacatacaaacgtgagcacacaacacaaacctacatacacgcgcacacaaatacaaacacgcacacacacaaacacaaacctacatacacacgcacacacaaacgtacaatcacgcacacacaaacctacgtacacacgcacacaaacatacacgcgcacaaacacaaacatacaaatgcgcacacaaacaaacctacgtacacacacatgcacacacaaacacaaacatacaaacacacgtgcgcacacacaaacaaacacgtgcacacacacaaaaacacaaacctacatacacacatgcacacacaaacatacaaacacacgtgcaaacacacaaaaacatataaacaggcgtgcacacacataaccatacaaacacacacacgcgcaggggcacacataagaaagtgccaagcacagtaccaggcacgcaacgacggatccacacactttagatccttctctgacctttcttttattcctcaaaagcacagcatccatcccccagggaactgggggggggggggggtcagcggaagagtttgtccttgaggggacattgcccactctgtaaactcagggcaccttctcgaggattccctcaaagggttccctggccacgcatcctacagaagtcagcgaaatgcagttctatgaaatgaggctgttgggagattttgtagtcttgtgggtgtgtgctctgtgttcagcttgggggtcacgtggcacctgtcgggggcgggatgctgctgagacctctgcagtgctggatggccccatggggccatgtggcttcactccccgtctctgcctcccaggctcagcaggccacccgccggcctctcctgcccatctcgggagggctagcggggtaatttaggatggttgccactcccccgtgcattttaaacacgtttccaaactgggttcattctgcctttgatagggaggtggccttctgggtttttctttcaagagatgcagatttcatggactgcgattcttctccagatctgctgttcaaaaaaaaaaaaaaatgtaactcagaatttctatttgttcagagggggaaaaatctgcttgctattcaggccctagattttcctgagagattagtgtacttgcctgccaagatgttagctaaaggaaaacacatttgctatagatcagaaatatttatccttttctgggcaggagatccggagaagaacctcatcagaatgtacagcacctggaaatatgaataaattcaatctcctgagctgcaggcatctgccaggagggctgaggcatggaggggctctggccgtctccggggagttgaaaccatgagcgggaagccaagagcagctgctggggtctgggggatgcagaggtcaaaggaccaagaggggccgggtgcggtggcttacacctgtaatcccagcaccatgggaggccaaggcaggcggatcacttgaggtcaggagctcaagaccagcctggtcaatgtggtaaaaccccatctctactaaaaatacaaaaattagccaggtgtggtggcgcacacctgtaatcccagctactcaggaggctgaggcatgagaatcacttgaactccagaagtagagattgcagtgagcagagatggcgccactgcactccagcgtgggtgacagattgagaccctgtctcaaaaaaaataataaaaaataaaaggccaagaggtctggtccagatagaagccaggggaggaacaagtagggaacaggcagccttgaccagcaagccggcagtgtcctgaggaagaggacgctgacccttccctcctgttctctacgccctcagactggggctgggatcccgagactgtgggtgagtggggccaagccctctcctgcttcttgtcctgagaaaaggatcctaggtctctgttgggctccatgcagttgcccctcagtggctgcccccgtcgtttaaatcctctcaaactcaggctcttgtttggtagctgcagagaaataagagatgcaaacttataaataattaagaaacctaataattatctccaaccagacagcaagcctgcatcctcgtgagagacggaagatctggagagtttcggggggtaaactacaaaccattatttagcaagttttcccactgggctttgtcatgccttgatcttcaacgatcatgattagagttcatttgattcccgcagctgtgttctgggggctttgtgaggaggatcaagtttgggatgtgggtgagcgtagggagaggaggcgatgaattccttgtgacatcagagcccgatctaagatcatttgtctttggggccccatgttccatccccagaagtgatttgccttgaccaccagctggcatctacccggcttgggcatggcagggccccacatctcctggcacagccaggcagagcctgagtcgggttgtcaggactcttgatgcctggcctctcattcctggactggcaaagcctgttagcatcccagggctggaagaaacaccctacacactttgccttcttccaggcaaagaaggatccaccctggagtctccataggccctggccaggtgcggaatgaaaattcctacccccagatttaagtgtttatcagggagatttctgctcataaggactttgttaaccaagagactgtgtcatttaagccagagttccctagatcttgttggaacagagttcctctcagggctcctccaggctaaacccgcccaggaaagcctgcgagtcctgggaggtgacgggcactgcctgttcccagggtcctgtcttggtcttgcccagagcacctcctggccatcgtttcatttcaggtcgatgaaagctccttgcttggccctctgaactggggaaccatttcctctctctatcctggcccagggccagctctctgggctgccccagggagccggaggggagcggcctgtgcagacccagccgccaggacccagagggccggctcagagctgtgtggccatcctctccccgggctgcctttgcctgaggtcagcctcacacaggcagtctgaataggctgggggctcctttgtacttgaaaaatagtccatgtgcgggaggaggtgctggagagggaaagaagtgtgtggctgttgtgggctctctgtaagatggctctatgtggggcacgtgagctcgtgactttccgggtatgggcgtggcctgcagacagggatttgaacaagggtaagcatgtgggtgaggacatgaagccccaaagagcatgagactgtggggaggggcaagtcccgtgtgcactgtctgtgtcccccaacctgtcacagcctgcgtgtgcacatgcgtgcccaggtcctcctgcagcagacagggcggacatgggctctgctggctgcagtgtctgccctgtacccaggtggctgcaacgcctcagatgcagcaatgttcccctgggattaatccccagcatctccattgggctttgcttatctggtgttggctataattaaaaagtggttacttcataaaataaaggcagggagagaggacagcatcccctacccctgtcctgtggtccttggagaggaaggtgcttggaaggtcgtgttgttgatccctctgcctcccagtaggcaggggtccagcgtctcctaagagcaccctggccccaggcacggccagggaaggaggcctcccaggccccaacaccacctcccagggctgctagtcactgcacggtcagcaagcgcaacctcaggccagacacagcccaagagcctccatcctgagcagccaccgagacactctcccttcctaggccatgcaaaagtggcacagcccgggaagggaggcataaaagccaagccacggtccaccccaggggacctagggctcgagaaaaatagctgaggccaccaaggccacggtcttttcagtttcactgaacattaaactcatcacccaagataagcagaaagaaaagtggctgccgcttctcctgaggccactcgctgaatggcttctgtcagacgggagaagctgcccgtctcacacctcccctggagatggagcccctgtgaggccccaatccccacccatcagacacgatggctggtcacagacactgcgctgtccctgaggaggcctggagctagaagccagccacctcccccatgtcaacagctcacgcagggggccaagcccaggccccatcccatcctccaaacctcttggtgtctgggcaggcagaaagcctataccctggctgaaatccaccctggctctgctcctcactctgggcaaccttggacaaggcacggcccatctagagaacaggaatgacatccccagccctgcatgctggcaatctcttttggtgcacggtgccacaaccacaaatcagcctttgttgcttcacccacacgttcctggtgagattctagaatggaaatctctcacgtcacattgcgtggtgccttccatttgtgcttcttgtactctcatgaatgctaccactttcatttttcactgcaccttctcttaagggacttccctgactggagagacagccacacaaactcagggcccagaagagaatatgacagagctcagccatgacggcaggagagagcagacggactggagtgcgccttagtaaggggggcagcgctagacacctgggaggccattttcattctggagagttgtgctaatgtggattctactgtgcaaagtcaaaacactgaggcagagacagatgcaagcagcccacccacaacccaggcaggagagatgacggggctgctcggaagacaggccttgtctgctgggcctcactcgaggccctcagtgctccctgtgggagtctctccttggcatgttgggatgagtccagtccttcctggagagtccttatggaaagagggggtgagagtggggaaggggtgcggggagcatcctgaggagagggggagggaggaaacgtcccctgctcactagtatgagcaacaggatactggagatttgtgagtgtgtgtgcatgtgtgtgtatgagagtgagtgtgtgtgtgtgtgacagtgtggatgtgtgtgtatgagagtgagtgtggatgtgtgggagagtgtatgagagagcgtgtgtgagtgtgagcgtgtatgagcgtgacagtgagtgtggatgtgtgtgtaagagtgagtgtggatgtgtatgagtgtgtgtagagtgagtgtggatgtgtgtgtatgagtggatgtgtgtgagtgaatgtgtatgagtgtgtatgagtgtgtggatgtgcgtgtgtatgagtgtgtgtgaatgtgcatgacagtgtgtgtggatgtgtgagcatgtatgagagtgagtgtgggtgtgggtgtatatgcataggaatgttgtgttgcatgtgtgcatgttaatctacctgtatatgcatgtatatgcatgtgcatgtgtgtgtacgtgtgagtgtgaacatctgtgtgcagtgtgtgtatgagtgtgcatgcatgtgaatgtatgtggatgtatgactacattgagtgcatgcatatgtatgtgtgtatatgtgtgtgcacatgggtgtacatgagtgcatgtgcagagaggatgagtgtgcagaggattgtgtgagcctggtgtgcatgtgtatgtatgtgtgtgcatgtgtgtacatgtgtgtagagaggatggtgtgagcctggtgtgcgtgtgtatgtatgagtgtgtgtgtgcatgagtgagtgtgtagagaggatggtgtgagcctggtgtgagtgcgtatgtatatgagtgtgtgtgtgcatgtgtgtccatgagtgtgtagagaggattgtgtgagtctggtgtgcgtgtgtatgtatatgagtgtgtgtgcatgtgtgtccatgagtgagtgtgtagagaggattgtgtgagcctggtgtgcgtgtgtatgtatatgagtgtgtgtgtgcatgtgtgtccatgagtgagtgtgtagagaggatggtgtgatcctggtgtgcgtgtgtacgtatatgagtgtgtgtgtgcatgtgtgtccatgagtgtgcagagaggatggtgtgatcctggtgtgcatgtgtatgtatatgagtgtgtgtgtgcatgtgtgtacatgagtgagtgtgtagagaggatggtgtgagcctggtgtgcgtgtgtatgtatatgagtgtgtgtgcatgtgtgtacatgtgtgtagagaggattgtgtgagcctggtgtgcgtgtgtatgtatatgagtgtgtgtgtgcatgtgtgtacatgagtgtgtagagaggattgtgtgagcctggtgtgcatatgtatatgagtgtgtgtgtgtgcatgtgtgtacatgagtgtgtagagaggattgtgtgagcctggtgtgcatgtgtatgtatatgagtgtgtgtgtgtgcatgtgtgtccatgagtgtgtagagaggatggtgtgagcctggcgtgagtgcgtatgtatatgagtgtgtgtgtgcatgagtgagtgtgagcctggtgtgagtgcatgtgtatgtgagtgtgtgcatgagtgtgtgtgaacctggtgtgcgtgcatatgtatatgagtgtgtgtgtgcatgtgtgtccatgagtgagtgtgtagagaggattgtgtgagcctgttgtgagtgtgtgtgtccatgagtgtgtgtggagaggattgtgtgagcctggtgtgcatgcatatgtatgtgtgtgtgcatgtgtgtacatgagtgtatatagaggattgtgtgagcctggtgtgcatgcttatgtatatgagtgtgtgtgtgcatgagtgagtgtgcagagaggatgagtgtgtggagaggactgtgtgagcctggtgtgcgtgcataggtatatgagtgtgtgtgtgcatatgtgcacatttactgtgtagagaggattgtgtgagcctggtgtgcgtgtgtacgtatatgagtgtgtgtgtgcatgtgtgtccatgagtgtgtagaagattgtgtgagcctggtgtgcgtgtgtatgtatatgggtgtgtgtgtgcatgtgtgtacatgagtgagtgtgtagagaggatggtgtgagcctggtgtgcgtgtgtatgtatatgagtgtatgtgtgttcatgagtgagtgtgtagagaggattgtgtgagcctggtgtgcgtgcatatgtatatgagtgtgtgtgtgcatgtgtgtccgtgagcgagtgtgtagagaggatggtgtgagcctggtgtgcgtgtgtatgtatatgagtgtgtgtgtgcatgtgtgtccgtgagtgagtgtgtagagaggatggtgtgagcctgttgtgtgtgtgtgtgcatgagtgagtgtgtgtgagcctctggtgtttggcatctagttctctctgcaggtctggagaccttcttgagcaaagctcaggctactgcgcccactctgtgcacgctggtcttgaggacgcggccctgctcccctgggtgggcccgtgggtcctgcccgcttctgtagcagcagcagcctcctctcaagggccctctgttgctcaggccgtgttcctgcctgtggtcgcccagcttcaattaccacggctcaaagtcagaggcgtgggctggctccgtccagatggagggagggccggtgttcccttgcctcagagtctgcgggtggcttcagagagaagggagcagaacctctttcctttgctgccttaaagcagcaagtctcggtgacatcaggcagttccagggcagagcttgtggccgctgtcaagcccaggagacatcagggcttcatgctcaactggtcacacccaactggcaagaggggtcccaggcagaaactctgggaaccgtagcccaggccgagagccatccccaggggactgaggtagggtctgcaggaccaaagctgcctcacacagacctttcaggaaagcaagcacagatcctcggaagcggttaccacccacctgtgccacgcgccacccctcgtccttgacaccactgctggcgaggcagccgagagagtatgctgagtaagcaggttctagggcattctccccagaccctccagggaggctctccctggaaggctgcctcagtccctgcccttccagtcagcagagcaaggcatcaagctgagaaaagtccaacagaagggcgggaggcagattgctgagatgaatgggaagtgcaggccacaggtcctggcaggcaagaggaagggaggcctgagaacggcctttgttcccgggatctccggaccagatgtgccctcacagctgctgcttcaggtttctgtgctccagagcccgctggagggagaatgctcgccaaagacatctcattagggatggccttgggcttggcggggtgtgggttttggtgggaagaggagagagggatggtttgtgctgtcaaccctggaggccctggaggctggggtgcaggcttaccaaatttagcaaatgaaaattgtagatgcctggttacttttgaaattcggataaacaacagttttttttttattttagtctaggtatgtcccacacagtatttgggatatacttccacaattgatttattgtttatctgaaattgacatgtcatcggcaccctccactgtgggctcttctgctgtgggttttcctctttgtgccacctcctgctttcacaccgatttcatccactcctactaaagcaatagagtctgggggttctaggatgcatagacacccactgggatccaaattcctcagctgccggcagctcagtgggggctcacatgtgcagtgggttctccctgagcccctgaggcctccagctgagggctttgggacccctggtgtttgcagcaagcctgagtctctgagactgcagaggggctggggaggaagctaggggatcctctgccttggctgcaatctcaagccccccggaggaggaagcagcaaggcgcctgctggttttctgctcagggttagcacatgtggtgcagcggtgagcagattgcaggttgctaggatgggtccaaggtcaacgacagccccggaaggcagctggttagggcttacagggtggtctccaccccactctcccctctggaggtccagttctccacacccctccagaccctggccaacggcaagcctaaacccagtcttcatgcagagaagcggctttggaggaagtgtgtcctttgctctaggaaggaacatttgcagtcagggctgtgtgtggaatttttattcctctaatacagcctaggcaggatgtagtacacgagttctccagaggaaatgcattcaataaaaatttgatgggctccggcagctcagcagaatctccttacgaattccaagtgtttgtttggtccctggcttgggcaggagctcagccacgttctgcaagtggcctctttagtgagggagcccttggaggaaggactccctccacatctggaaagtcgccttcagcccccggctttcccaagaaggagcaggattgcttcaccaggtcgaggagtgggggggcctctggcctttgaccccaaggagaagcgaagccccagggctctggaatcgggccctcataaatgagatgaggacactgagcactggagggggattcaatgccgacggagatgtgaagtcagcgcaagaatagaaatggcctcgctgggcttagtgggggatgtgtagtacgtttccagagatcacccctgtacttcattcgctcagcacacaagagctcccctacaagggctgaagcgaggcaggcagccctgccctgtggcccctgccccgcaccccctgccccgcaccccatggctcaccctgggcacagatgtgcttggagggaaacacacactagaagcttcctgtgggcaacggccatgtccatttggctctctactctcccctcttagccggggcctggcacacagagtggggtcagtcagcgtcaggacaatggggtgggcgtgtcatgggctctgtggaatgggggagcctgctggccacccctctggcttgtgaggtaaatccaggcacaagccctagaagccttggcttttaccaacagggccagacgatcagaaaagtgccccgggctctgctgcccttggagagtcagggctgggggccgagagcaagggtccagggcatggagggccctcccgcctgggtttttgcttacagatggagaagtgggattattaagccagagggtgtgcttcagaaggtgtgcttacgaaggggctttcgggtcacaatgcagagaacttcctcgcagtgagcagccttgggtcctggggtaatacagccagcccaggtagaggaccatggagttggcctgggtctccctctggcctggccctggctggccaccttcgccgaaggggagggaatggtcgctgccctcccccaccatttccagggtcaggtgccagacctgggcctcatctgcctttgcagggcatttgggaagcacttagccaggcctgacagtggccaggctgcttcataagacgcctggtggtgagtaaaaccccaagtctagggcacctgaaggctctctcagggtagtttcccatttccgtcaggttcagctcagctcgattcttagatgtgtggccctcgggaggtggggggagcctcctgtttgtgtgtagcctgcccacccacagtgatgcccactcggatgctgtgcccaccacacctgctgacggagttccctgcaagtgtgacgcatctggccggctctgagccacctccgctgccccgcacttgtgtcccaggggacagaagcatggaggctggagaggagccagaggaagggctgggggaggggagtcaggagctgggggcctcagaacgggagaaccaggtgaacagtctgaccccaaagggcagccagaggggcctcccgggcaggagagggtggcagcctcagccgagactggccatgcctgccatcccaagggcctctgtgggcagtggtgggttcttaggataccatggccgggggactctgtgtcctcactgcggggaacgggtggggactgactttggacccaggccaagggtctgcaatcagcctcccgggtcctgccaggctctgctgcccaggaggtctcaggtgacaaccaggccatgcagccacgctcaccttcctctactgtctctcacagtctcatggccccgtggaacccccaggtgtggctcctggtacccaggcttggagaatgtgtccagctgtcctgcccccttgctgcctgggcttggcctgggcacagggctctgcttccctttggtatctgaggaccctgctagacagacccctgtccgtcagggaggccttctcagcctcgggcagggagtgtgggcctcacaggccacctgcttccagggccctcagagctgcctggtctttctgccaactgactccaagatcaagcttttggggcttccagcttggtgtggggttgaccccacctgcctgctccacctgcaagagggaagaggttggggatgcaccaaagatgcccacagccatgtactagaggggagaggtgaggtccagaacattctagagcagtggtcctccatgtttttcctaccctagcagtaaaaatgtctaggcccactgggaatagcggctctggaccgttagggcagcagaccagcctttcctagagggcatggacatctcacaagtgcctcttacagtgacacagctggcctttctcagaatgccatgcccaccacctcactgggcagaatcactgggcaggaggagttcagtgtagcgcacagcctccttcacgggcggacatggcacaagcacacagatgcctcatgggcacagctgggcaggaggagttcagtgtagcgcacagcctccttcacgggcggacatggcacaagcacacagatgcctcatgggcacagctgggcaggaggagttcagtgtagcgcacagcctccttcacgggcggaagtggcacaagcacacagatgcctcatgggcacatgcataatattcacctggaggccaagtgcacacatgtttgttgcacagctagctggccagtggcaggaaaggaggccctgagtggcctccaggacctttgcccatgggccacagcaggactggctgcagctgctcccaccacatccccggcagccaagtcgaggctccctctggcttctgagggctgctgcaagcactgcggtcactgagtttagggcctacctgaggggtgtgctgggacgtgggcgtctagtgcaaaagaaaaacagtcctgggcggcccaggacagacagagcgtgccaccctcccccagctccagcccaccctctccacggccccagagctgcctgctggagacagcgggaaaaggagcttgtgcaggcccagatggggccgggaggggacctggacttcagatgaggccacccacccagggctgcagtttcagggacctggcggtgccccaggggcagggtgttcctcccatggtcaggtggggggaccaggccaggagacagcccacccagaggccacatgaggcagcacatttgggtctggcagaagtgttgacagataaccttggaatgtcctcgggtggcacagggggacaccacagtccgctgagcagggtccactgtacctggtcttctcagtctgggacggtcttgggtgtccggccccagtgctcatggtcacctggggtacaggagcgagggctgctgaggtcccagcgggcacagctgacctgtgggcgcttcacctgcacgacctcacctggccctcccagtccgagaggcctcctcacccaggttctcaggcgggcaggtttggtgggggcaggctgcagcagtgtggaaagcagaagccagtggaaggggaggcagagctcttcacatcagtgatgacagaacggcccagaccagagggaagcggagggtggagaatcgcagaggaggaagccggccagaggctgcctggggaacagaccacccccaccctctataacctcgctgtggcactgggcttcagcatgaggacttgggagcaggaactgggaatgaaaggaacacaccagaaccaggaaaatcttccaggtgtggcaaaggagagcaggggtgggactgagtcccaggtgccccagggccctgagcccggttcccagaggagggaagtgagcccagcccagccctgccctggagccccggccccactcccagggggaaggttggaggtttgggcttcctcaacccaccaccggacacctgtgcactcagtcacacacagtctcatgctcacactcaaaattcacactcaaaattcacactctcatactaacactcaaaattcacactaacacttcatactgaaactcaaaattcacactaacatctcatactcacccttataatgtacacatgctcacaagctcactcaaaattcacacgcacactcacacgctcacactcaaaagtcacactctcatactaatgttcaacattcacactaacacctcatgctgaaacgtaaaattcactctaacatctcatgctcacactcgaaatgcacactcacacgctcacactcaaaattcacactagcatcatgctcacacaaaatctcacatgctcacactcaatgcaaactcacatgcttacactcaaaattcacattaacatgctcacacagaactacacccatgcttacactcaaaaatcacacagaattcacactcgctttcatactaacactcaaaattcacactatctcttgctcacactcaaaattcactcacacttatgtactcacaatcaaaattcacacacactcaaaatttgcacttgctctgatactgacactcaaaattcacactaacatctcatgctcacactcaaaactcatgctcacattatcacactcaaaattcacacttgctctcatattgacactcaaaattcacacccacacttacatgctcaccctctaaccctctcacattcacacactcacactcactcccacactcacacaacacacacgctcacactcacatacataacaccctcacagtggcacactcaccgatacacacttgctcacacaaaactcacgctcacatatttgcacactcgcacacaccctgccttttgcacacggctgcacacacccctaccagctccagctctccggctctccctgcctcctggctgctctgatgtgaggagccgtctctgcacaggtgcctgcaggctgcaggctggggagggggcacacgcctggcacgggggtctatcggagctgtttactcccccaagcagctcttggcctcacttcctttctctctcatctttggcacctgaaaaaccccaacattcccaggagggcaaacaggccctttattacctcgtgggctcagaacacagcatcttagtaattgaaagtggcttgactcaaattgcattttccgaggagccctgcaagatggaagtgcaggaaggagggaggcagggtggagggaagctgcaagcgccagcccccgagcaggcaacaggtaggggcccaggccccaggggcctctccagtctgctggcaactttggggcccacgggccacgtccagataagagcagacctggaccccacctgcaaagggagtccaagctctgagcgggcagcctctgccacctgcgccagcctcctaacaagcctccaccccacctccgggtcttcccagctgggcactcggtggcctccctgcctggcacaccgcagctctccagcgtgtgtctgttgaccgaatgctggtccaagccccagggctttgccacgtggctcccactctgtaatgcccacttgttccttcaccaagtcatgacgataccagtggggtttatggggcacttggctgtgttccaaacagggagcgaagccctcgcttatgatctcatcaaatcggttccgtaccctgagaaggtaggaagtggtgctgttgtcacattatagatggggaacctggagcccagagaggtggagctgggctttgcctggggccctgactctgagcttgggcttgaagcagggcagtgccgggcccgggcctccggtggaccctccacagacccctgtcacagccatggggagcaccagtggtgggcagagggcctgactcctgcatcccacacccgtcggaagaggcgcttcagaggcccctggaagctgggacgtggggctggtgaggcttgaaaaagcctcctcaaaaatcctgctactttgatttgtcgctagtcctgacgattattttgaaattccttgcagcactaaagaagactagcaaagcagggggcggactaaagtgggcgggaaatgctgctttcatgcatctgcgtgttgacaggtatgacctccctgctcaccctgagttctctgagtcacctctgtgcccccagcacccagcactgtgcctggctcagggcaaaggctcagagaatatttgttgagtcagtgaatgagggaaggagggagggaagagagaagggaggaggaaagtggggcaagagatgaagaatggaaggaggttaggaaggttggaagggtggagggagggaagggagggagggacagtcctagaataggagagggagcaggaagacaaggcctcccagccctggccctggaggagaggggcatccacacccacttagcctgtctgccaaaattaatgcattctagctccctgcaaaccttctccccctcttgatttctgcaactcactcagctaatgaggaagaaagggaaggccccttcccatacagggctggaaaacgtgcaaaaaaaatgcccatggcctgagaccaggcgctacaggctatgggcaggacaagcctgggcctcccttcccgggtctgtcctgggctccctggctgctgtgggtccccccaggcaagatactcaccccactgggatggctgagcagagagctggaggcagcaaatggaagcaccatctactgggaacctcatgtccctaaagaataagcaggttgcttctgtcaccacttttttcaatttaaaggagagtgtgttggaaccgtcttacaaatgcatctgttacatcaaaccaaagcctgggcgccttttctctctttcactttatcccatcctcacgctaaaaatacagctggaagataaacagagcagcgctggccagatgacagagctgccttccccagagccaggcaacacttgggggtcgggggagccaggattcagaacagagagaaaacaccgtgacacgggtttgatttctaaactgtcggacccagcaggctttatagtccacagacacttgtaccattctttcccctcctggtttactctatttctggattattgtctgtaagtttcagaatggcccaggatccctgagtggtttataaattagggctgtattctgggagcacccagtagtgctgctgtattttaggtggtgtcagagtttccattataaaccccatttctcagaggtttataacttggccgtaaaaacgtactgaggcctgaggctgggaccctacggtgcacagctgctgggtcccttccatgcccccaggtggggacatccagtcggcctacaacagagaacaagaggctaggagacctgggctttgcctcctggtgtgaggggatgtggacatggggcctccccttgccagccaggcgagctatgtggtccaaagtctgctcataaaggattttccatgagttcacaaggccatgaagctttttagcagcccagcgaccaagggggaaaagctaccctgactctcagtgaccacaacctctgtcactcccgagtcatcctgcaaaaacaaacaaacaaacaacaaaaaaaaaaaacactgtcctccgaggccatccaggccccctttgtacaagctcctgacccagtgacccaacagatacatttcagactgattttcacatcaggaggagattccacgcttggtacgacggcactcgagataacactccccgttttcattaaagggcaagctaccaagggtcacctgtttgggatattgaaggggtaaaggccaacagttcttaggtctaaggagtttgtaaaaaatatgcaaatgcctgggccccacccccgggaattctgggtgccccactctggggtagagcccagaatggctgttttgttcagcgattcccaggctggcattggagggtccatcccacctctgacacctgctggcattgatgcaccttgcttcgcccctgggggctcacctgtcccatgggaaggaaggtagtgccaccttcccacttgttaagaggatcaggggcagtgccctcccaatagtgacacataggtcacagctgtagctcgtactatgactgcgatgggcagagcccagtctgccacaggcactggagaaggaagaggatttcacacagaggttccagagtccatcaacaatccatcagaaatgacgtcaagaatctttcaagtgatgaaattcttggggcgagaatgtgtggtttatacaagcagcctttacctccagcctttccagaaactcacataaaatgagtttcctccattgtgtttaccctactggggacagcaggacctttgtcctcctgctccaggatggctctctaccttccaggcatcccagttcataaacacacactgtaattcctacttttgtttgagagcattgcttggggtcccggtggtttgggagtcactgtacctttgccagcgtgaccctgccccatctgcctgtccacatcctacaccctccatcgccccactctaaagccaccttttccagggaggctcctgggagcttcgagcctcccctctttaaactctccgtgtgtgttactccttcggcactcgcccgattgcccgaggcattctttccacagccagaaactcagcacctgctactgggtgtcagccgagcctcctggaaggcaggaactgtgcctacgagcatttccaacccccttcccaattagcagggcaccttgcatagtaggtttatcaactttcagttaagccaggataatgcaggatagcaccaggggacacttcagacttcgaatcagaaagccttgagttcacatcctggagggacaccctagtagctccgtgaccttgagtgtccactttctttcctgtaatgtggggatcatcacccatatattaagtgttatgagaaaaagaaataatgaatgtaaatcacttggcatctttgtggcatttaagcatgtgcaggatgataattatcattatcaccatggacacaagctcctgttctgggagaatagcccaaaggcacaggatcctggggtgcccaggtgttcctgagatatgtctgtggctgtctctccatcacatggaacatctgggaacttttccagctgctgctaggcattccccacatcccggggtccagcagaagggaaggaagccatctggagttctggagttctgaccagtgtattctgaccccaccagaggcagtttctcaccagattcttgctgccagatctcaaaaggctggtgaggtttcctggacctcccctttccctagaatctggccaggtgtttcccgtggctggggctcctgggcacttgggacctgggcagagactgtggagctggcggctttcctggtccccaaactccactttgtagaggaaacacctaatacaccatcccctgggagacaagaacacaggccagaagaaatcgcagtctgcagggagctctctttgttttctcagtttcttctgaggttcctagaatttctaatccagattcaggaaccacaggcttatctggatagatgggttgcctggctctgcgctcagctgccactcagggactgggagccactcagctgcctggaaggaactgaggcctttccttgggagagcacaagctgtcagctcatgaaagtgctttcattcattcattctttcattcatttattcagaaatgtttactgagcacctgctctgtaccaatcactgttctgggtgtctggaatatgccaaagataaagcagagaaccttgcatcaggggcaaggagatggccccaaacgatgggcagaatcatcagttatgtaacatgtggaaggtatcagtgttatgggaaagaaacaataaagccagacaaggcctgtaagggggagattggggtggtcctggagggatgacaagatgcaatttcaaatggtggggcaagggtagcaaattagtcaggtttgcggcaacactgctcggtaacaaacagtctgggaatctcagcggctgacaggaccgcatagttatttgattgtaggcagattcagtggctgtgtccaggctgaggggtggcttcaagtctattccaggggtctcgccctggacctggactggggcttggttttctgagagcagaaggcgggagggccgttggccatgcaagctgctgctcagacacagggaagtcatatccactcctatcacgctggccagagcaagttacatagcaaaacccagcatccgtaacatagagagtggggaaggaagcaatactagctgctgaacagaagtgcatcctcccaaagccagcaggacaagcccctgagaaggtgtctcctgtgagccatgccttggaggctgggagggagggagccaggagaagactaggtaggacagggcatcagggcaaggggacagtcagagagggcagagacctctttgtggaagtgagcagaggctgcaaaatggcagaagaaaaggtactagaaagtgccagaagggaagatggcaggggtcccttgagttgctggaaaggcttggcctcccactgagcaaggtgagaatctggtgggttttgagtgacaggcactgactcccatcccaacaccaccccgtgcccccttcactgcagggacaccataggggaaaaggggagaccagggaggtgcttgtgacgacccaggtgggaggtgatgcggacctccagggtagagctgtggggtggggagaagcggccgattctgggcagattcagaggtcaagccaccggcctgccagatgctaggatgtgggagagaaagagaaacttccaggctgactcgtggtcttgccatcgtaatggcagctgggtggggtcaggagagccaccttggaatttcagcttggagaggcctgtggggacatcagtgtgagtttcccagggcagccatgcaaagcagcgtagactgggcagcttaaacaacagaatctaccgcctcttagctctggaggccagagtccaagatcaaggggtcggttccttccgaggctggaagagagggtctgtcccggccctctcccctggcttccagtgtttgctgcaattccttggctgtagaaagatcactctgacccctgccttcatgttcacatgatcttcttcctgtgtccatggctttttcttaccaaaacaccggttacaggctgggcgtggtggctcacacctgtaatcccagcactttgggaggccgagatgggagtatcacctgaggtcgggatattgagaccagcctgaccaacatggagaaacctcatctctactaaaaatacaaaattagccaggcgtggtggcgcatgcctgtaattccagctaccctggaggccgaggcgggagaatcacttgaacctgggaggcagaggttgcagtgagccaagattgcaccattgcactccagcctgggcgacaagagtgaaactccgtctcaaaaacacatacacacacacacacatacacacacacacacatacacacacaaacaccagttacactggatcagggcccaccctactccaatgaccttatcttaactaattgtatcagcaatgagcctttttcaagtcagatcacattctggggcactggggacttcagcaaatgaatttgggggatgtgaatcaacctatgacaacatccaaggaagaaggacttctccccagagagggaacagtccctcacatctggctcagatctccatgcctcggagcctcttccagctccctagcacaaggaggaaagaggaggattctccttagacctccagcccttcctagccagaccccaccccaagaggaaacaagcaaagagcagttgcccaaacacagggcagacaggcagtgcctgggccagagtctctctgctcaggagccaggtgctccagaagggaagggcatgagtggggaagggcattgacttgttctgcattgagttaacattccttgagcacctatgatgtggcatggcatcacggagcacttgcagatgtgtcagagggagcaccaggggctgggaaggggctggaggtggcctcctggaaagactttgaaggacatatgagatttgtcctaaggagaaaagagagatccttttgcatagaaacaactcatttgggaaatgcaagcagggagagccctgtgcccagactgcagggtaaggccccaaggggcagagacctgtggcagggtgcttctggccaaccagccaaggggcatgagcagacagtgggaagagaggaatcctcttcccactgggcagcctggtcctggtgcagacatccacctggagctgtggggcctggagtgcctgagaatgttccattcggggcccaagaggcccgccccccaccaccccattattcgctgcagagcacctgcttgggatgcagactgagattcaaaacagtcccagaggaaaaacctaaagagcaaatgtctgttcctcctactcccctttgagagccaggtggtcctcctgggctccctccacccaggatcatcaggccggccctcccctgctcccttcacctgggatcatcaggctggtccttcccggctccctccacctgggatcatcaggctggtcctccccggctccctccacctgggatcatcaggctggtcctccccggctccctccacctgggatcatcaggctggtcctccccggctccctccacctgggatcatcaggctggtcctccccggctgcctccacctgggatcatcccaggtgtccccttgctcatgtcactcaccggcagagcttatctggccctggcagcttcctgctcttgtggccttggaagggttcctgagacatcaggaagaaagaggccttaaggagcattgcctaagtctcggactgtggcaccaaaacacctgattcctgtccgggctctgcctctgtatgtgacttcaggtgagtcattcaacctctgggtgcccaatttcctcatgggcttatgtatgtaagtacttagctcacagcccaatgcccaccacatggcccagtcaggggtggctgcacagccagggatgggcacagctgagtttaaacccgggccagggctcttgacaggatttggggctgcctcttagccaggatgacttctccctacaccctattccaccccccgggcagctcatctcggagcgagaggcaccagtgagcaaatccagagtccaggctccaccaggctcccaagttcccctccttcgtcccctgctaagctaacctctcgcgagccctggacagacctggtttcactttttcccaggatctgctggtctgctaagactccacgactcttttccttccttgagtgatttcacagacccatgggcgcagcaggtcgtgggacatgggtcccaaataggcacggtttgtctgatttcagcctctgagtgggaacagccgatgcaaagggattgtggagcctggtggctcttaccccaggtctcagggactgatgtcccctgagtctttgcatatgcccttgccctgtgtcacatcctcccaagctagagaaggtgggctctgcatcagccttcctggaccggcccccaccagggcaggagaacctaccccactcccgcctccatcagcaagcctcccagccggctggggaacgtgcgctgactttgtaagtctccaccgcttaacacagagtcgtgggctccaccacagaggggttttgtttggaacttaaaacacttgctcaaattaatgaccaaaatgtcagatgtgtccacagctaattattcattagatgcttaattagtgtgggatgatcatgacattttaatgttattaatttttatactgtaataggaattaaattgttctgctgtcccgaagcctcctgttggagtcacactgtggaattgggggctgggaggaggaggggccgtggagggcagctggggcagccagggagctcaccggccagagccagtgcacacacgcccctctgctggctgggagaagcctcttcagagctggatgctttggatggctgggctgacagtgggaacagctaagaaagaggcacagggtagaccagatggctccttgaggttccttcctgcttagacatttcaggatttcatgttcttcatttctccaccccaagacaagaggaatgctagggaactgtcctgcaaaacccacacagaaaagaggaagggactgaggtggtcacacccacaagagaccacagaaggccagcagaatgtcacagacctgttttccactccccacaggccagaagaaggggctcactgggaagaaatgttgcatatttttagacaaatggaaggaagccctgtctgccagcaaagggagtcacacaggagaccctgagagggctcttgtttgtaaaatgggcatagctctattgttatttctcattatgaaaataatccatgcccatgtttaaaaatctaatcattaaaaaaaggtagaatggtaataaaaatcgtgtgaaatcccaccttccaaagatagtaactcttcagattttagtgtctgaacttctgagctctttctgggcagatattagccactgctatcttgtaatctactttttttgctgacatgagcatcttttcaagctgatggacatagatctgcataatcctttctcgtggccacgttatattccattctccaaatactccatcacttatctagccagtccgtgagcgtgggatgtttggattattcctaattactcatcattaataaccaggatccttctaattatccttttcatgttggtctggttatacccttgggataaatccctagagatgggattgctgggtcacaggggaacctcacaggagagttccacttctacctgcaaccttggccaaggactttaatttccctaaagctgttccccaacctgtgaaatgggtacacgaatcctgttctgataatggcaaggattgcaggacctggcacagaacctggcatttagtaggttctactaaatgttagctccttttctgagtagttgctgctaactctcctttcacaaagtgctttggtatatatcatctctttaatgttatgattccaaaggaaggaaaaagtaaaacagatatgaagtctcaagaagggttggggaaattcctgggtgggtgactgcaattgagcaggggctgacggctggggcttattctcaaatcttcagggtcagagacacttagagcaaccaacacatcctctgtctaccatgtctgggcatcccccatcagggagagaacacgatatccattcagtcctggcgatgtactttcggagtacacccctggaggatgtccaggcagaggtttgagccaaggtcccttaaagagaagtcctgccatgagggacgatgatccccccaggaggcctggaggacccctcctgcacctggctctgagagcccagggttaagccctttgcttactgagcctgggcaattgactgaaccatcagaaactcttgattttccagcctagataagagggccaagggctcagagaagcttctcccactgggggacaagaggacatatgagtagctaagtggtgtctgccagagctggatgtgagaagtggatgggaccgtgatcccagagtcaggttatatttagcaagcacgtgtcagggatatggctcctatcagcaactctcaggctgcttggagactgtgtcttacacaatttgaaaaactacctggtaaaacgaagctggcagttggattcccagacttctagaagcccctcccggaggtgtggcgggatctctccagaggctgagctgccctatggcttccatccctaatatggctcttctgttccctccaccggcctctccatcctgggcctgacccctatccacatcaacttcaccaggagcccagtgacacccccaaggtcagtgtctccacccatttagaagggcccatttaggtgaaggctgattgcagagcccctgaagtccccccacggggcagttgcctgtgggagaagcaccatccctccctgaagacagccgatgaacagagcgtgttgtcgggccgccttggggtccaggagcctgggccgcccacactgccctcaggagaaatggacctgtgcccacccagcgctggttccaggagaagggccgggctggcctggtgcagggaggatggcatgtcttacagctccacttagctgactcctggaaaggaaggtgcccctcactcactgcctccatctctccagaagccaatgtcagaacaaaaagtcaggaggagccacacatccatcccatgggcagagggagcctggtgcatactcatctcccttctgaggtcaaacttggccataccctcattgagtgctcccgaaaaaatggcctgtgatggctccaggcctgccagccccagtacttgggatggcttgggtccccaggggagggggcccccggccctgtgccaggagcagagccctcctggggagagcaaggcagttctcaaggaaatcttctggccttcctccctgccccatccatcaccagacagcccactccagatggaaagggaaaaggaagaaaaaatgttaatatgcaattaaagttgagatcataaacaggtgctctaattagaagtcttctcaaatcatcaaaagctcatttacaaggtgagatgccagaggtgccctgatgccggctggcacagagctttctgccactgaggaggagtttggggacagccctcacctgtctccttgaggcttcggcaggtgggcaggggccaggagaggtgggggcacaggggaagtcttagccagacctggaggagggcagctcctgctcacggcagctccacaggtggctccccagcatggccactgctcaggctgtcttggcagaaggagctctgcacgcctggagcctggtgtggagggggaagcccaggatccctttggaggcattcaaggagccttggagatgcaggcagggcttctgccaggctttgtggttcttcctccagtgttcctcagccagggaccttccttggccccgtctcactgaatttctcctccctgagccacctctgccactctcattgcccgggccaatgatgccaaatcctgaaatctagcctagagccaaccctgagcttcaggccgcatacacagctgtgtacagacatgccccctccctcagtagaggtgatgctgggctaatcctttgtccccttactcctcctcaggggctccttctctccctgacaggtgccaccatctatctggtcacccccacatctggatgactcaaacctggtcagttctactcctacatgttccgcagtggtccctgcccctctatctgcacagccaccaccctcctggggcttcctcacctctctctttgactactgccttcgtctccctgttcatctcgggcacatcagttgtcccgtgctggcccacagtccacagcaccatcagaacgggagcttctaaaacacatcactccatgttgttcccctacccaaaagtcttcagcacaaaaagcaactcccctagcagagctctctttgtggactccccaccagtccaccagccccccaactcatttccagggctttgcacttgaagaacccaccctgttgctttcagcacctggccgcctctcaggcctcagctgccctggctggactgccgacctcctcctcctcctcctcctcctcctccctcctcctctcccctcctcttccctcctcctcctgcctaaaaaccaaatgagagtctgctctggtgaggctctggagcccacctctcccagggtcctgtggggtctatggaccaccacaacttggggctgagagttattcgatgtgtggacaggcgctgggttacggcccctctccgaagtgctgagtacaagtgtcttggcagggaggtggggccagcaggatacagccttgggttccagtctcaggcgcccatccatcatgagtgccacaggcagacatggatccccacaggaggggtctggctgagtgggagtgtctctcccacagagagggaagagcacatgggcacccgtcatctgcccaccttgctagggtggctgccccagaggggagcaggggccccttctgggcacccagctggggagcactggctgcagagttgggcggtggggaaccttctctcagcagtcccagctaccccaggctcctacgccaaggacctaaagagccacacagcctcgtgcatcttgctgtggaatgtgtgagaaggatgttggtattggcttcttccagtccaagaaaggccctggcacctcattccccaggtatccatagaaccttccagaccagccttcctcagcatggccagacactgcaaaatcccctccagacagacagtcacacaaacacacacatgcacccacacacctcaccttccccataataatatataactagccagcacttgatattagtggttcccaaatacttgtcttcaatcctgtattgcttgtgatgaaactcttatcagtccatggggaaataagaaaaataaaaaaaatgtggtgggcttttcataagctaaatgttcattttcaaaggactgtcctctattctgagactgatcttcccgcttttattacactttaaaatgtcctctcttttatgaaagcatggtgatggtagacagggtgattgtttcttaatgacttatttggcaaaattaaaagatgataccccatcagcgcccccatttttaattgaaatttttagtgagataattgtaggctcatatgcagttgtaagaaataacacagagagctcccaagtactccttacccagtttcccccagtggtaacattttgcaaaatgtcggcataaatatcacagccagaatgttgatacaagccaccagtctcattccgttttccccatttttacttgcatttgtgtgtgtgtgtgtgtgtgtgtttcattctctacaatttattatacatgtaggtttgtgtatccaccaccgttgcatgtccacagttccttttttttttcagatggaggcttgctctgtagcccaggctggagtgcagtggcacaatctcagctcactgcaacctctgcctcctgggtcccagttcaagcaattctcctgcctcagcctcctgtgtagctgggattataggcacacgccaccatgcccagctaatttttgtatttttagtagagacggagtttcaccatgttggccaggctggtcttgaactcctgacctcatgatccgcccacctctgcctcccaaagtgctgggattacaggcgtgagccactgcgctcactccacagttccttcctttttatttctgaggagttattccatgttatggatgaaccactattgtttgaaccatttactcattgaaggacgtccggatgtttccattttttgacaatgacaaatgaagctgctgtgaacatcacatgtgcgttgttatgtgaacttctgggataaatgcccaagagtgcaattgctgggtcctgtggtagctgcagatttagcctgccaaaccgtgtgccagaacaactgtaccatctcacatccccactaacggggtatgacggatccggttttttcacggcctcaccagcatttgatgttgtcactattttttatttgagacattttgataggtatgtagtaatgtctcattatggctttgacttacatttctttaaggctagtgatgttaagcatctttcaggtgcttacatgccatctgtatatcatctttgccgagatatctctatgtgtcttttgcccgttttctaatggaattgcttgtttttactgttgaattttgagagtttgttattatattctcagtacgagtcctttgctgactatgtgatttgcaaatattttctcccagtctgtagcttgctttttcatcttctccaaatgagcttttgtagaacaaaagtttttaatgttgatgaggtccagttttagcattttccatttatggaccatgcttttaggactaagttgcccagtcctagatcccaaatactttctcttgtgtttttctacaagtattataattttacatttaagtccgtaattcattcttagttcacttttgtttaaagcataaggtttaggtcgaggttccttttgtttctggggtttggttttttgtgttttgttttggttttggcctgtggatatccaattgctccaataccatttgttgaaaagtttatccttcctccatttaattgcttttgtgcctttgtcaaaaataagttgagtgtgtttgttggggctatttctgggttctgtattctgttctgttgatctctttttttggttttttgagacaggagcttcgctcttgttgcccaggctggagtgcagtggtgcagtctcagctcactgcaacctctgcgtcctggattcaagtgattctcctgcctcagccttctgagtagctagaattacaagcatgcgccaccacgcccagctaatttttgtatttttagtagagatggggtttcaccatgttggccaggctggtctcaaactcctgacctcaggtaatctgcccgccttggcctcccaaagttctgggattacaggcgtgagccaccgtgtctggccctgttgatctattaatatatgactgtctctcctctgacatcacactgacttgattgctataactctgtattaatcctcagtatcaggtagagtgggttcttatttattcttctctgtcaagcctgttttagctattctattctaatattggtatctattctaagccctgtgcctttccatataaattataggatacattgtccatgactatccgaaatattgctgcagttttgataggaattgtattaaacctatagataaatcggaagagaattgacatcttcactaggttgggtcttccaatccatgaaaaaggtatgtgtctcttcatgtactaggtctttgattttcctccattggcatgttgtcattttcagtatacaaattctgtacacattctgtgaagtgtaggcttaagaatttcatttttggccgggtgcggtggctcacgcctataatcccagcactttgggaggctgagacaggcggatcacaagctcaggagatcaagaccatcctggctaacacggtgaaaccccgtctctactaaatatacaaaaaaaaaaattagccgggcgtggtagtgggcacctgtagtcccagctactcaggaggctgaggcaggaaaatggcgtgaacctgggaggcagagcttgccgtgagccaagatcgcaccactgcactccagcctggacgacagagtgagactctatctcgaaaaaaaaaataataataataataatttcattttcttggccgggtgcagtggctcatgcctgtaatcccagcactttgggaagctgaggcgggtggatcacaaggtcaggagtttgagaccagcctggccaatatggtaaaacacctgtctctactaataatacaaaaattagctgggcatggtgatgcgtgcctgtagtcccagctacttgggaggctgaggcagaagaactgcttgaacctgggaggcagagattgcagtgagccgagatcgcaccactgcactccagcctgggcgacagagtgcccaggagactctgtctccacacacacaaaaaagaatttcattttctttggagctattatcaatggtattgtgtttgtgattgtggtggccacatatttatgatgaacatatagaaatgcaatcaatttttctgtgttgatcttgtatcctccagctttactggattcactaattagttctagattttttttgtagatttcttggaattttctatttaggcaatcatgtcatctgtacagacagttgtatttcttcctgtcccatcagtgtggcttttacgtctttctcctgctttactgcctcagaacttcctgtactgtgttgggtgagggcggtgcaagcagacatccttgccccattcctcatctgtggaagagcactcagtcttccaccattaaattgatgtgagccagagggattttgtagatgctttttatcaagctgagataatttcctgctattcctgacttgctgagagcagttccctcatttgttaaactttgctgcccctgaaatcagaaactttgggacccaccagtttgtaccatacccaggactgcttttcattcacatcctgcccctcacaggatcctggagggcccggtgggtaaggggtccacagcctcccgctcaggtttttgactcgcaatcctgtcctctaccccaccgatccctctccccttggctgagccttctgtcctgtgccatgttcccggcccctcaggaaaaggaaccctgacaaaccagtgtggaccattcacacattcacatatccactcattcattcattcattcagcaaggcctgcaccctgtggtacagaaatcaagggctgcagacctgcccttgagaaatgcagtctaacacccaaactccacccgcccccgcgtcggcccccgtcgcgctgcatgagacttgcatcccctctccagggggctggccagggctggctgaggctccaggagttgctctgctctaccattttccttttccaggaaatgtgtatcccagacagcccccagcacccactcttctccgggccgccctgcagcagggtgggagcagtgtggtggtcctcaggcccccatctcacccccctacacacacataccactagagcctctggcccacagcaggcagaggacaagccccctcacccatcccagctccagccctgactctggaaccttctgcagaggctcaggctccccccatctccacatccgcaggatggtacgctattgatgttcttgtgtgtgttttttttaatcaagggaacaatttctttatatgcaaatctcttcaataatattattattatcagtgtggcctcaggcagaggctcacagaattggagagttgccgagttgatggtttttttcatagcgactctgagcatcatcaggccagctcctgggaggacagcgaggctcattttccccagaacaatcccagctggaaagatgattgcaggtatcaagagatacggggtgatttcatcctcatctgaatatctgtgaaaccacccctgcaccctgctcctccatctcaggtcacagccaagggtgggcagccctgaccagtgggcactccttccacgagcatctactgagcacccactgcccgcatgtcacttagcgcccagggccaggcgggcagctgctcacggtctgaagagggaggcaggcaagacagtgtgggtcccctgatcccacagacccacggcctgtgggagcccccacccagacctgggaagcctggcagggccaggaccagggtgaggcactggcatggggtacaaatttaaggtggtacaaaaaaaaattgtgaagccaaataatattttaatagaatatttttgataatcaagattaatgcaaaaaatccatgataaacacaaaatcaacattttaaagaaaggcaggacacctacgggaaggcttcccagggaggagacattgtcactgcaagcagaaggagaaggataagcaggacagaagcacggggaagaggtttccaggggtgagaagaaagagagatggcactttcccaccccaggggctccaggggctctggaggctggagttccagtctgaacctatgcatctccccgagctcccccaccgcccaccactgcaccaaagccccaggcccacctctgcttctccttcctaagcccgtggctactgcacacccctgccccccaccccacagtctgcacggactggacagaggctggccatgggcctcccctgcagtggaagaggctgaggcctggagccctgaggtctgtccaggccgtggatactgcacacagaccacagctgtgagctggcctcgtcggggttcagaacaaagcagcaagagccattggaaggcggaggagtcctggacagaaatccaagggtgagggacaaaggtgggacaaagcatgagtgtgtggtgattcatggcagagaagggcatgttcctccaggcctggctgaggggcgaggccagccactcacttggagaacaccagcctgcgttctagcagtgagccttctggataccctcagggcatccaaggccaggccagggcctgcccagatgaccaggctgacatgaggaggccctggctctctgttagcagatggggctgggtgaccacccctccagccagggctggccacccccaggagcagtgtctgaagagttcactctatttgtgtctctgggcattaagctacgttattccttgcccagctgctggggcctgtgtttccaagaaagcagcctttccaacagggactttgactgctgagaaggtctctccacccccacggctatcaccggggcatgcagacctgactcttcctgccccaggccagcggctgctcctctcccctgtgaggattggggtacccaggcctgcctgactgtgcatcctgagaaactcaaagccaccactgactgtagccaccatgatcagctttatatctgatgatctcgtttgactcataccctaaccccatgaaggagtgactgtttccagagaaggaaactaaggctccggaaggtgacctaaactgccactgagtgacagatgaggatctgaatccacagaagctcttcaccatgacatcatgttggtcccagcctacagccatcatctcccagacgatccacccctggagagtcatccctgggctagaaagagaaagctggaagacaagcagcgccaggtcaacctctggcctcaaaatacagagcagcttctccaggcagcttgggactttgagacatctaaactcgctcctaagacaggaagtctgaaaaggagctgagaccagaggcaagagtatagcacagagcctgggtcctggccctgcagaggggctggatggggcagggccagggaggtagcagggaaacacagcacagctgacctggggccttgtatcttgagcctaagaggccagaatgctcatcgggcacagcccaggctcttcctcttggaagtcactagaagctgcctcgacccggagatagggagctgaaagcccaggtctagtttcatgcccccaaccagctaaggggaaagggtgcctcacttgggagccccacaagtggctgcggttctccgacctcacaaattcagcctgtacctatctgttctctcccagcctccaccccaatccctgccctttctggaacctgccagaggttgggacaaacagcagcaccaatgctctagagatcgctccaagaagctggggaaggtttggagggcgcagcggcaagagcctagaaagggactctgaagccactagagacggagccctggggttaggaagcccgtgaccactgctgcaccagtgggaccaagaatcccacagcccagacaaaggtgcctgtggctctgcctgtctccccacaccatcgctgccttgggaagaaaaagcttgctctctttagattgacgagagcagactgatcttgttcctgagcttttccacgcatttctttttccttgttggtaatgaaaaaaaacaacaaaagtcgactcagggcttagccctcaaggaaaaaggcctgggggagttagtgtttcactgccttccttagctttgttatgacactagcaatccatgttcattgatgaaaacttagaaccttcagaacagacaggaataattttaaattaaaatagcttcaaggcctgacactcaaagttaaccacagctaatattttggttttttaaaaaaaaaaaatctttctaaagataaatacaactagggatctcctagagggccccggagatctggcctcctttccaggagcctgggttcctcagctctgagtcaggctggtatctgacttttgctgtcagcgtctgcattggtctcggggaggagcttttgcatgaggcctgggatgtgccctcacagtggctggtcctgggaaagatggtggcgtgccctattgacagatgggaataccgaggccaggaaacttgcaccaagtcagtgagaaaggcagaattggaattagaaaaccacatagctattgaatgaatgaactgtttcttggccttttggctaagatcaaatgtaaaggaatgaaaggatggatgaatgaatgaatgaatgaatgaatgaatgaatgaagtgagtgaatgaagaataattatgctgtactccatcctgaagcagctgacaatgtctgtgagaatgtgttccatgccttctgttcccctgtgtagggtagaaactcctgcacagggttggtgccagtaactagtcatgccagtaactagtcatgccagtaactagtcatgccagtaactagtgacacccagggaagtcagctcactgcttgcagcatctgcttcctagcaactaaccaggagtttctgccaagccctgcccatcccacgggtctgttgtggatatggaatgaagggggcctccataaaactcatagaaaggtcaggacagcctacagaagtccaggatagctcttggagtcaagaggacctcatggcggggaggagtggggcagagatgggcatggggcaggcttgctcaaggtccctgtgaccttggacattcctccacctgcttctctgcatggcatgggctgggtctgcatctctcctcttgtgtgagctggggctctctgtcctctcggtgcataccatgtgggaatctggccccagtaatgacgcatacctcctggccttgcactgaccccgtgcgacagtacccgctcgctgagcccccacagaacccttcgaggtagaaaacattgttgtcacagacaaggaacttgaggcacagagagcttaagtaacttaacctgagctcacaccacatggaagtgaaggatctaggatttgcaccgtgcaggcaggccccgagtccacgttccctgctcctctgtgatacttctgctgtctatgggttaaaaacattcacttatgggccccactggctggatgtagctcccagatctgctggctacaagctcttgacctcagacaaggaaccttaacatctctatctgtaaaatggggcaaagcagtcactcccttataaagatgtggttgggtttttaatggaaatggtgtaatgtaaagcccatcacatagtaggtgtttgataaatggcgaccatgaccaggataaagtgtaacccagaagtgaggctgtcctgggaggccacatgctggcaacatatccagaaaaggctggataagaagcttcctgcacaggtgggcattcttggaggggcatctgctgcccgtgcccagcatgctcccctgccaccgaccaggagctgagtggggtctctctggggcccagcagaggttgacttccctgtacctggggagggctcgtcagctccacccacagcccttgctaccctcccttctctggcacctcggcaccctgcccagacccctctgcccacctgtggctgccacccacacagaaagatgcagatgtgtgtgggcacagcccgtgcacagccaccttggcctcaggctacagctggccccagctcgtcctcctccctccttgatacaaacttaaccagagcttcatgaaaggaaccgaggctaataatttaagaagtaatttgttattagtgtggcactgatgcactgagctgaccgaagtgcctttcagcagattattattaaatattaagtctgttgattcgaggcagagcggcactctggtcggtccctagcagctggggacatgcatttgtttcggtgatttatggaaatcaagccactccagggagcctcacaaatgtcgctgtccactgtaacccaggtatcctcccagcagtcccgggggtgggttatagatgagggagggtctgagaagttaaggaagctgcccgaggctgcacagcagctaggtgaaaaaaccaggattcaaacttggatctatctgagtcaagtctctgccactttgaagctgcatatggagcacacagtagggactcatcacatgtgcattattattattatcatctttccctcccaaacgtcagctccatagccatagatcagaatgtggatttttttttttaatttactaaagtatgtccagcactgtgagctcttgttttttttttttttttttttgagactgagtcttgctcttgtcgcccaggctagagtgcaatgtgcaatctcagctcactgcaacctctgcctcccgggttcaagcaattctcctgcctcagcctcccccaagtagctgggattataggcatctgccaccatgcccggctaatttttgtatttttagaagagacggggtttcaccatgttggccaggctggtctcaaactcctgacctcaggtgatctgtatgcctcggcctcccaaaatgctgagattacaggcatgagccaccgcgcctggccagtaacctcttaatatgctcaataaatgttaagatgaagggatggaagcatggatgggagggagggagggagggaaggagggaaggtgggaatagtaaagtcccggtgagagcaaagagtgacctaagagtcacttttcctgccttgttgtcactgtgcctccaccgaagtctcagagtctgtgatgttcttacctctccatgcctcacgctcttcacctgtaaaatgggctgagtcatcacagtgccacctcacagactcgctgggggttccatgagcaaatgcatgcagacctgctgagtgctttgccaggcaaggtgggcctcagtgtcaaccaccatccttactcgaaaaacctgcagaggggactcctgagcacctcgttccccagactccgggagaggaaccccaagtccaggaaggagatctccaggaaggagatcaattctggcccactacgggtctcagaccagaagcaggcctgagagaagtgtgcccggatcccctaggctgggggacccagaggagaggagcctccctctcgccaggtccactcccagcccctccctctacctctttgttccttaaagtcttgaagttgagctgcctccagaagcgcagagcttctgagaacagcatcactgaataaacagtccttccatgccgtgcctgtggtccacagagcggctgagacttcagaggactatgacggggcaggttgccctgtgagctggtcaggtggtcctgttccacttctctgggtgtccatctggggcggccacagaacctttgggctgaatgttggcttttgaacagatagtaatttttttctaacgcacctacaaaatgccccaaactgctggcgttcttgaggcttcacaccatgctagtcctttagatgttcaataccatgaaggaaatgaaagcagtggaagaaaggcagagaggaaggggcaggggcggcgaatgagtgacagaaaaggaggcaggtgactccagcggtacctggaggctcccgggcccacccgagccctaagctgcagcccttgggacgtctccattgagccagtccttcctgtgtggccttcggattcttggtggaggggacattcttgcacactagtgccctcaagtcaggactgccactcaccctccgaggtggccatcttctcagcttctttcatttctttctattttttttttagagacagatttcactctgttgcccagactggagtgcagtggtatagtcacagcacaccgcagcctcctgggctcaagtgatcctcccacctcagcctcccaagtatctgggactacaggcacacacccctgtgcccagctaatttttattttatgtttgttttagggacggggctcttaccatgttgcccaggttggtcttgaactcctgggctcaatcaatcctcccatttcggccccccgagttcagcttctttctttaatccatcacttaggccacagatatttaccagtcaggtattgaaacttacaaaaagcatagggcttggcaacctccctcttctccctggagttgaaggcagtacctgcctccccatcagcctggtagtgactgtttacgatgggtgcccaatcgctgatagaagaatgaatgagtggatggatcaagggagatttaatccatgctggagaagaagaaagaaagggaaggaacacagaaagagaaacaggccagcagggccccacgtgctgaatgtcaaagggtggaatggaccctggggccccaaagagttcaggacagaagactcttattggaccagtgcaggtggcggctttttgggaagggtgggatttcatctggaacaagagatgggaggcccaggtgggagttgagggtcccaataattagtacgttgttttccctgcctgagttctgaacctactgagagaaacaagagtaaggcagttggaggtacactcctgggttaattcctccagcgctgtggtgcccgggtgctgggcagcagtggggatgtgcccaggagtctccctccagcgtccccagtcagtcggggggcacccctcccctgctgcacgtgccggatgggtcccgagcctccctccaggggcaggcccttccctgccgggctccactccaggctccactgaggtagggcacaggccggctgtgccctctgcaggcagctgacagaagagagggaggtgggccagggttacctgccctgccctcaaactaaggaatcaagagagaccctcctggcaccaagcagctggggctgaagaagggctgggtccttactcttgacctctgatagctttatccccaaagaaggaactgccaagagggaccaagggctactccgaagggaggtagaggtggggtgtccctgcagcaggaagcacggagtcacatcctctccctactgagtgtgtcagagaggctgggggtgtggacagttggggtctggggctcctggacttctccagctggactagacattagaaaacgtcggccgggcacggtggctcacgcctgtaatcccagcactttgggaggtcgaagtgggcagatcacttgaggtcaggagtttgagaccagcctggccaacatggtgaaaccctgtctctactaaaaatataaaaattagccgggcatggtggtgtgcacctgtaatcccagctactcgggaggctgaggcaggagaatctcttgaaccctgggaggcagaggttgcagtaagccgcagtcacaccactgcactctagcctggatgacagagcgagaccttgtccccccaaaaaaaaatgaaaagaaaaaaagaaaacgtccaggcttcttcccttgaagccaggagcagggcccttctggatgccgcatggtcaagcctcatctactgtacctggagccttctcctgaccctgaaccctgcccttgcccagcctggctctcctgggggctcatgggactcctgaggcccctcccatcaccggtcaccccgcccgccaggcccctggcagcctcatatctgccaatacaaagccatacatcttggtgtgtgacaaatcactttttaattgcctgaaggaagaaatccattagtctttcctttccgtgagaaacatcataacgttcagcagagcccaggctggctggaggccgaggctgggggccgcggggctatttttagtttgcgtcaacatccccctccaagcatccattctagaaagggaggaattaaatcttcctgacaccccggggccacacggggagagcttgctgcagacccggggaggagaagccactgtggatggagtgttatttgtccaaatgaatttgtgtcacgtttcacaaaaaatctgcttccctgtaaacaagtggcagtcctcaccctcctaggcagctgaggcccagccctgtggggtggcactacctgctccccacctccccggccagcccacaccctctgtctttgtctggcatgtcctcggcggcacgggctgtggccgcagaaggccagcagctgtccagggtcacagcagtggacgttcgggccgaggggagctgaggccacggcggggactcctcactcctccttcctaagaccacagggggcagagttggggcctggggggctgctgctgggtcagtttggggttccactagcagtcctcaactttagagaaaggccagcgaaagtgaggtttatggcttgtccctgaggctgccttggggccagaggaagtgggtttgccttttgcctggtacagatgactctgtctcgattttgaaaaagatgcagaaagaaggaaagaaagtggagggcagagggaagggaagaggaggggaagggagtgaaggagagaggaggggaggggagggctaggaagatcccatccaaaaaaggggagtcaagggagatggctgggatgtggacaccacaggccgcccgccccaccccgggccagccacccacaggccgttgaggcagcaaggccggcaggtccatgccaggggtgagagctgagtccaaaggaggaactcagtgagtttcagtgaatgaatgaacgaatgactctggtgacaaggggctctgattggccagcatgtgtcttctgaagtcaggcacccctggcagggcccccggtcctctggggcgatgcctgctgagggctgggagctcttccttgggctggggaagctgcagtgcccagggagtgccgcccgcctccacccccaggtcttttcctgaagaaagcctgctggtgtgcaggggcaggctcaatctttacgtcagacagagtatgtgggctcaggacctgccctgtgacatggtcctaaagtaaaacttggaggggctctgggacgtctgggctgcgagcatggcccagtcacccgctagagatgggcaaagctgcgctttctcagtgcagcttctgtacccgggaaacctcagcactttcttgggtgcaggactggagacgagtggccacttgcaagctggagaagaccttggaatatgtcactgatgcaaacacaggagacttggctgaagaccacacctcctgaacctcacctggcaggtttaatagacagccacctagtattgtcacctctctgtggccaccaccctgggacacaacctatgaccccaggaggtgatacctcagccagtccctgtactttgagacccacaggcacctttcaaagaggcttctaccccacaggaacctggggcgctgccacaggtgtgaaaatgttttagcaagggaagcccacagtgggtgagctccggtctttttgctgttgttgtttgaatcagaacaaaatgcactacacgattatttctgtgcatgaaatgcaaggttgccaagtttaggttccacctgatgctaataaccttaattgtaaatcctttatgtatagacttgggctataacaacctcctcgtggcattaaactaaacgctgacaaaggtagagtgggccaagcatccctggcagcccccagaggtgacatggcagcccccagaggtgacattccagcccccgtcatcgtgtgtattaagtgacagggctcataaaaccccacagctcctttccccaccccttgcagtctggctcccagaggggcagatagttggagattctcatgcaaaataaattgctctgcactttcattaaaaagtaactgcaactgactcagcactttcagggtgagcggcagggaggggctttgtggcaaaatcaaaggacggggaggaggtgcctgcccctgggttcactctgcgtccctgccgctgcagcctgccctttgctgtgggttcggtttctctgcatcctagtcccaagtctgtgaccattgggtgtccttaaacaggcagctggagatcccagaatttggatcatgattttactggagctgggcaggccttgacaggggctctagcccagggttccctattctggaacaaaactaggaccgggcagggctgctgggggcagggacggggctgggacaccggcccctgggtccagcgagtgtgtgaagggctgcctccatggtgcactgggctgaggtgtggacgcagggctttctgcacggcaggcgcgacgctcatttaaatagcagatccgaccaaggccttccctctgctccacccgcggagtgctgccccgctgcctgcagcctgaagccctaaccctctaaagagtcccctgagctactcccagggatcccagctggccaaggtctcactgaccccaggcatcaactctggtggctcctgcccccattgatctctcgtccccctccctgcccacatcttcctcgtccctctgccatctcaagacatcacctgctccagagagcgtcctggaccaagcatggtcaggaagccctcggcttaggcaggggctccctgtccagtcaggtagcagcctctgagcaggcagcaggtgacattcatctgcagctgtgggctacagcgggcgcctcctcccccacagctgagaaatgcagcattcggagctcgcaggcatgtggcctaagcaggagggacgcattgccccacggtttatggggcgaagcatgattgagtggatggggcatcagggctgtctttggaaaggacacctttcctgtgatcctttgcccgtcggcagccagtccaagcaaacacagcccctgctccaggcagtcggcaaagtggcctcccccacaccatgaaggacgctttgagcccctgggagcagccagcagccaggtgcagccccaccagcttcagagtgggcaggacagagaggcccctgcccgagcaacagcagcaacacagccctggctgccaaggtcctaacaacccttctccaaaaggcgtctgtgcacagcggggctgactctcaggctgccaccagctggaatggggtggggctgagcccacgaggctgccagaccctggggacgctggtcctcaaggcctctctgctgaagggcatcgggatacaggagctggggcaggatcttccctagaagcttctcagcccgtcctcactgatgaatctcttcccttaaaatgaatttaggtcctttagccccagacaaatagacacactctctagcccctggaaggaaatgagattttaatttgggatgattttattcagcaaatgcccccaaaccatgcacttttcaaagggaaactccaggttcagtctcgccttttggggatagaaaaaaagactttttaaaatctttttcattcccagctcaaactgagaagggaaaacctgttcctctcaaaggggtcttttcctattttcttctacttcagaaaacagtctttcctcctgtctgacgtcgtggctctaggtttttctctgctctgttcttcatgggcccctgcctaataaatgtgttacgatcagaggcaagtttaccacggagctaatgatgctcaagcttggagccctcatttgcacgtgcagtgttgtgctggtagctgttgaacaaccagctctctagggggaaaagcctgatctgtggcatttgccaatctccatagtgcgagtactcccaccacggccaattctcaggctaccagcatgatgtcattgagtgcaaagttgagaggaaagatgtataattggctgtgatgagtcagtgcaagcagacatcagcaggccaggtcacaggctgtctccaggcccctgcaactgaatacacaaggagttatgtattcttttcattaaaaaaaaaatacccaggctgggtgcagtgtaatcccagcactttggggggccacagcggggggatcacttgagcccaggagttttgagaccagcctgggtaacataggagacttcgtctctactaaaaagaaataaaattaaccaggtgtgatggcaagtgcttgtagtcccagctactagggagactgaggcaggaaaattcttgggctcaggacgctgaggcggcagtgagccatgatcacactgctgcactccagcctggatgacagatcaagaccaagaccctgtctctcaacaaaaaaaaatgaacaaactatatagacctcagaccccaacaaactgagtctgcctcattacgatgtaggggtgggggttcttaaagaggtagggcgtgtgaccagctgaccagctgcctctccattggtggccctgccccaggctatgcttagaccaggcagcatagagctatcagtgtgggtgaacccacctttctactttgacactggaggagcatggagtttcctggcttccggtcatttgaacttcctgaaaatgtacccaagcgctgaactactagcaccttctagcatgtcctggccagaggggtcccagcctgctttccttccctttcatcctccccatggttcagagttcccctcggagatcacagcctccagatgcaaacagcctgccaccctcagggccagggttgcaagcacagagccctcgggccttccagtgttttatacatatttgaacccacatatagaaatctgggagtttcacatgcaaacccagatgtatgacttttcttgaagaatcagaagacctgacctcctggccctaaatccccacatggctgcaacaggcaggactgatggacagccacagccttgggggacaggacgtgggccatctggcttcccaggccacaccctctcaggctatctccccagtgctcaggctgaagagcagtggccttttcttatggtgtctgcacagtggtttttcttaaagaaatatttccctctacccaggtttcttccaaaagtgggaaatgaaagatagtacaagtgggccatgtgtttcaagagaaagcacgtagcatatttctttgtatgagtgaagaatgttcctcttggggctattgcgctgaaccattccaggggatatatcactccgaagtttgtgggaatggcgcctcctagagttgtgcattgcacagcacatgcagcctgattcctctgtttcctatgcaaactggaacagtgtcaaaataactccacttaggatgctatcgttctcatacagaattggctacatcacacatgcatggtggagtctgcccacctccaagatctcacagaaattccagccaggaatgatgagggcagacataggaaggcagggccagacggcagggccaacgtggaaggtgcctgcagagacagcatgagaactgcctgataggcatctcatgagtcagagaactagcgggccaggtagaaggttggcctgagttgagattcaggcaggggatcaagcagcgccctctgctgggctgtcccttacttttgcatggatcaccttgcagacttctgttcctccttcagagcccagctaggatgctgactcctccaggaagccttaccttctaggacgttagtcgtgccctgccctgggcttcctctgaaccctgtacacacccaacgttgtacatccttctctgtgtgctgtgattctgttgccatgatctggccccactccaagaacagtgcctggttcatgattgtgtacctggtaatggggacagtgctggtgcataagtgcgactcaatgaataattaattaaatgcatgaatgaatggagaaatggatggatggatgggtggatggaagacacgtaggaattccagccctggggacccaggctggggcccagcattagaactggagtacgggcagggtttagtcagggtgagctcctttggggaccagattttaccaggagagaaccctaacctggagtctctccatgagctcctggctgagtttctgaaatcctgccaccccccacccaggaaagcagctcctgctggggagaatagaagctggaagggtagcagtccggcatccaggccccagctcagctccatggctgtgagttcaatagatgtctacactttccaaggacatgggtaactggtgcaggaaatgttgtgcacattcctctttgcacgacagctggattcaccccccaaaaccgcccacctctgtgtctcagggacaccaacctggacgtatgggcctaattgctggcccttccagagtacaagtggaaacacgtgggccagttgagggtaaaaaatgcagtaagttaaaggcttctgagagatagttacatagtcaaaaaaaaaggtcaagaaaactattgccaaaacctgaaactctggtccttgattaattgactcaatcatagaggctttggcctacctctctgaagttgaatgaattagttgattagttgcacaaagttgctgcaccaacaggaggagggaagaggtcattggtctttagctaatggcacgtcccagcaagttgcttacaacctgccctgggcacgtcgacctggagaactggaggttgcagggtccctccgcacactggctgttgccaaaaaagggatgtgggggctgtgctgggcaggacagagtgaccttcctcgaggctccagctgtacatggcccagattttatgcccttcctccagcctcctttctttctcctgcactcctccctcccttcctttctggttccctccctccatgtcctcacgttttgacgctttgggatttgttttctgacccttggcctcactgcatgggcaagccccctgcctgtttctctcctgcctggagaagggagaatgggaaaatgatacctctagacagatctcgtccatgctgccttggctttgaggaaagaaatcaccacccttgtcataattattgatgggaactggatttgctgagttagaggttgggagaagggttgatattatggccacaggacttgatttggtcaataaagcaaattggtttaagtgaaaataaagcagcgctcacaagtatgttagaagaataaagtaattgctgcccaaggtgcacggaatataaatctctgtttgcttgaaattattacaatgtcgtattgattacttagaacctgccattgccttttaagttatagtttattaaagggtaatgtgtttaacaaacattttccccggcatgcaccattgaaacacacagaagttacacgggcgcgttcccccaaacccccactgcagcctttggttgttctgtggtcacgtgattaactttccaggctcagcttgcaggcaccagggtggtcacccacaggggttctggtgaactcaagatcctgccagaaccctgggagaggtgcatggaagggctcagaatgcgctgaccacactgacgtgtttttttgtttactgctctgcctggccaacaagataagtccatgaagtcaccagcaccgtccatgtttctcactgcttcctcggcgttcctccagaaccaagcgttacaccccaacacaggatgtgtgccataaatactggttgcatgaatggctatttttttttaacttcacttttttcttaattaaaaatttttaattacaaaggcaaacaggctcattataacaaatgaatacaattttaaaatatttttctaattagaaaaattaggcgtactcatagtagaacatttataagacatgggaaagtactaaaaggataataaaaaccacctataatcccatcacccaaaaataacctctgtttacattttgttatatttcctgccagtttgttgttgttgttgttgttgttttttgctatactcatgcctatgggtattttttcttttcacaaagttgataatataagatgaggtttagtgttttgcttttttttcacttaccattgtataaaagcatttcccccgtcattcactgtttctcaaaacatatttttttgttttttttgtttgtttgtttttttgagacagagtctcactttgttgcctaggctgcagtgcagtggcgtgatctcggctcactgcaacctctgcctcctgggttcaagcaattctcctgcctcagcctcctgagtagctgggattacaggtgtgtgcctcctgagtagctgggattacaggtgtgtgcctcctgagtagctgggattacaggtgtgtgcctcctgagtagctgggattacaggtgtgtgccaccatacctggctaatgtttgtatttttagtagagacgggatttcgccatgttggccagactgatcttgaactcctggcctcaagtgaatctgcccgccttgacccctcaaagtgctaggattacaggtgtaagccaccacgcctggcctaaaacacagtgtgtgtgtgtgtgtgtgtgtgtgtgtgtgtgtgtgtgtgtttgagccggagtcttgctctgtcacacaggctggagtgcagtggcgcgatctcggctcactgcaagctccacttcccgcattcacgccattctcctgcctcagcctcccgagtagctgggactacaggcgccctccactacacccggctaattatttttgtatttattagtggagacagggtttcaccgtgttagccaggatggtctcgaactcctgacctcgtaatccgcccacctcggcctcccaaagtgctgggattacaggtgtgaaacaccacacccagcctaaaacacagtttttaatggctgcgtaatatcccatcttctggatatgctgtaatttagtcatttcctgttggacatctgtgatgcttccggtgttcagcactataaataatactctgatgaacatccttataaataaatttttcatctcatccctgggtattataaaaggacaagttcttagcccttttcccatttgcactgagaataatccccagcagcacttgtggctgcagcatttaccccgagatagctttgacatgaaatatctcgcttttattattattttcacatggctctagtatatcgactttggaaacaaaagacctcattctatttttagcattctgtgtttagtagtggtatttccatttacaaaatatagcagttcccgaacgctgaaaatgtcaaatcctggaaaacgcagcatttctacatgtgatgttaacattgttctcaaacagttgttggctaaagactcatttgatgaatccgagttttctgaaatagacaattctgatgattcagatgattctgatgttagttctgtttagaaataactccaagaacagtttttatattttattttcacattgaaaatcagtgagatttgcttcatcctcaaagagtgtgtttatgtaaaattaaatgagtgctggcagcgagcagaacttttttttttttttctgaacaggaaaagggttaaagcaacagctcttggcagatgtcatggaaagggacagattctgggtgtgcaacctgtgccgttgtgttaaaccaagcttagtttaatgccttgctgccgtattctcaaaattcttaatagttcttaaaaaagggatcccacattttcattttgcaccaggtcccacaaatcatgtagcccatcttggttggtgtattagtctgttttcatgctgctgataaagacatacctgagactgggaagaaaaagaggcttaattggacttacagttccacatggctggggaggcctcagaatcatggtgggaagcaaaaggcacttcttacatggcggtggcaagagaaaaatgaagaagatgcaaaagcagaaacccctgataaacctatcagatttcatgagactttttcactaccacgagaacagtatgggggcaaccgccccatgattcaaattatctcccgccaggtccctcccacaacatgtgggaattatgagagtacaattcaagatgagatttgggtggggacacagccaaaccacatcagttggggaagactctttcccaccggtgttgaggagtcaggccatctctaaccattgagggtctttgtgccaggtctcacccttcatccccatgaaaatcaaagctcagagcatgatctcctctgtgccctgctgcactgagcctgagaattgtcgtacaaagagaactttctatgcagctgaagtttacccttcaaacactgagtccatttagtgttgctataacataacacctgaggctgggtaatgtagaaagaaaaggggtttacttggcacaggattctggcagctggaaggttcaagactgtgcagctgcatctggtgagggtctcacgcagcttccactcatggtggaaggtgggaggagagccagcctgtgccaagataacacgtggcaagagaggaagcaagagagagaaaccgaagaagccagactctttaacaactcgctttctccggagctatttcattccctcaggaggaagaaattaccccttcgggagagaactaatctgttcatgagggatctgccctcataacccagacatctcccacatggccccacccccaacactgccacactggaaatcaaatttcagcatgggtttcggcagtgacaaaccatatccaaaccatagcaaacaccaaaacttatatattatcgtggtcattcatgcctcatttatattgctttttatttgaaccataacttgcttatgccgttatttttgtttcttctttgaatttccaattctccctttcactttttcttaaatcttgaaacaatcagacatactaaaaagttgggagtacaattcaaagaaacttttttctgaaccatttgaaatttgccagcctgatgtcccatcaccccccaagtattttagcatctatgcaacaaaacattttctctgacaaaaccacatcagaactctcaaatcaggaaacaaacattgatacatgtctatcaactaatcctgtcttcaatgacattttaccgattgttccaatgatgtcagcatcacgggtcacatttaatagttgcgtccttcagtctcgagcagttcttcattttgtcattgacttttgtgaccttgacatttttgaagattacagaccagttactttataaggctgcccctcagtttggttttgtctgatgttttcttgtgattagactcaggtggtgcatcttgagcaagagcctcacataagggatactgagctctgtctggtggcccaggatttccaattttttttttctcttcaacttttaagttccaggatacatgttaggatgtaccctggatgtgcaggtttgttacataggtagacatgtgccatggtggcttgctacacagatcaacccatcatttagctattaagcccagcatccattagctattctttctgatgctctccctccccacccccaccaccaggccccagtgtgtgttgtccccccggacatgtccatgtgttctcattgttcagctcccacttacaagtgaaaacatgtggtgtttggttttcttttcttttcttttttttttttttttgagacggagtctcgctctgtcgcccaggctggagtgcagtggctcaatctcagctcactgcaagctccacctcccgggttcacaccagtctcctgcctcagtctcccgagtagctgggactacaggcacctgccaccacgcctggctaaatttttgtattttttagtagagacagggtttcaccgtgttagccaggatagtctcgatctcctgacctcgtgatccacccacctcagcctcccaaagtgctgggattacaggcgtgagccactgcgcccggcctggttttctattcctggattagtttgctgaggataacagcttccagttctatccatgtccctgcaaagtacatgttctcattcctttttatggctgtatagtattcaatggtgtatatgtaccacatttttaaaatccagtttatcattgatgggcatttgggttaattctgtgtctttgctattgtgaatagtgctgcaatgaacatacacatgcatgtatctttataacaaaatgatttctattcctttgggtatataaccagtaatgggattgctgggtcaaatggtatttccacttctagatctttgaagaattgccccactgtcttccaaaatagccgaactaatttacattcccaccaacagtgtaacagcgtttcttcttgtctgcaacatcgccagcatctgttgttttttaactttttaatgatcaccattccgactggcatgagatggtatctcattgtggttttgatttgcatttccctaatgatcagtgacgttgagcactttttcatatgcttgttggctggacgaacgtcttattttgaaaagtgtctgttgatgcaggatttccattttactcatgactggtgatgttcaccttgaccacttaattcaggtggtgtctgcaaggcttctccactgtaagcttactcattttctgtttgtagttaataaatattttgtgagaaagtactttcatagtatatgcaagtattccccatcagactttcagtttttattcatttgtttatgtataaccttattttattcaatggattataatctattaccattgttatttatttcagtgttcatgttgtctcagatttggttggtggacctccattcaagctggtttctgggtcatttgatataagcccaatcattctttgagcacttccttgctttctgaacaagatgttccaggcatatcttgtactttcctgaaatcaaccatttctccaaagaaacctggtttcttttagtggaaagtggtgtttagaagccaagatctgggcctgagtatgctcactgctcccaggcctctctcagtagatagagctggggaatatatgtatcatatgcacacacacacacacacacacacacacacacacacacacacagagttggccttccacattcatgagtttcgcatccgtggattcaaccaacaacgggccaaaaatatccaggaaaaaaattgcatttgtaccaaacatatttttttcttatgattattccctaaataaaacagtataagaaatatttacatagcatttacattgttactaggtattataagtaatctaaagatgatttaaatcaagcttgtccaacccatggcttgtgggctgcctgtggcccaggacagctttgaatgtggcccaacacaaattcataaactttcctaaaacattatgagacttttttgcaattttttttttttttagctcatcagctaccgttagtgttagtatatttatgtgtggcctaagagaattattcttccaacataatctccctgtacacaaccagtctcacatctctgccaccccatgtgggccccctccaaacccagactctgacaccccttgcaagggcactccactgtgtggaccccccactcacccgtcaatatgcccttatgctgttgtaaggaggattctgaagccatctccaggctcaggggaaacagtgacgtgattgattagtaatgtctgccatgaacagagggacaggaagggttcctgccacacatatgctggccccgacttaagatggtcagtgtgagcatttatattgatcaggtgaccatatcgttttgagagagaaataagaattaacaattgcaaacaataaaagttgacagttatgctgggcaacaggcattaaccaggtcactggtcatgccctgtatgggtactgaggaagcacagttctgggtctgctctgtggttttcgaccctctgtgttgggcacatgtctacagtttccagcagctcctttgccacctcccccaactccttgccctcttctgtagactgtgggagggtctggcaagcctccttaaggaggaagattcccatgcagggtgcgccttaggaatggaggtgcccatggagggcaccccttaagggtggaggtgcccgtgcagggtgccccttaggagtggaggtgctggtggagggtgcccccttaggagtggaggtgctggtggagggtgcccctttaggggtggaggtgctggtggagggtgcccccttaggggtggaggtgcccgtgcagggtgccccttaggggtggaggtgctggtgtagggtgtccccttaggggtggagatgcccatggaaggtatccccttaggggtggaggtgctggtggagggtgcccccttaggggtggagatgcccatggaaggtgcccccttaggggtggaggtgcccatggagggtgcctccttaggggtggaggtgcccttgcagggttcctcttagaggtggagatgcccatggaggtgtcccttaggggcggaggtgctggtggagggcaccccttaggggtggaggtgcccgtggagggtgcccccttaggggtggaggtgctggtggagggtgcccccttaggggtggaagtgcccatgcagggtgccccttaggagtggaagtgctggtgtagggtgtccccttaggggtggagatgcccatggaaggtacccccttaggggtagaggtgctggtggagggtgcccccttaggggtggagatgcccatggaaggtgcccccttaggggtggaggtgcccatggagggtgcctccttaggggtggaggtgcccttgcagggtccctcttagaggtggagatgcccatggaggtgtcccttaggggcggaggtgctggtggagggcaccccttatgggtggaggtgcccgtggagggtgcccccttaggggtggaggcacccatgcagggtccctcttaggggtggaggtgcccatggagggtccctcttaggggtggagatgcccgtggagggtgttttgacttctactcgggactcaccaggtcccttctcattttcttccgggttgaccttgttggcagcaggaagctgaccgtatttgaccttctcctgccaccacagaaccccttggccacctccctcatccttattcccccgattggtgcccacagaacctgtgcttggctgtcagcaaaggcgtcagaaatgggatgactcatttcctctccaatgccctggggcattcagaaagtctacttgtggaaaaagtgctttagataaaatgcagttgtggactggcccagctttagtttaaatcttttcatctcacaaatatttttaaggacccactatcaatcagacaatgtcctcaagtgatatgtgaggttcatgagtgattaaaacaaagacacctgtgggccgggagagacaaacagaaaagaaaaaaatgagtaactcaagcatgtcagaaagtgatatgtgttgtaggaagaagaaagagctcagagtaagaatgggagggtgagggcgggagggtttcattcttcaagaacttaggagagcctcctgtgtgccaagcgcccaggcttggccctgggggctcagagaagaggctggccccatctcagagaccacagcatctatagagagaggaacataagagacagaggttaggggctctggtgctcggaggaggagtctcaaaggaatctgaaagagggaaggaaggaggaggagggtgtgcaaaggaggagaatcccaaggagtcattgcaggggagtggaggagagggtgcagggagtggaggagagggtgagtttctgggaggggctggagtgaggctaagggtgcccagaggcagaagacagctgagctgacctagtaactttggatttaaaaatctgtgaatccacagctcccagagtggtaggaagagaagctgatacagagggttaatggagtgttaaatgcagatctttctttggagaccctggtctgggaggggaagaacaagatgatggttccggagtccagtgagcaagtttaacctgggccactcaccattcctttttgcctcaagagtgtggccctgatccagagtcctgaatggggaagcccagggcctcccactgcctgtgccacccagccactcccacccggctttctcccacctggacctcccctccctggccctggccacctgggcccctcccatatggtaggggcctcgccctctgtcccctccccataatccctcccacctgggcccctcctacctggccctctcctacctgaccctctttaacgtgatcttttcctacctggccccctcccacctggcccctcacctaaccacacctacctggcctcctcgcagctggccctcccctacctgactctgtctcacacagtcctctcctacctggcccctccccctgactcctccccactgaaccctgacacctgcccctcccacccggccctctcctacctgaccgtctttcacatggtcctctcctacctggcccctaccacccggccccctcacctgaccacacccacccagctgaccctctctcacctgggcctctctctcccaggcccagcagcagcccatagacaccccagctctctctgccccctccccacgaggaatctcccttggcctccttcacaggaaggcaaagtacccccgcttcattttaatggatttttgtctaattactgactggaacagatgcagagacaacctcattgaaaggtctgggaaggcgcaggattggcctgggagagccagtgtgaccttcaccctcacagggagggaagcaccacgaggttactcactagtccctcctggtctccaccccagtctccaccctagccaccctggggcttccctgcccagaggggagaagcaaggaagggaggagggtgcttatcacatcctgtgcccagctgggctccggaggtcggacaagagctgcagggccaaaggacatgtgtgcgcaggtgcactgagtgtatgtgcatgtgtgtgtgtgcacatgtatgtatctgtgcatgagtgtgtatgtgcatgtgtgtgcacacacacaggtgtttatgaggaagaaaacgcagggcacagaggaggaaggcacccagctagttcccagacgcttgttccttctctccattcgtaacagagcatgcctgaagtggccttgagctccagagaaccgtgtgtcttccaggcaacttcctgtgtccatcgggtcacgtcctcaccgcaggctcccagcagccccctcccctactggggacactgtggctgctgaagcttcctgacactccagagaatttaatgcaacccgactcccctgtggctttgcctgaatagggcctgatcaggcctgggtccccgtggccctcagagcctgtccctggtgtccagtatctgtggcccttggagcctgtccctggcactgggtctctgctgctgggactgctccctaagaggttctctctggtcttaccagctggctggttcccaggggtagaaggacacctcttaggcttctctccattcctgatggcctcagcacagaaccaagcacagaaaaacccccagggagggagagttaagtaggactgggactccagtgtagacctcagccaggttccaggatatgcactttttaaaatcctctcatttaatcctcaccagaatcctagaagtgggcctgtaggtgaggaaagagaagctcagagaggaccagtgacttgccataggtcacacagtgggagacggtagaacttggattcaaaccccagtctgaccccaaggggcaccagcctcctcctttgacagagcaaggctgatggccagagggactgatgaagtagccttctgaaggccaccacacccccccagtgccacccagcctagctctggaggcaagggaacgatgcttctgccacaagaggctgcatctctggaccgccaagtcccagaacaggacctctgagcccggacctcactcagcccctgcaaggtgccgtaaagtgtgatgcagagcttgctgcacagggtcaggcaaaccatggccccatttctccatccacccaggagccattcccagttgtgttcactgggaacagtggatgtgcctgtctcggccagactctgcttgtgaaacagcattcagcagactctcctgtgtgtgcgcctgacacacaggggtgggacaggagcagagcactggccgacaggagggaaggaaggaggaagtccagaagctggctcgcctgggcttcaggccgcagccactgtgagccctgtccatcccgggtcactgcccacgcatatccaggaggttgctcattaaactgaaagcaggggaggactggctctcctgcttcctgtccaaacactcagggctctggagcagcccgcccagttccgcaatggtgcactgcagcaaagcagggaggctgggttaggggaagagctggtggaggcccctgccacagctcccgggatggcgtgctcagagttgacctccagagtcacagtgaaccaggaggttacagtccaaggagcacggagccgcacggagagcctcttaccctgtttctctcctgccctgtccatgttaagcagtagctgagtggggatgtcattgtggcaaaccttcccccaacagccggtgaggacagagggacctctgggagctgcaataggaacagccgcagtctaactggctttcagagaagctaaagactgtgctaagattggtagtgagaacagggcctggcacacatgaagtaccttgagtgaatgaacgaatgagtgagtgagtaaatgaatgagtgaatgaatgaatgagtgaatgcatgaatgaatgagtgaatgaatgaatgagtgaatgcatgaatgagtgaataagtgagtgaatgaatgagggaatgaatgaatgagggaatgaatgaatgagtgaataattgagtgagtgaatgaatgagtgaatgagtgagtgaattcagggctcagctatgatgaagagggcacactggcagtgagggagagctgtgcagaaatctgtgctttagagaaagtgtagtcatccattcccagagccatcagctgtgtattgagtgctgccacgtgtaggggctgagatgcaggacccatcccacagggctcccctggagggagctcacagcctagtggactgaaagattgaaagcaagagggataagcgaagctcagggttctgtccctgaccctctttggtgtcccccatctgtgcacagaacctggctcagaggtgactgcacagatttcctggaggcccagatgggggtgctgaaaggtgctgagagaaacttccctggtttaagcctcaggaaaggaaagggcagcttcccagacatctccaggcaaagtgtcaggaaccctgggtcctgtagctctaacaagaattctcacctgcaatcaagagcttggattcaaagagaagggaggtcgtgctctgcagggctatctcaacagtgactctgagtccaggcctgaacagccacatgatgcaggggcgtgaaatcagaagtgattgtcaccctgtgctaagatgagaccaacatgactgcccccctgctctgtctctggggagtctgtactcaggtcctagcaatttgtactcaggttctttcagtgggccacaaagtgatgggttctggactctaaaattcctggatgtgggctctgttctagtgcacactgcagggaagtgtctggaagcatgagagaagagggaaataaatgtagaagatggcctgggtggtggtagctgaaaatttcctccacataaaggaaggcaggagtcattcccgggttcgtttcattacatggaagaagaagggtgttttcctgccaggtacctcccttcaagctcccttgctggcccagggcttaggaattccccagaagtggtcatcttcctccatttctctaccctgcactccttcactctttcagctggttgcttggcagatatctgtagagacctagtatgtgccaaatgctgttctaggtgtgaggttgctcttcctcgtcttagttctaaaccacttgccttacatgctgcgataacaaatcaccagctgccaccttcccctcccgtgcccagggcagacattactaatggatcacagcacattttccaaatgcagtctcagaatcctgcccagcctggccctacagctgtcagctgtcagtagaagcccatgaataagagaaaagtaatttgctatccctgctcttgccccctcctgtcactgcctccaccctgatcatctctgacctgttggctctttctgccattttcagcctcacacaaacactgacgatgtccctcccaccctctccttagcgtctgcctttgaccacaagctgggttcttcctcctcccccaggacttgagtttcaatgaccttctgaggttgtcccagttcctggaaccccttatcttggcttgcttcatcccccccaaccccatgccaaaaaaagaagccagatttctgtagggcagaaacaaaacccagcagacttcccaagccagatggtgggggcccaaatctgagaactgaatttttctgactttttttttcaagcaatctgctaatggaggcgagaacaagactcagggagttatcagctgcctctgtcaacagtgggtaatgatgtgtgaatgctggcacctcccagtaaactgtgaacctcaagggtatccccaagtgcctttcagcctgcttgccctccaggagaggggattgctccccagctgccccttcaaagcctgcagcgagatgggtgtgttctgggagccggattggcctgtggctttggaaatctatttatgggacacacagagctcgcccttttttagaactagaggaaactgacagcttcgattgacagaaagctccgcgaaaaggaagggagcatttgtttccatttttaaagtgctcaagcttatttgggggtgcatgtgggtaggacccaggagggcagctgggaccagaatttctcagagccaaagcaagcagcccctccattcatgctccctccatgggtcctgtgggtctgctgccctccacccacctgtggccaccccacagccctgctcctccttctcctctttctctcctgagacccagagctgtgccctccccaaagccactctctcatcattccccagggcagacagagccagggcctggatatcccaagaatcacaagcttggaactctcacccaaggagccgaatgaggtcctgctcctggaacaggcaggagaaaagcccctggctcccacggagctccagggcccatgggtggctctggtcacatttgcagcctggtgtccctgtctcccccagcaccaaggcaagcacctagcacgtggtcccccaaaccaagctcaagcccaggagtcattcattcacctcctctgtcacattccacccccaggtcaccactaggtctgtccacctgttctcctaaatgccccaaacccaaccacgtcctgcatctcacaccagctccaatctaagccgctagggcccttttttccaaatgcgggttgtattaatatgcagccatggtgaggctagcagatcagcaggcggctgcctgtttaagatggtttgttactcatagatcccatgaggagggggcaggccacgtcacacaggaccacttggggaagcagggagtccatcaagaggcagagggagccgggggcaatgtgggcagagcctctattgtggtttttgcaggaaggaacaagtaagacggggtgagcaggctttggagaaattcctggggtaattcctgcgggctctgggcggagaggctgcccctaagttgtccctggcctggggtgactagggcagctagatggtggcccttgggggaaaccctgatagaggaggttgtggggtatgggctctgggtgggttggtctgaaaggtgggttcccaggccagtcctttgctatctctaggaattgaccagccctaggggggcagtccctccaggttcagcaaggccccagaggtcaaagcatcagaaatacagaaaataaaatggcatgacgactgtgccttcttccggaccctggccaaggttttctgagcatgctctcacccttgcaaactcttccttgcacagtggctagcaataatgatcctcatgtggtcattacagccatgcacacgcacatcacctcgccaattcaacaccactgttctaagggtggccactgtggccattcctgctctcaaaccccatctcaaaccttgtgccccaccccacgctccagacacactggcctcttgcaggtgtggaatgcactcaattcgtctgcctgggccatccacctcccctcctctgctcacacccactcagccctgtgacccctgcctaaggatcctcgaagaaccagctcccctccctcactgcttgggcctctgtggtgggaattttggatccaaaagggccaccccactcagagtgagcattcagtggggcatgctgggcaccgatgacagggcacagctcatggcgggcactccagaaatagctatagaagagtttctcaaatcttcatggtgaccctttgaggcaggtgttcttgtttatccccattctttagatgaggagatggagcatcttaacccattgttaacatgttcaacagccaggcgcggtggctcacacctgtaatcccagcacttggggagaccgaggcgggaggattgccagacctcaggagttcgagaccagcctgggcaacatggcgaaacccggcctctactaaaatacaaaaaattagcggggcgtggcagtgtgtgcctgtaatcccagctactcgggaggctgaggcaggagaattgcttgaaccagggacgtggaggttgtagtgagctgagatcacgccactgcactccagcctgggcgacagaacaagactccgttcagaaaaaaaaaaaaaaagatgtgcaacagatcccatcacatctaacagcaggagtgtccagagcccggccaagcggacagaccagctctctccccaccctgagccttcacttcctaggctgaacagtgaggatttgggctggatgcttttccagctgttccccagctgtgacattctaggatccggtatgtttcatagccactttctttagaggtctttattttcttgcagaaaagcaaatgaaaaacataattttcattgcttctaaaagttattggtgaagtaatacacattcatggcaagatgccagaactcagtgggcggatttggcccatttctcccccagctcccttttgcccgtcagtcaattgctgcatatttactgggcacctaccgtgtgccaggctctggcccagacacagacaccgggtgagttagctggacacagtccctgacctccaagacctgcagccatagatccttgtgatgtttctggaggggctggcaggaggcatctcgggatctggggtgaccgcaagggtcttctctgggagcatctgagtggaggaagaaaagtgagggaggactgtctggggctgcagtggacagcggggtgggggcaagtctggtctgtgccaccagccccgtgagcatctttacctcgcggtgtggtgtccgtggggcttccggctctgggctctgtgcctctcgcctctgccattcccggcatcctgaggtaaagtgataaccaggcctcctcctcgcctggctctctgccactcccccagccaccctcctgtgacccaaatcccctccaggcccctcgctccggcagcctcttatctcctgcttcccagagccccgttcttcccagtccagctccgcctcggggccgcatggggcctgtgctgtgcctgctctcctgctcatggcgccagggcccccgcccgctgcctctgctcctgtgggactggattcaataccaacatgctgcggcgtcccccaggcatggcaggaagaggggggtcaaggccgccagggttgaaggcggggagcatggagcccctctggatgggacccaggagccaacacgccgtgcccctccagccatccaggacagggtgccccagcagggcccagacagctgcttccctcactcctgagcagacagggaggaactcggctcccttctccagggaaaagtcttaaaatgtatttagggacccactgttgttccttccaaagttgcctgctcggattaagtccactagggctgatgggcagtgggcatggtcctgaagatgggaaggaatacctcagccatgtacatccctgtccccccagccccgaaacacacggaactcacccgctctgcgggtctggggtgcagaggagaagcaggggcttccgccaccccctgtgtctgcagccccaggcctctatacagtgaaaacccactcgcctgccgaggctgtcagaattaaagaaggatttcagcagctgtagtcattaagataaaagttgcactaatgactccagcgttatttagttctgatatcttaatttaattggatttttttaattaagaaaaagacccataatcctgcaagcactgagctggtgcagccttttcacaagttacccttaaagggctgggtctcggacccccgtcccccctgcctgaaggccagggtcactttgggagaggagggacaaagggccaggtgtctgaactgagaaggaagcaaggagccaccaggagagaaaggccaaggctcccccacatggcagccgctcaggaaggaggcggcagctggcaccggtggtgctgtctggcacggaggccggctgtaggcattgccgccacccgccaagaggggcccgagtggtagccattctccacccccagagcctcccacgcaccccagacatgggccttgtgcctcctgtccctccacccagaagccccgtccttctcaagggcacacggccctcctgcacccagctctgcccaggggaggggaggttctcaagctgaccctcctgcctcctggccctggacggccacagcacctcttgccctccctgccaccttcccctccaggctgtctcagccaggggctgcttggcaacagtgattgatggtttaccaataggagtggaatgaaattttaatagtctcagattaaaggatcagagagcagagggaagcggggagcctgcctgccgacttggtgttttcacgccgagcacagctcggagccctgcagaaggacctgctaatgccacggtttggggaggtgttggaggggtctgcactggaggattcctgagacatcaggcaggctctgagcctgcgcctgtcacagggtgggccggaggacacacggctccttggggtccagagctgagccccaggagcttggcatcctcactgaatcaggatgcaccccaggatgcaactgattgcaccccgatgtcctctgagcatcctcctccctagatctgggctgaacttccagcttctgggaggccaggggaggggggcctcagggcctgactgcaggagaattctagaaggaaacacaagtcagactcgcagcgagtttccggaacctgtctgggttcttggatgagagcttggttctctgctgttcttaggaaaccatgatgtttctgttgtttgggaattctgtgtaaaataaatgggcacttcctccaaatcacatgtgactctgggaccccaaggcccaggctgaggatggatctaaatggggatttgacctccagctcaggagggggattcttctcctctcccccaactgtggggtgattgttcctatccttgtccctggtcccgaagggggaatgagggcagcagggccccctggcacctgtgtgggattctgccaccacttcttgtggccctctaaggtgcccctgcacactctcctttctgcaggccccactgcccttcaggtcccctggggtcgcttgtgtcccctgaggcaggtgctgaggctcaccctgcagcccaggctccaggcactgagccccaggggtgagaggctgagcagagtctaacaggtctctgcggcagcatgggctgggagctggagccgggaacatgagatgtttctgtcctctgggcctcagttttctcctctgtgaaatgagccatgtagaagatgggatggccaatgtctccatcaggccccaaggatacttggccatctgggccatgagtaaggcctatgcatccaaagccagccattaggtcctcagacgtgcagacaggcagggctggctgtaccacacgggccaggggagtatgctgtgatggattgtgttttgaggtcaccgcggccggtgtgcatctcagctggtgtaagaccctgtgtcactgagcacggtaacccactggctggctcatgcgactgcctaggactgctttggtgccatcagcaaagagcatcatgagaacatgggactcggggcaggcactcaggtggggaagagagaacacacaaaggctgggagctggggcctggaagggcagggacaggcagggctggaggtgacaggaaggaacgctggggtatgggcctcactagagcccagatttatccagcagtgccagctgggagcctggaagaacaggagtccctcagtgggggtgactcgtatgactgtgaaggacaggctgggacctagaagccctggccctctgcgctcaggctcagggggtgacgctgggctgggcgcttcccatgaggcaggatcctcattgctgtcctttctgaacaacgcccaagaatccaggcatggccaggggctggccgaggggggccggtgggtggtgaatgaagggctcccagcaaaccacagccgatccaggcaggaagagcccaacaggttcagcaggagcacctggatctgatattgatcatcccagcccctctaccatctgctcagctaccaaggctgaggttggtgctcctggaggagcctccaggagcccagctggggtgatggagggacagagggacaggcagagaggccggcgggcagcaggccaatgggccaggcaggtggggcaggagcctcctcttgggagtcacatggcccctgagggcatgggactctccctgctgggcacaccccagcggcaccagcacactcctcatcctctaggatgagcccaagcagaggtgagagaaagcctcttgcctgtaaactcgttgcaggcgcagggatgggctggttcagggaggaggggagactgtgggcggcttgcgcagcaccctctgcaggcagagctggttacatgcagcagtggcacaggatcagcaggcaaggctccatgatgcccgtcagaggccacccctccccagccccctaggccactgtgttagattcttcacgacgcctgtcagaggccacccctccccagcccaacaggccatggtgttagcctctccacgctacctcccacaagcagaaatgactcggggatggatgagaacgaaccctcatccctgcctgcacgccggcctggaggaggaagccatcctcgaggcagccttcaccagcatgtgtcaccaggcactccatttcctgggctccatttttcccctgacctgcccagtcctgtgttccaggtcagaagagcaaacgcagtctccagagagatcatgaggctttctgcagactttgtccccatcgaagggtcgtggccaagatggtgattgggagatggtgttcagggaagcctttgtgccccaggaaaagccaggccaggcgtgcctatctcctgccagcctcactacccgcaccaggattcacgggttgcagctgcccagtcctgaggcccggcaccccagctccggcccctcccaaatctgctattgtaagcactacacaaaactttaaagaatgtgtgttagacaactgtcactcagcatatttgatggtgttttgccttggtttgaatatgtaaaggcactaagctgtttaattcggtgcttcctgcatcgttgggcagtgtaactcagttgggtatcagggctggtggcagcagcagggcaggccgcggcagctcagctaatttaagctttgtttgctgcgatgctggaacttctgcctggctctccgcattcttcccccaggctggcagacggctctgcccactcccgcccgcctgcgacacctgtcctgctgctccccttgacagctacctggcccctgacaggcagcagtacccgctgtcacgctgcctgcatgtcccagaaatgttatctcctctttttcggagatgtcacccacaaccgtccgaagagatacccaaattgtacgccactgctcagatggtttatctgaccccgcagctggcacggagatgctgggagaagggtctgatatttcccgcatctgccgttaaccctcgccaggccagcagtagcccaccccacttcttgttctcatggtccccaggacccccaagcaaggcggacgggatgacaggccctctaaccccaccgcccactcacctgcagcctgtcaacagccagctccgggactctcccagggccccatgggctgtttagccagagcttggggcccacccaccccagctggtccttgaatctggatttggttgggggctgtgaggcccatcacagaggtgctttctgggtacactgcttcccacattctagagacgactctcaacagccagcccctgctgggacttttgtggcctttggacgcccaccagcccctccccagccccaagctattgtgtccagtgtccagggtccctggtcatcgggctgtagcccccaggcatcggggcagccccatgccccctgctcctttctgtcctggacttttcctcacacatgggggcaagcggccacagagacaggacactaagtacctgccagagtcttccgcgcagctgctagaagcgaacctgcttttggactggcccaactccttacggagaggcagggatgggggtgggtctgtggaaccagccgcacctcaagaagcctggtttggggagatggtcaggactgagacctgcagcacagcaggacctgggaggtcagcgaggctcggtgggacctgctagcagctcccgtgccttctgttcccactcgggccccactagagcctgctgtccaggcccaaggctggcctcctcatgtggagtgggcccagctgtagcaagttttgtcttcagccttccacatcagggtgttagcaacccttggcttggggtggctctgatggccaccttgagactggatggcagccagtgcgtttgctcacggccttgtgatctgagtggtatcagtgcttctgcaaagaacacagcattctgggaccacacatctttttatgcccattggggaaactgagtcctggagagatacagcgacttgttgaatgctatatggctctgcaaagtagaggctcctgcatttacccagcaaatattattgtgtgccctgcaaacaaagcagaccaaatgcctgcccatggaactgcattctggagaaggagacataagaacaggagagctaagcagaacctgcagaatattccatgggggtaagcgctgcagagggagggtaaagcgaggaggggctgggtggggggtagacattcagacccaggccttgggtgtcatgactgatctagaagggtccttttggttttaggtttttagaattcaaatgaggagaatcaaatagaagttgaatcctattctccagaaacatcgttctaggtgctaggcccattggggctctccggatgttccgaccccatgtcccctcctggggtgcacccctcctggcctgtggtcctcccagaccctctatttccggctattgggtagggctggcctttgtcactccacctgccaggctggcttctaaggcaagagtctctccctgaggaggagacgccaactcagctctaatcttccccttcccggagacggcgtgctgtctggattatcgctactgatgtgatttgtaagggccgtgggagggacagcggttatagtgaaccctgaaaattaattagagagggcggcgccttcacagggcaagtggctaagaccttgcttcttcagaagctctgtaagctcccatgccgtgggaaaacgggctcctctgccctctgtttcctgggatggcccatgcaccaaaaatgagacacagcaaatatgagtcttggttgcctgtgcatgcctgcgtgtgtgtctgcaagcttgtgtgagtgtgcatgttcatgtgcgggtatgtacgtttgcaggcgtgtgtgtgtgtgtgcgtgtgacccccagacatggttgtcgtccaggaagctctgcaggccctctgccctcccagtgtccagtggagtgagggctcagggactggaaggagtagaggggtcctgggaggcacgtgaagcagaggaggacaagcaaaaggctgtgaggattagaaggagatggagactgaggcagaaaaaaggagagttgagagggatgagaacaaagagacaatgaacaaaaacagtggggtggaaaaaaatagtcaaggagaaggagggtgggggacagagaaatggagaaggagagagagaagcaaaggaagcaaggtgggagagtatgagagggatgaggaagacagggtgacaaccacgagatcaaggtggatggggggtgggagcagaagggcaaggcccctcagggaggtgagggacccaaagcagaggggctgtgggtgccagggggctccctggggagactcctgccagtcacctgtgctacctggatatacccctcacacccccaccctccacttgccagccgatcactggggcagaaggtgggatctccatctgtccctcctcattccccggagaagcacccagagagatgtagctgccataaagggctggagaagtgggcgctgcctttggggcccacgggcctatggggatgggagtgaggcaggctgtggggcagtggggtgagtctctgagcaggggcagaaggctggtgagggcccaggggagcctactgggacagctgacccaggcttctaggccccagggacaacccaggtccctgaccacgtggtagagtgaagaggccaggaacagagggcttggctgagtgtccacatcaggggctgggctttccgcagagagcctggctctaggctgtccggaacagcaggacggggctggcagagcttgggaccctcgaactccattgggcctacctgactgagaccccaggagagccaggtcctgctcctttggggaggctgcctgggggcctcagccatactgtggggctccttggggaaaggaattcctgggtattttctgggggctgttttatgttgtttgttttgtcctcgtgtcttagtctactcaggctgccatgacaaaataccatagaccgggtggcttaaacagtagacatttacactctcacagttctggaagctggagggccaagatcaggatgctagcgtggttgggggctggtgaggactcccttcctggcttgcagacagccgccttctcgctgtgtcctcacatagtagggagagagagagagagagagagagaatcttactcttcttagaagtcttccaatcctattggattaggaccctggccccatggcttcattgaaccttaattaccttctaaagctgtatctctgattacggtcacactggggctttgagcttcaacatatggatgtggcaggatacaattcagccatagcaccttgaaatcactttggaaaaaaagatggaggttttcctggatcctgcctgtgctctctagagactggagacaagggatctggtgcgagccgggctgggcccctgggtgacccccaggcactcactgtccctctctagacctttctttccatttataaatggcaaagagccatcgaccctgtctctggaggatgttgggagagatgattaaggttatttttaagtatggaaagcagcctttggagataggcctagtgtaaataaggctggttttgttactcgtaataaacatttattaagcacccaccgagttgcaggcaggcactgcacagaataccaaagagaacccagcccagcccctcaaacttcccaccagcccctgcctcgcttcctttcttccctccctcccgtggttgttgatgagcagagagaacctggcctaagcaggcaggcagccccagctccaagaaaatcacatgaccatggctttgcagatctcaaaaccgatgtgacacccagacctcagcctggctgggccacagagccctccacaggcacccagaggcctgagtccctctgggctgtgtcacacttagaaggctctctcagcctcatccctgcacatcaggagggaagacaacgagatgtccagtctttcccttctatgcccagtgggcttcatcgtgcggggagggcaatgagaccagcccaagccccagattggcactaggagcatttcacatgctgccagactcccgagcaccccctctgtgcccacacggacacagtcttcatgggccagtcttcatggaccttgcctgctagtaggaaggagctaaaacaagtgagcgtagcagatccatgaaaatggggacttttgtgtgtcccaccctgggtcagggtctgggatggaggaggctcagagcagacagctgttagggaaataagtgaggccagctgagtgaccttggggacggggacctcaagtgtggataataactccagagcaggggtccgttcccggaatgtggttctggaaggcactctgaggaggcagcttggctggcaacctggcagagtagaaggggcccatggtggcagcggaggaaggccactcaccatggaagcatggagggcaggccctgaggtctgaaccacaggcgaagtgtggtgatgaggaccagggcaggcaggactgctcacagggaccctgaaggacaggggagggccagctgcaggagagcctccacactcgacatgcaattgcagacatacacctgaatggcaggcagaagcagaggtaagggacaagtctgagtatttgaaagctctcagccaagctgtagcagtgggacagggaaatggtggcgtcaacacaggtggtggccgatgacagggaaagcagtggatggatgggagacgtgctttggagacaggccaataggcccaacccctgtgccagcccagcttcctggtgggttgtttgcactggtgggtcccaccttggtcctggattatccacatgtgaatcacccaaggaccttatgaaaatgcacatcctcaggcctgggccacagagagcctatagtggctgtggaatatgtattttcacaagatgctggggtgattcagatgggcagtcagtctatggacttcaagtctgtgccatgtattttatcctgggctcaatcaccacccattgaaaggtgaagagagaaaactccggtcccaaacaaactgagatcacagctgggctctgccactgttaaccatttgtcctcaggtatataacctaaactttcattgcctgtttccacatagtaaagtgaggataatactatcacctacctaactgggttgttgccagaattaagtgagttaataaatagcatgctcatagaatattgcctgacagatataaggtgatcaataaatgtttaccattaccaccgtcatcactaccaccaccatctccatcatcatcatcatcaccaccaccatctccattatcatcatcatgatcactatcaccatcatcatccttatcatcaccatcactaccaccatccatcatcaacatcaccatcatcatcaccacatcaccatcaccaccaccatccatcatcaacatcaccgtcgtcatcatcaccaaatcaccatcatcatcatcatcatcaccacatcaccatcaccaccaccatccctcatcaggatcaccagcatcatcaccacatcaccatcatcgacatcactgtcatcaccacatcaccatcaccaccaccatccatcatcaacatcaccatcatcatcaccacatcaccatcaacatcatcaccacatcaccatcaccaccaacaaccatcatcaacatcaccatcatcatcaccacatcaccatcaccaccaacaaccatcatcagcatcaccatcatcatcaccacatcaccatcaccaccgacaaccatcatcaacatcaccatcatcatcaccacatcaccatcatcatcaccatcacatcaccatcaccaccaccatccatcaacatcgccatcatcattgtcaccaaatcaccatcaaaatcatcaccacatcaccatcaccaccaccatccaacatcaacatcaccatcctcatcaccacatcaccatcatcatcaccatcacatcaccatcaccaccaccatccatcatcaacatcaccatcatcgtcatcaccaaatcaccatcatcatcatcaccacatcatcatcatcaacatcaccatcatcaccgcatcaccatcaccaccaccatccatcatcaacatcaccatcatcatcatctcactaccaccatcaccatctccattatcatcatcaccaccactatcactatctccatcatcatgatccctatcaccatcatcatattattaccattaccatcatcaccaccatcattctccatcatcatcattaccaccaccatcatcaacatcaccatcatcatcagtgtcatcatcaccaccatcaccatctccatcatcatcaccacgatcatcaccatctccactatcatcatcgtggtcactatcaccatcatcatccttatcatcaccattaccaccatcatccatcatcatcaccatcatcatcatcatcaccaaatcaccatcatcatcatcacatcaccatcaccaccaccaaccatcatcaacatcaccatcatcatcaccacatcaccatcatcatcatcatcactaccaccatcaccaccaccaaccatcatcaacatcaccatcatcaccacatcaccatcatcatcatcatcactaccaccatcaccatctccattatcatcaccaccactatcagtatctccatcatcatcatgatcactatcaccatcatcatatgattaccattaccttcatcattctccaacatcatcatcaccaccaccacatcaacatcaccatcttcatcatcacatcaccatcatcatcagtgtcatcaccaccatcaccatcttcatcatcatcatcatgatcactatcaccatcatcatattattactattaccatcactaccatcattctccaacatcaccatcatcatcaccaccattgtcatcaacataaccatcagcagcagcatcaccatcatcatcaccaccatcatcatcatcactaccaccatcaccatcatcaccgccaccatcaccaatcaccatcattattattactgtaccacccaggtgcagacagtgtgtcctggatcccagcccctgcagcctccatcctagctgccatcgtcaggtccccttagtcaggaaacacccaggaagtgagttttcccataagctaactgccctgcctaatcctttggactcttagtggaaaaggttctaaaatcatgtgtccatttccctgccttattaaagactgtatcaatttaaaatggcttttgctttgatcattaggggtcctgggaggccttggggccgtcttgcttaattctaccgagaccttgggtgggagatcagggatcccttgctgggcactggggggatccaaaactccctgcaggactggttgcccctcacgccacctccttcctgtgatccaatcctgaaattcatccaggagagttcttttccctggcttctgcttttgatccctgaggagatgcaacccttcctttaaaagttcctacattccactgtaggtcaattacactgtaacctgaattggggccctttcagagagggccggagaacttattgcttaagctggaagggtggagggaggaagcacggggaggaggaagccaggggcaaacccggaccagcccgtgcatgtgccaagggctggcccaggatgtcggcagtcaccagcaggagtttggctgcacatgggccccagccagagacctggaggctgttctgctatcaacttttaattaaggaaagtcctctagtgccattgaactttgtcctgaaagtggaaggcaggggtgccttgctggttggttcatccagtttgttctctgagcctggcactgccctgttcaccaaggccaaggtcctgtcagcctcctgctgtgtcagcacagaccctgcctgggacccctgcttccccaggtgggtttgaagggcctcacctctgctctccatcaccccccaccgcagagggaaaatcagtgttatcatgcgaggatggggatagggtacggagactggagagagcctgggagtcagaatccaagcctggcctcccccatgaaccagctgggtgatgtcaggaggctccttaaccactctgagcctcagttgcctcaagatgggcagcctttctgtgtcgccggaggttgtgaggattaaaggtggtgtatctgtaaggtgtaaggtgtccctcccagagccaggcctgtgcatgctctgcaacaatctgtgcccaactgccttcaccttcatggaaaacaaagtgtcttagtccattgggctgctatagcaaaatgacataaactaggcagctttcaaaccaaactttatttcccacagttatggaagcagcgagtccaagatcaaggtcccagtagacttagtgtctgctgagggctttctggttcatggataaccatcttctcactgcgtcctcacagggtggaaggggcaagggatatctctcaggccttttttctaaggccattaatccagtttatgaggattctttttctttacactttttatggtttattttaggttcggggtacctgtgcaggtttgttatgttggtaaacttgtgtcacaggggtttggcctacagattatttcatcactcaggtactaaacatagtacccaataactatttttttctgatcctttccctcctcccaccttctgccttcaggtaggccccaatgtctgttgttcccctctttgtgcccatgtgttcttgttattttagctcccaattataagtgagaacatgcagtagttggttttctgttcctgtgttagtctgcttaggaaatggcctccagctctatccatgttgctgcaaaggacatgatcttgctctttttttatggctgcatagtattccacggtgcatatgtatcacattttctttatccagtctatagttagtggacatttagattgattctatgtctttgctattgtgaatagtgctgcagtgaacatatgcatgcgtgtgtctttatggtggaacaatttatattcctttgggtatatatccagtaatgagattgctaggtcgaatgggagttctgttattagttctttgaggaatcaccatactgctctccacaatagctgaactaatttacactcccatcatcagtgtataagtgtccccttttctctgcaacctcaccagcatctgttaccttttgattttttaataataggcattctgattcctgtgagatggtatctcattgtggttttgatttgcatttctctaatgattagtgatgttgagcatttttcatatgcctattggccgcatgtatgtcttcttttgaaaagtgtttgttcatgtccttttgcctatgttttaacggggttgtttgtttttagcttgtaaatctgtttatgttccttatagattctggatattagacctttgtcagaagcatagtttgtaaatattttctccaattctgtgggttgtctgtttactctgttgacagtttcctttgctgcgcagaagctctttagtttaattagatcccatttgtcaattttggcttttgttgcacttgtttttggtgtcttcatcatgaaagttttgccagttcctatatccagaatggtattttctagcttatcttccagggtttttatggttttaggtcttacatttaagtctttaatccatcttgagttgatttttttatatgatataaggaaggagtccagtttcagtcttctatatatggctaaccagttgtcccagcaccatttattgaataaagagttctttccccattgcttgtttttgtcagcttcgtcagagattagatggttgtaggtgtgaggcattcccattcatgtgagctccatccccgtgactcaatcatctcccaaacccccacctcctaataccatcacctgggggtttaggatttcaacataggaatttgggggaagacacacatgttcagaccagagcagaaaggaagcttgctaaagacagaagggaaatggaagacgaagataaaaggctgccagggctggccaagggcccagtctgataagaaaccgcacctgtgatccagctatctgtatggacagccacccccttgcccatccctctcagccccagcccagccccagctcttccagaaacaggcagccggcgcctgaactcaccaaagccttatgcctggcctgtgttctaccaggaagcaatgtcttattttaagccatatttgtttttctggttcagaagggtttactcctggacaagactcaagttcttgcactgggcaaacctaatggagtggcatgcaggaacagggttagcatgctaaggatcgatggaaactggggaaagaaaaacctggcaaagcaccctacttaaccctcagagtgccagggccctgctccccagaaccccttgcacctttgcagctgggcacaccatggagtttacacagattgacaaaccctcttgggcagtgggactatggttcccattttagggtcaaagaaactgaggctttggagagtgaactgctggtcagcctgaggtttgcctgtgctcagcggggccacagctgcttccgtgccatccagataatggtgtttctatgaagggaacagtggtccctggctgccctaataaattaccactgaccgggtggcttaaaacagcagacatttatgctctcacggtgcaggagtccagagatgtccaaaaccacagcgccagcagggccagttccttccaggagagcctatgcccggcctccccgcctccgctggctcctggcaagcattggtaccccttggcttgcagctatgtcactctgatctcggcctgtgtctttgcagggccttctccctgggtgcctctagtgtgtctctccagctattgcatctaggaccactctaccgcagcatgacatcatcgttttttgggtttttttgggtttgttcttgttgttttgagacagagtctcgctctgttgcccgggctggagtgcagtggcgccatcttggctcagtacaagctctgtctcctgggttcaagcgattctcctgcctcagcctcccgtgtagctgggattacaggcgtgcaccaccatgcccggctaatttttgtatttttagtagagatggggtttcaccctgttggccatgctgttctcaaactcctgacctcaggtgatccatctgcctcagcctcccaaggtgtgaagattacaggcatgcatgacctcatcttaacaaattacttccataaaggctcaatttacctgagccaggagagggctctcagggcttccctgcaggtgtccacccgacaggcggcagcatgtgggccgtgcagggagtaacaggagaaagacacaacaccatgtgccgagctctgagccaagggctgggagctgggagctgcgagctggtcctgtgcacctgccaaacagaccttccaagcagacactgccaggcgttatacatgactgtggaaatggggcggtgcctgaacccacccaggaaggaagggcagcccactccccttgcccccatcagggagccctggcaagtgagctgtggtgttggggaacacgtggcacctcgtttgcacagcccaggatgtgcagggatgctccctggccagctgagtggaaaaataaattacctgaggggctgactcaggccggtcattttgccagtgaagctctgctaacgctcactgggcacgggccacgatcaatatgcctctatttttaactccaggatcagcagggtcattttccagagaacacgggctgtttatttagcttcctctcgacgcgatgcagagaggtccgcctggccagctctgtcccgtgccaagccaaccggctaacctcagccgtctgtgccttcctggggacagtctttagactttcaggggtcaggtagagagaggccaggtgtcaggctggctgagatggaagaaaagttccaggcttcccacctccagccaacttggcttccacctgccagtttcattttgcaggccccagacccacaagctcttggcttactgagaggtccgtgccccaaccccagcccagtcccagagctccaccagggaaggacggacatgtcgaccagcaatagtgctaagcctagtggcagccgcatgttgagctctgggctgctgcttcatgcacattccctgcctctgacgcagcaggattctgcttctgtctgtgcctctgtggtctcatctgtagaatgggctaatattgttgccttggatagtggtgaggatcacatgaaataactcatgttgggtgctcagctctgtttctggccaatgataagtactcaatagatgtcagctgatgcctttgtggttattctttgctgaatgccacaacacctcaagctgagagtcaagcccaagggactcagtagcctgagctgtgcctctgcactgaattcctctaccccacactgccccgactctgtctctctggatagaggcctccttgttttttagtgcatcaaaatcactcccaccaaacagagaggcagggaggtgggtcagacgtcctcccagaacacaggccccatatcaagctaagttcctcctgtttcttaggggcagaatccagtttacagaacatggaaccagagtttgcagatggcctgtcatgtgtacagccctgaggcaggagaaaggaaatgagatctaagcctgcctctgcctcaaatgcccatgtgactttgggctagtcacctccctgcccagggcctcagtttctgccccagcaaaaccatggccaaaagggttcatcactttaaataacatgtatcaaggaggagtctgagttctggctcagagggaaagagtgcagtgattgattagtaatgtctggcccaggtgtaggcagggaaagatgaggcacacttgttacttacttgtcatagagctaagtggtaacaccttattggatgagaccctggggaagaggaaagctgagggaaatccactcggagaaggaatttgcactgccaggcaaggccattctcagtgatttctgagggccctccagttcctgcttccctggagacgtcagggagggaggtggcagaggggcgatcaaggaaatggagcaaggaggcgggcctgactgcaggaggctcagcactggggctcagttttgttttgttttgttttgtttttgagacagagtcttgctctgtcacccaggctggagtgcaatggtgcaatctcggctcactgcaacctccacctcccaggttcaagcaattctcctgcctcagcctcccaagtagctgggattacaggtgcccaccaccacgcctggctaattttttgtatttttagtagagacggggttcctccatgttggccaggctggtctccaactcctgacctcaggtgatccatccgcctcggccacccaaagtgctgggattacaggcgtgaaccaccgtgccaggccaattaagggccttcctgttacagaccaaatgtttgtgttgtctccccaaaattcatacattaaaatcctagcccccacagtgatggtattaggaagtggggatttggagcgttgtttaggttatgagtgaatacaattagtgcccttataaaaccttataaaagaggcccaagagagacacctcagaccttccaccgtgtgaggacgcaagcaagaaggcactgtctaggaaccaggaaggggcctcaccagacactgaattgatggtgccttgatcttggactttccagcctccagaactggaaatccatttctgttctttataaaccacccagactatgatattctgctatcacagcccaaatggactaagacatgtgaggtgcagaatggattgagatgccacacggtggagagtgatgggagcgggtgctgcagctgaggggagcagtactagggagccagcaaccatccttgagagagtgcatggccccaggaaggtcggattgtaggaaagattgcctggcaggggtgtgcaggatccaccagagcagagaggtaggaggacgggggattggccatcacagatacagggaatttgttaatgaagatctgtcttatggctctgaaagtggagaaaggggctgaatgcatggggtgccaagaataggtactcaatagatgccagctaatgcctttgtggttattctttgctgaacgccacaactcctcaagccgagagtcaaacccaagggactcagtagcctgggctgtgcctctgcactggggagatgggactgattggtgtgagggatcaacaagccagcatcgtcctcccccggaggcccagtgtgcttggctgtgagatcagaggcctggaggagacgttcctcagatccctgtcacctctgtttggctaggactgtggcctccctatgtgctccagaaactcatctggtgtgtagaacgaggtgtgccatcactgaaaagggcccccccttgtgcttattttttgcagattaacaaactttaaggagtagccccaacctctcccagcccctcaggagggaagcaaggccacctgtgtcagcactccttctcaccgtcacagaccatggctccctctaacggttgcctgtgactggtcgggaatttcacaggctctgaccattctcactcaccagccggcctggaaggaagtcccatctagacacgtgcccagggactttgttttggagatgcccctacaaccctttttttttttaagcattgaatttccttcctaactgcaaacgctcccggtggtgtaaaatgggttgatgttcttcacactcacaccgtcctgcatgtctttacagtggtctcataaggttttatttaaagcaatggtcagccaattttttcttaaatggtcagatagtatattctgctttgtggtctctgttgaaactacccaacactgccattgtagcagaaaagccaccagaggcaatatatcgatgaatgcactggctgtgttccaataaaactttatttacaaaaatagatggcgggccagatttgggcctatggactatagtttgccaacccctggcctagatcatcattttcaaaactatagttgaaggtcaccgttatttgctgccccacaaaaacaggattctgccgtcagatgagttcagggaacactgggtacaacaaaggttgatgggttttcccagactgtttaatatgttaatctcacattgtgagtccccatgatgggagttactgtgcacatgttcctaacgcatttgactgtgagccctgatttccgagaggacctgggaacttttttttctccctacacacccctgttcatgtctctcttgaaacacagtttaggaaagttcactaaaagaatctaggtggtcacacccaggtgccctctgtggatcctgttggaggggaggacaggggccgtggcctgctccagggtcatgcacatcaacaatccagtggcttctccacaaagagaaagccgaggccctgggtcctccagggagccgggagcaccaaggacaaagccacgtgtccctccccgccaggctctcacagcagcttgctcgggaagaccccttgttcccagggcaagggccaagcggtgtggaggctgggtcccacagatgccactggggaagggctggctcacctgccctccgcccctaccgacagggtcgccggaaaggacacgtgcatccaagcggctcccatatccgtggcaatggatggccgtgccctgtggatatggagctgtcttagtctgttttgtgctgctctaacagaaaaccgcaggctgggtaacttacaatgagcagaaatgtatgaatcccactgatctagagggtgggaagtccaagatggacagatggccccatctgtgagggcttcttgcttcatcatcccatggaaggaggcactacgtggcaagagagagagcaagaggcccactctctcaatagtggcacgaatgcgtgtatgggggcacagcccttgtgacccagtcacttcctattaagtcccccaaaactgttgcattgggaattaaatttctaacacatgagctttaggggacacattcaacccacagctgtggcaaaggcattcataccatccccgtgggaggctctcccaccactacccctgctccagggagcacagcctccccgctttactgagtgcagaagcctcaggcttatggagggattgacaggtggaaaggtctgtcctctacatcaagaggccacattgagacctggggcaacagacgggcagtggctgaggccacatggagagggacgtgcctgggggagattgggcactttctggtggcaccaaggctgcccctccaccctcacagtcctcctagccctcatgcccaagcctttggacactttgaccattgcatggttgccgtccctggcctggcctggagaagtcttgccagcctggcgaggcttccaagcagatctgtgccacagcaacaaccgtcacgatggtggcatggatggagggccctgggcatggcagcgtgggcttggggaacctcatgacagccctcaggtgctgttattacctgccgttgtgtagacaggaaaagctcagagagttcaggaatgtcccaaggtctcggcacctggaggtggcaagccaagaggtccatttggttttgctctaaggtccactttcttttcttttcttttctttttttttttttttttttttttttgagatagagtctcactctgtcacccagactgaagtgcagtggcacaatctcggctcactgcaacctccgcctcacaggttcaagtgattccctcacctcaacctcctgagtagctggcactacaggcgcccaccaccatgcccggctaatttttgtattttcagtagagacggggtttcaccatgttggtcaggctggtctcgaactcctgacctcaagcaatccaccagcctcggcttccccaagtgctgggattagaagcgtgagccaccgcgcccagccttaaagtccactttcttaagtttctggacagaactctagaaaaatatgtccttctcctgcgtcactgggacagttctgagatctgggtcgtggcacccaagtgacattcactgtgagaagtgggggctccataaacttggggcagctcagctgaatccaccctctctccggtcaactcacaactcacacatgcattctggcctctggcctgtgccaggcacacagctaggagctgggccttgcggaccacagggagcatccctgcccacagcgggctcacagtccgagaggacactggtatgtgaactgaggcagcgggaagagctcctggccaaggtctttgtgttcagaccagaagaggaaggagggctccctccccctggggctgtggaggctgaggctcctggggggttgtccacatctggaccgtgggagctgttggggggaatgggggcaggtggagaagaggaggagctttctggaaggaagccctgtgaatgaggggaacccagggaggaaggggctcagatgaagcaggtctgggggagaggaaggaagacaggtgagggggctgatgggagccatgatgaggtcccaggggtagtgtgccccactttgggcatggaagacatcatggagacctcagagacacacagccctcttcccatgagccaggtggcagacaggacacccgcacatggaggaaccactaacaagtgccaagccctcccacgtttggggacagccgtgtcagagactgataatactgctcattctcggtggcaccaaaggtccctgggcacctggccccgaggctggctgtgcccagcactgtgcaaaatccctcctgtgctggtcttcctggatgggctgccggtcggagggaacttggcatttgactctggctttggagggtttggttatctcctccccaaccaagatctcctccaacccgtgcccatcacaagcccatccttagagggttcagagtcatatggtgtgaaacaccctgtcctgactgtgtgacctcgagaaggtcacatgacctcgctgggcctcagtttcctcatctgtaaatgggataataatagaaaataccctaaaaggttgttgagaaaatggaacgactgcagagcttagtaaagtgccaccacacatacgtggtttttgataactcggtgccaggggcactggggagccatgggaagcgtcagatcagaaaagcagggcctgagggcccccgcccctcctcccacatctgctgggcaccgtgttgcgagaggacaagtttgaggggtatctcttggaatcatcccctttccctggcaccaaccagctgcagccccaagataggaagtttggttgtcattccaatatggctggaaccccagaaactttttcctggcaatcatggctgcctccgaagggcctgcagcaacgttctctgaattgctaagcaacagtgtccgttctctcacatggagaaaattgaaacattgattcatctatttgttttgcaactagcactagcggcttcattactctgttccctggggacaccctcccacacactcgaattgaaaattaactctttttacctaggaacagccacaatgggtttttaatttggagaaagtacagaaacaatggtggggctgggtgccagaaatcaggaggcaaagctgacctgtgacccaggggccctagacaagagcaccctccctccactgggccgtggacaagctctttggaggtgggaccggccaagagtgggccttgcggtccttgaggccattaggggcaagtgttcacacctgccacgtgtggcctaggtttctgctcctcaccggagcttttgcggttctggcactgggaggctgctagcatcctcttgctgggaattttctggaatggaaggagcactgtttctggagttcaaacagctcagttctagtttctaactctgtactgaggggctttgagctcctcctttaagccatgtctcagtctcctcatcagtcaccagagggcaggaatgtgtctgtgttccttgcatggctgttgtagggtttacacaaagctgcacagcccacaaggatggtgtgatgatattcgtgtgccggcgaagctctctccgtcttcttgtctctctgctcttgttggctttctggggatacgttcccctggaggacagaaggcagcatttgttgcttccgtaactttcacatcacgcgtaggccagcagcaggaggagctggctctgatccctgagctggagtctgtgctccaggaggctgtccccagcaacggcagggtcctctttagctaggaaacagcaacagccataaatgatagcccacgtggcggttgctcagagaaaggagctctctcctgtcagtttgcagagagctctctgtccttctgataatgcaatgcgttactgacctgatttcctaaatcctctccttcccccactcctgagggcctcagtgccctgattcacccaccccctaccctgcatccttgggtgtgtccatgaacgagtctccagcaggaagatctgcctgggctctggattctctggggttgggttcagctgtgagtggcagaaaatctaagccaacagaggctcaatggataaaggttctcttttctctgtaaacagacacagtcaagggctagtgtggtgactgcacaatttccaagggacccaggctccttctagcttgttgctgtaacatccactccagcagcttctggtccagtgtggctgctctaactccagccatcgtgtcttcatcccagccactacaaaggagagaggcacagcccctccttttaagaacacttcctggaactcacacatactactttcgctcacaaaccactggccaagcagagtcacatggctagctgcagagggagctgggaagtgtcacacagctgtccaggcagctgtgcacccaggagactggggactgaggaaccagaaggaaatgggccctgggcacaatagcagcctctcggtgggtttcatggctgtaacccagaccttaccctggcccgtcctctctcagcacagtatcacctgtctgtctgcccctagctgctgggtgtaaaagagccctcttctccaagtgtggtctccttggcctggagtgcacacgctccagaaccttccagtggccatcagctaagaaggaccagaaggtgaggctgaggactgggcacatcccagtggtgaggcagcgccctgtctttatcagcagggagcagggggcgttagcagggggcctaaaggggatcccttccccaacctgcccatcatcctggggaagagaagactcagttccacattgcatgggggtgtgtggaaggagggaggagccaagcagaggcccaggtgtgtggaaggggtgcagagactgaaccaggcctgtcctgggaagccgagaagatcagccccctacacgatgggaagtaaggcagcctgaggatgccggacacactgtgggctgcagggtactctgagctctaggaagcagagctggggccagcaggtgggggctgcaggattttggctcaatgaaaggaaggtgtgactaactgctggggctgtcctctggtggaccgggctgcaccagaagagagctagatgtgagcaggcagaggctggccctgcatggaacgaggtgtggggtaggacccagcagtcttcccctgtgtggaacctgctctgagcatttctgccaggacaaaagccacatcccagagcttatccctgacactctctgccgcctctggggggcagtgaccagactctgagggtcgtctggaggctctgtcccgtcccaagtccactctgatccacaaggtctgccctggtgcccagacctgcacaggtgcacaggaagacacaggggggttcaactccacacggtgagtgggtgtccagccacttagaaggtgccgtctcccgggaggtagacccagatcactgtcctcaccctagggatcaatagtctgaggttggccacgtgagagtggcatcagatctgggctctgggaagctcccctgggaccctgagctctgacgggtgctcttgcatccccaaagatgagctgggatggagaatggggcgtccatggcattctgctcagagagggggtgtcacggacattctgataaacccttagggtggggactctgctagaggaatcatataacactttctttctttgtgccacaattctgtattgttaaagaaaaactttattcatgatgcttgttaaagatgataaggcagacgttattccaggggcgccatgactgtaggttcagggaccaccatggggtcttacagtaggggagagagatcaggctgaactctgactccagcaaggagaagtggggatttatcagcaaggagcagggggcatcaggggacggaagctgactgagaggatggccaagggtcgggggcttccggctgaactgtctcgctcggattaggcctgcaggcaggccaggaggagatgatgtggagggtggtcagatactaaggtgggggtttctgctaagctgacggcaggattgtggctcacactggattctcccacgacagagagggaagcccgagtttgggccgagtcaagcagaggactcagtagaccctaactaaagttttagtcaaaggaaggaatctttgtcagaattaagtacccgctctggggtagacaccactggatgctgggtatgcagcagagaacagaagaacaggggttctgcccccatggggtttatatttcatgtaagcagataaataactggagagaggtgcacagcccctcatctgaaacccctaaggccaggtgtacttagctagaccagaggtcctcacatggggcaatctggcagtgtctggagatgctatcggttgtcacagctgagggtggggctgctagtggcatctggtgggtggaggccggggacactgtaaacatcctgcaatgcaccggacagcccccacggtggagttatccggcctacgacgccagtactcgtgccgaggcttagaaacgtggcttgagacttcagactttgcattttagaaacagaatatggtacatagaccatatattatgtaatgtccccggcgggatgtggagtagcaccccataatcagatgcattaatatttctgcagcaaaatttatgaatattcacacaaagagggatgaactgagactataagtagcctcacatcagttcaggtcacgttttgccaccaaatgagttatgaacaagctgtggcttttagagctttatggattttggaattggattgtgggcctgtaatataatttaagatagtgataaatgcagtaacgacagccaggcagagtaaaggaaggggtacgggagggttgcggatagagtagccaagaagaggcctctgcggaggggcacctggcagagccctgagagcggtgggatgggctgggagcagatctagggaatggcagtcctaacagagggaagagtatgtgcaaaggccctggggtggacataagcttgaagtctctgaaaaacagccaggagcccagcctactccagtgggttcccataggagtgacgaggctacagaggtgaccaggaccagatgggtccagcccatgggcattgtaaggacttggggtttcaccgtgagtgtggaggggagccagtgaaagaacgtgaacatgggatcacgctggctactggtgcagagggcaagggcaggaggctgcaggaggacaatgggccatgggaggacaagaataggtagcctcaaggggcaggaggggaatggccaggatgcggggtgcccagttcatacatcctagaggggggctctcttgtggacagacaggccagagacacggctcatctgtccctcatccacctccagcttcctgctgcggggccttagtagactcagcccccacctcccctgcctcccacctcccctctcgatgcggctttcattatgtaaacctgtctggttcccagctgggctgagccttcctctctgtgtcccccaggaccctgggtccagctcctcacatgcactcacagggcagggacaagtttgcggtagaaatccccaagattgtgggaaaaggctggggtagccagggcagttcccaaacagacaaggtggtgagaacaagctggaatgagaaccagaggagcctggaggaggaggaaggcgcccactcccagccaggctccactcccagccaggcacctggctgcatccatccctcagggccccgggcaccctccagtgtgggcggcccctccctgcagctgcatctcagggcccagcggtggggatccgcacttgagtttaagcctcgagggctggctgtggacgcactctgaagacgaaagtccagaaattagggaaatgtccttggctcaaatgtcggagtcctccccgttatcgcagaaggcgccttatctgcgctccccagaggcccgagataaagcccatgctgcaagccaagggcactcttcagcctccagcctggagttctaaaccctgcagccacaccgaacctcctggcagcttccaaacaatactgacacctaggcgtgacttgggcgcccaggccaggctgtgaagccctgctccagggcccaggcctaactggcaccaccccgtccccatgggcctgcagcctccctcctgccccagcactcctctgccctcagctcaccagctgggcaacaatacctggaaagggtagaagcatacccccgcctgggcacaccagccgacacggtctcctcctggtcccactgggtcctcaccacatcagggatcaggggtgggggactgtcgacagccctgagatgtgaccaggaagataggaggggctcagaggggccccatgctgtgcaggggtcatgtggctcccacggtggctgcggtggaactgaggtgccccttgctgtggggcgggcagagaagcacaatagcagtgtggatggggacgtccccaccttgtggctaggggaggggttgtgccactcaagaggggttggtggactcaaagtagcccagatacaccagggcaggggtctgtgatgtccccaaccacccccgcccccatgaccacctgcacccaccaccagctcccccagaaggggaggggtttcaatgcctagaattgttcctattccccagtcattctatctgtctgtctgcacgccttcccttccccactcccatcccagaccaggtgagagggaagaggcctctgtggcaggaggtggggggcccacacagccgccacgaagaattcatagcctattggagttgagcccatccacccgccgcccctgcaggcggccctgctgtgcctggcagagccctggccagacagatacccccaccctagacccccaccctttccccacttctggaaagggtgaatctttccttcctaaagggctttgctcacagatccatctaaacccaattaccgggagtgtggggcctgcgtctgcggtgagtcggcagcacgccctccactctaaccgcccgtgatttcagcgctgaatatctttcagagttatttaagaggttcttcccttttttcccattttgatgatatgtttctaaattatacattaaacttatcagggtgagtaatacctcgcagcttccccatgtcaggcctaatgttacttactcgtctgctgccttgtgtttacatggttgagggggatatgctcctttcagatccatttatcttcatctgaagtgtttagagatgagaacctcagatgggttgcagacacctgggctcccccgagcgcccagcttctgcaggaacctctcctcctgcaaccagggtctgcagtgtcatgtctcaggctggcaggaacctggaggcaccccttccccatgggagggtcatggggaacagagaagcccccagagagagcagacctgagaggtcaggctcagagatgaaatggcttttcctggaaggaaacgtaaagcaccgggtacctccccagaacccgcctccctcggcccagatggcagctgtagcttctgggagaacaggtccttgatcccctatcggtgcctggccctggccattcattcctcgttcaagtgcgtgtggcagcctccaccgtgcaggtgggcactgggctggcctggcagtggcccagggtgctgttctgggtcactggggctatgggactagaccccagggctgggatcccacagaaagtcacaggccctgcccattggcaaggtctctctctgcctctcagccaggaaaatccctaccccaggacaagctcctgtggccagacaacccccgccccagttctcactgcctctgacacccacgctggtgtggccctgctggggaccccgggtctgtcaggtctggtgagaggtggctctgcagtctggagccctttgctctgccacacacagtcgggatggtccgggcgggggatggccccaggggctcaggaggccctgggcttcgtaatcacactacactaacgcctctgcaagcatcgttttatcaaaaccctcaccattgccatcaccacctccatttgacagctgagctgaagagcttggtgtgcccaaggccacgaagtggagcccaggtcttgcagactccagaccttggactctcgggtcccatgcagctccaggccagggcgatctgagcagccccagccacagtggcccatgttgttccctcccttgcagggcaaccccagggccacgactgggctcctggcagcacggccagatggacctctgctctctgccagtgaggtacctgcccctggagcgggaccaacagctccaggcaggagattcacccaaagggaagtgacggggcaatttatcatatcaataaacttgcttagagtgcactctgtcttctgtaatgaaatggggatgcagtcccaccatgttattgggcaccagggcaaccccgcatcaggtgcttattattttctgccacgatcagggaagactgatcgtgcttggataagtgcagcttaaaattgaaaaccaagcaatttaccttcaatcgcttctcagaattttgcgcagccagaaaaccgactccctttccattttaactgcttccattagcattcgtttcctccgtgagaagagggcttagctgggaagggaattgtagtgccatcacatttcccccttctggagaaagacgcttgccccaggctcctctttcttgagggccgacagggtcagggtgttgtggtccctccccttcctcctggcagagccaggcctttactgggcactgggctgggcattgtgcctgtcctcaggtctaccaaggagagggtgcccaagtaggggtgggtgttgccctcttcctgggggctctacacaccccggccgctgtggcagggttccccacatgtcccctgcatttgttcaggtgttgaggagcagatgtcctcaagtcaattttcctgtgacattttcgtgtcatttccaagtgaaggaggacagcttgactgtgggatgcttggggacccaggggaggcaaatcctcttggtgagagcagtcagcgcttgtggcttgacggcttgacgcatggtgtccgtcattctgtgcaggcctgcagttctgaccagcagtggttgtctccgctggctccagatatccttccctcgacctctgtcgctcagcatctgcggggtaaatcctgcaaggtttgctccacgttctaggaaagaaattctctactctagtgatattgacagggaggctggatgaggcctctggacagacccccaaagcccttgcctcgatgttccttttatcccaggaataataagaggagggttttctcagatgcaaatcatcctccacttgtaaatttcacagttacctcccgaggcccctccatcaatgctgccaagataaactgttgtgatagcctcaaaccccggctgcccttctggctgtgtggcttcagccctggcctcctcttgtttgatcagcctccctcttgctggctgcacaaggcggggttgtgtgcagatgggattttaaagccctttgcacaccctggcttggtacgatcgcatggagcttgcccctgaaagaagaacttgagggccaggccctgagtttggatccttttcctggaagtctccgccctgaacttcaacattgcctatttgcccgtacagggtgtcccagggctagcatctccctaaggcaggggtgaggacataagcccccaacacggccctcacaatcaaggcagctctaggaggattcatgcacagctccgagtcatcaaggccctgctgctgctatgagtccctggccagggctgatcctgagcctcttacgtggaagcagtgagataaagggaaggaaaatttcaggcagatagagcagcacattccacagggtcagagcaggtgtgggccctggtgggggcagtttggatgagtactgggaccctgtactcatctacccaccacaatataaccaggccccgctggctcttcaggattaagggccagggaacctgcagtggccccttgggctggcatctctgatttgagacagtctggctttgctgcctgcaccttggagggtggttcatgagggctacagctggaggtgcccccacccactagcatacttggggtgggcggttggctgacagccagccagcattccaactccctcccctccaccagacagcgctaattttggggagaaccttagaggtgtcccaaagcacagccctggtcactttatggtcctgctttcaaaaggaccggcacctttgcccaccctcagagagactgggcagtgggtgtcagactctggcagcatcagagaagagcccagagagagaggggagtttccccagagctgacggcagggcttttccaggaggccgtctgagaatcaggatcaccagacaaaacctctctaattatttttaagtatatttttactttcacatttgctcttgtttttatcgtcatatatactgtacctacagaaaagtgcacggaacagataggactggtgattccgtgattatcaagtgtgtgaccacaacccaggaccagaaactgacactgggttctctgcggtctgccatttcccccataatgggaagagtaacctgggactagaccctcactccgaaactgaagtatttctgtgcagttcccgggcgctgcagcaaaccctaacccaccattgattcttgttccttcctggtctctgagaaaggaccgatccaaagatgacaggattcaaaagagattaatttgttattttagacctttagaaagtgcagttgcacaaaatcggaggccctgggtcataacgaagttcagatcaattaaaacaatttactttgctgctaatgatttcagaccattgtaatttattggtaagtaaatgacttcaaaagcccattcctttgtggttgcacagagggaattttaacaagttcttggataaattaagtctggaatttgttaacagactgttactgtaaaacattgaaactaggcctttgcacactgctccaaggcctcaaagtttccaggaataattaaaacttctaatcagttcttcattgtttaagcaaatcaaatggcaagaaagggcttgtgataacaagagggaaaccctcccatttggagggtcagtggccactagaatccctcccgtgactcctgttctcagggtgaaatccaagttaccactctggccagaatgcgccctgcactgtttggttcccacctgccccgcgggtctcagtttggatctctctgcccatggtccaccgtgctcaggccacgctggctcctttccttcctgcaaacaagccaagctcacagcttttccctggcagctccctctgcccgccacgcctccctagacttgtgtggctgcctggatttcacagtttgtttgtttatttatgtatttatttattattttgagatggagtttcgctcttgtcacccaggctagagtgcaatggcgggatctcagctcactgcaacctccgccttgtgggttcaagtgattctcctgcctcagcctcctaagtagctgggattacaggtgcatgccaccatacctagctaatttttatatttttagtagagatggggtttcatcatgttggccaggctggtctcgaactcctgacctcagatgatctgcccgcctcaacctcccaaagtgctaggattacaggcatgagccaccgcacccagccacttttcacagtttagatctcagctcagtggccctctttgaaggccccttccccaaccacgcccatcactgtccttgccatcactgtccttcccctttgtgctagctcaccggactggcagcagacagcatctggtcacatctctctcgccagtgcgcctcccctgcggcacattcggtaggctgggggtctgttggatcctggcaccttgcagtagtgttgcccgcttcctaacaggaacaggacagatattcatggagtgattgaattggtgatgattccaagcatgagacataggtagggtcctattggaatgggccagcaccctctgggggtcctctgatgaccagggcagggactcttagggacacagggccgtgggaaagacctgctgtcctgcaagccacctaccagtgcggaatgagtggggagtgtccaggcgttgctgcatgagttgcctctgggaggctttgggtcaggtcggaagcttgtctgtgccctgaacataggacacacagtgtcctcatggagtcaaccagcatctcctgcatcctctaccttggaaaatgaggattctccgagagctcctccccaccctcacacacctcagcctctataacagtaacaacagtaatagctatggccatgtgttaaacattagggcgggatcaggcatcatgacctcatgaaatgcaatattgcattaaacctcagcagggccgagaggcagaactgctgttccaaggaggaaactgatgctcagaggcttattaaggaatgtgtccaagtcccacagcatctagatggtgggattgggcttcaggtgcctacatcccaaaagccattatgccatcctgccatctgagcctgttaaagctccttcatgccactccactctggggcagtgatttctcatccaggcctgaaagcagccagagatggctcggtaaaggtccgggttttgccagtcaagacattccagggggagaaacagcatatcttgcacagtgaatcacctgggacaggtcctaggtctcacttatgcattcctcaagatttattggagagtgtgtgccaggcatgattctgggtcttgggcatttggagtcctggagtctctgctctcatagagttggtgacccagtgggaagaagtagatgataagcaaataaacaagaaaatgctatctagatgcgtatctagatacacataaggcctgtgggctttcctgatcaagggtcgaggaaggactctggccaggtgaggtggctcatgcctataatcctagcacttttttttttttttttttgagacagagtcccactctgtcacccaggctggagtgcagtggcgtgatcttggctcactacaacctctgcctccagggttcaagcgattctcctgcctcagcctcctgagtagctgggactacgagcatgcactatcacgcctggctaactgttgtatttttagtaaagacaggggtttcaccatgttggccaggctagtctcgaactcctgacctccagtgatccacccgccttggcctcccaaactgttgagattacaggcgtgaaccactgtacctggcccctaacactaggaggccaaggcaggtggatcacctgtggtcaggagttcgagagcagcctggccaacatggtgaaaccccgtctctactaaaaatgcaaaaattaacctggcatggtggcatgtgcctgtaatctcagctactcaggaggctgaggcaggagaattgcttgaacctgggaggtggaggttgcagtgagccaagatcgtaccactacactccagcctgggcaacagagtgagattctgttaaaacaaaaaagagaaagagagagggagggagggagggacagagagagagagagaggaaagaagaaagaaagaaagagagaaagaaagaaagaaagaaagaaggaaggaaggaaagaaggaaggagaaaggaaagaaagaaaagacaagaaaggagggaggggaaggaaggaaggaaggaaggaaggaaggaaggaaggaagaaagaaaagaaggactgtcagaggaggtggtatttgagctgcggcacagaagcagccttttaaggacctaggggaagaatgttccagacagggggaccagccggggtaaaggcaccaaggctgggaggaaggaaaaagaaaggaaacaggggcagagctggtgagcaaagggacccgcaagccctgggcacagggcagagtgtgtgggttttattcaaatcgcaggggatgccttggggcatttcaagcagggcagtgacatgatctgattgatgtgttttaaaagctccctctggctgctttgggcaacatggttgtttgcaaagtctgggctggcggcctgcagagctactggaaggccctctcagggtccagacaagagagggtggtgactgcaccagggcagagcagggtggggagaggaggacagaggtctgggacctattttgaggcaaggttgacaaatatgctgatggtttggatgtgaagttaagacgaagagaggacttcagagcaacacatggattcagagcttgaagagctgcatggaaggttcttgtcctcagaaagggaggcccagcggggaacaggcgggatgaagagctcccctcgggtcatattgcagtcgaggtgcttgtcggagatctgggtagacagatccagcaggcagtgagcactatgggttcggaattggtgaagttggaatgtgattcaggaatgaaggagtcaagggtcaggcgatgggggatcacccaataaaagaggagaggcctaagactgagctgggataccccaacatcttaggtcatgagacaggaagcggagggtgcttggatggagctgatgatggggactccataaactaagaagaggggtctttcaggataggggtcctgggtggatctctaaacaaaggggtgcggtgcgcacttcgaggcagccctggatcatcatattgatccaaaagagcgcctgtgtctcagatcaaatgtgatcagctttcagattatctgaagcaagttggcaaactcagagccaacaaagtctgcatttgagtaattttcatcgtatttttggcagctgcagagactccgaggcaaggcagagagccctttaatggagcattgagaagcagtttttaaaaataccttttagaaagctatttcagttctcccgtctgtagcaaaattaatgtataaacttagtgccttaatttggttcttctttaaacgaagaaggtgggaagctgtttcctcccgcggctctgctgaatctggaggctgattctgcttcagcaccacggagcccggacaccgccggggatgccctgcacaggccaggcacagctccagaccctggaggctgagaagccactggatcttcacaacaaccctctgaggtgacaccagtgagattgcccccattttagagatggggaaactgaggcccaggctggttaataagaagctacatggagttagccttgtttcagagatgaggaaatgcaaaaggcttgcctgaggttacagagctcaagagatctgagtgttgaggtctgactgttgtgttttcatggccctggcggaaccccccaccccacctgggcatcacagttacttgtggccactttccacaaccacacctcccaatctagccaaaaggatgacatcccaaggaacgtgcagcctcccaagcttccaggatgagattaggggcctgacacttgaccagcctcagcctctgcctcctcttggcttcctggggaccccggcttcagcaacagcaagctgggcaatttagcttcactgtccccatccgtcttgctccctctgtccttgaagatgggtggaaagtcagggaggggccgctgcaataagtgacaaggcttggctgcctgcagatgagggtgggaggaagcagagccgagtggctggtgcaagtggggcatcagtgcccaggagccagcttcaggggaagcaggaggctctctgaggtgacaaagctggggcctgtctgccccacccactgcaatccagcatgctggctgggtgacccaggcctggatagaaatggagagggcagctccatgccaggtgcagctggatcttgggaacaagggatcagctcagaagatatagtttgactcaggcttcttggccccgaatctgcccagcatttctcccacccccatgcctgctcctactcttctgtgtgtcctgtgctggccgcaggtgcccacttccctgtccaaggggccgtgaagcactccccatggccactcacagccctgtgctgtggccttccctccactcagggccatgcacaaggcctgctcccacccaggctgacaggtgcctgctcctcagatgaacgatgggtgccaggcttctcagggtcactcgctccctggactggtttgctctgacttccattttcctctgtggttgaattggccatcacccgctggggacagccaaatccgtcaagccccacggcacttgcttttattggttctcctagctttattgcctttcctggagcagtgaggggcagtgagccactgcacaatcactcaacttgacatggctttgtagatttcatccccccacccccacccatgtctctatctgcaggagagagtgacaagatgacagacatgcagtaactcctagcatgagcagaactgatgcccttgagacaggcggagccccctggcagcccaggagactgaggactggtccagggtaccagtgtctccacctgtaatccccttgtggccccaggccttggacattgttggcatcttcatcctttctattgccccttgctgacgtccaccaacctgctctccccaggcacccagcaaacacgagcccacttacccagtggacacgagcccactgagtaggcaagggtcttggacaaagctgggtgcaagtcttgaccctaccagctactagctgcacatgaccttgggcaaggtgcttgacctctttgagttttcatttcccctgcttccaaatgggagcaatgcctcctagaactggtgcgaggacaagatgagctgacgcctgtgatgttcactcagtgttttgcacagagtgaagccttgataagtagcgggagcactgcgagtttttcttcttattgactggctgattgattgttgactctggccccgaggcctccacaggaaggaaaagagagcttggccctgaacttcgcaacccctgagtattccatagggttgctgcagcagaagatgtgtttcctgggtgggaactgtattagtcagggttctccatgtaacagaactaataggatgtgtatatatatggagagagagagagagaggagcatgattgtggggctccaaattctacagagtaggtcaacgggctggagaccaggaaagaaatgatgttgtaggtcgagtctgaaagccatctgctggtggaattgcttctttcttggggacctcagtcttttttgcataagaccttcaatgattgattgaggcccactgacattatggagggtcatctgcttacccaaagtctagtgatttaaatatattttttaaatttttttaaattttactttaagtgttgggatacatgtgcagaatgtgcaggtttgttacacaggtatacatatgccgtggtggtttgctgcgactatcaacccgtcatctactttttttttttttatactttaagttttagggtacatgtgcacaatgtgcaggtttgttacatatgtatacatgtgccatgttggtgtgctgcacccattaactcttcatttaacattaggtatatctcctaatgctatccctcccccctcccccaaccccacaacaggccccggtgtgtgatgttccccttcctgtgtccatgtgttctcattgttcaattcccacctatgagtgagaacatgtggtgtttggttttttatccttgtgatagtttgctgagaataatggtttccagcttcatccgtgttcctacaaaggacacgaactcatcattttttatggctgcatagtattccatggtgtatatgtgccacattttcttaatccagtctatcatttttggacatttgggttggttccaagtctttcctattgtgaatagtgccacaataaacatatgtgtgcatgtgtctttatagcagtatgttttataatcctttgggtatatacccagtaatgggatggttgggtcaaatggtatttctagttctagatccctgaggaatcgccacactgacttctacaatggttgaactagtttacagtcccaccaacagtgtaaaagtgttcctatttctccacatcctctccagcacctgttgtttcctgactttttaatgatcgccattctaactggtgtgagatggtatctcattgtggttttgatttgcttccttctctgatggccagtgatgatgagcatttttttcatgtgtcttttggctgcataaatgtcttcttttgagaagtgtctgttcatgtcctttgcccactttttgatggggttgtttgtttttttcttgtaaatttgtttcagttcattgtagattctggatattagccctttgtcagatgagtagattgcaaaaattttctcccattctgtaggttgcctgttcactctgatggtagtttctttcgctgtgcagaagctctttagtttaatgagatcccatttgtcaattttggcttttgttgccattgcttttggtgttttagacatgaagtccttgcccatgcctatgtcctgaatggtattgcctaggttttcttctagggcttttatggtttttggtctaacatttaaatctttaatccatcctgaattaatttttgtgtaaggtgtaaggaggggatccagtttcagctttctacatatggctagccagttttcccagcaccatttattaaatagggaatcctttccccatttcttgtttttgtcaggtttgtcaaaggtcagataggtgtagacatgcagcattatttctgagggctctgttctgttccattggtcgacatctctgttttggtaccagtaccatgctgttttggttactgtagccttgtagtatagtttaaagtcaggtagcgtgatgcctccagctatgttcttttggcttaggattgatttggcgatgcgggctcttttcttgttccatatgaacttcaaagtagtgttttccaattctgtgaagaaagtcattggtagcttgatggggatggcattgaatctataaattaccttggggagtatggccattttcatgatattgattcttcctacccatgagcatggaatgttcttccatttgtttgtaccctcttttatttcattgagcagtggtttgtagttctccttgaaaaggtccttcatgtcccttgtaagttggattcctaggtattttattctctttgaagcagttgtgaataggagttcattcatgatttagctctctgtttgtctgttattggtgtataagaatgcttgtgatttttgcacattgattttgtatcctgagactttgctgaagttgcctatcagcttaaggagattttgggctgagacaatggggttttctagatatacaatcatgtcatctgcaaacagggacgatttgacttcctcttttcctaattgaataccctttatttccttctcctgcctgattgccctggccagaacttccaacgctgtgttgaataggagtggtgagagagtgcatccctgtcttgtgccagttctcaaagggaatgcttccagtttttgcccattcagtatgttattggctgtgggtttgtcatagatagctcttatgattttgagatacgtcccatcaatacctaatttattgagagttttcagcatgaagggttgttgaattttgtcaaaggccttttctgcatctattgagataatcatgtggtttttgtcgttggttctgtttatgtgctggattatgtttgttgatttgcgtatgttgaaccagccttgcatcccagggatgaagcccagttgatcatggtggataagcttttgatgtgctgctggattcagtttgccagtattttattgaggatttttgcatcgaggttcatcagggacattggtctaaaattctctttttttgttgtgtctctgccaggctttggtatcaggataacgctggcctcataaaatgagttagggaggattccctctttttctttttctttttttttttttaattgatcattcttgggtgtttctcgcagagggggatttggcagggtcacaggacaatagtggagggaaggtcagcagataagtgaacaaaggtctctggttttcctaggcagaggaccctgcggccttccaaagtgtttgtgtccctgggtacttgagattagggagtggtgatgactcttaacaagcatgctgccttcaagcatctgtttaacaaagcacatcttgcaccacccttaatccattcaaccctgagtggacacagcacatgtttcagagagcacagggttgggggtaaggtcacagatcaacaggatcccaaggcagaagaatttttcttaatacagaacaaaatgaaaagtctcccatgtctacctctttctacacagacatggcaaccattagatttctcagtcttttccccacctttcccccctttctattccacaaaaccaccattgtcatcatggcccgttctcaatgagctgttgagtacacctcccagatggggtggtggctgggcagaggggctcctcacttcccggtaggggcggccgggcagaggtgcccctcacctcccggaaggggcggctggccgggccgggggctgacccccccacctccctcccggacggggcggctggccgggcagggggctgacccccacctccctcccggacggggtggctgctgggcggagacgctcctcacttcccagacggggtggctgccgggcggaggggctcctcacttctcagacggggcggttgccaggcagagggtctcctcacttctcagacggtgcggccgggcagagacgctcctcacatcccagacggggcggcagggcagaggcgctccccacatctcagacgatgggcggcctggcagagacgctcctcacttcctagatgggatggcggccgggcagagacgctcctcactttccagactgggcagccaggcagagaggctcctcacatcccagacgatgggcggccaggcagagatgctcctcacttcccagacagggtggcggccgggcagaggctgcaatctcggcactttgggaggccaaggcaggcagctgggaggtggaggttgtagcgagccgagatcacgccactgcactccagcctgggcaccattgagcactgagtgaacgcgactccgtctgcaatcccggcacctcgggaggccgaggctggcggatccctcgcggttaggagctggagaccagcctggccaacacagcgaaaccccgtctccaccaaaaaaatacgaaaaccagtcaggcatggcggcgcgcgcctgcaatcgcaggcactcggcaggctgaggcaggagaatcaggcagggaggttgcagtgagctgagatggcagcagtacagtccagctttggctcggcatcaggaggagaccgtggaaagagagggagagggagaccgtggggagagggagactgtggggagagggagaccgtggggagagggagagggagagggagagggagaggagggagaggagggagagggagaggagggagagggagaggaggagcctttccaattttctttccttccttccttccttccttccttccttccttccttccttccttccttccttccttccttcctccctccctccctccctcctcccttcccttcccctcccctcgattccctctttttctattgattggagtagtttcagaaggaatggtaccagctcctccttgtacctctggtagaattcggctgtgaatccatctggtcctggactttttttggttggtaagctattaattattgcctcaatttcagagcctgttattggtctattcagagattcaacttcttcctggtttagtcttgggagagtgtatgtgtcgaggaatttatccatttcttctagattttctactttatttgcatagaggtctttacagtattctctgatggtagtttgtatttctgtgggattggtggtgatatcccctttatcattttttattgcgtctatttgattcttctctcttttcttctgtattagtcttgctagcggtctatcaattttgttgatcttttcaaaaaaccagctcctggatttattgattttttgaagggttttttgtgtctctatttccttcagttctgctctgatcttaattatttcttgccttctgctagcttttgaatgtgtttgctcttgcttttctagttcttttaattgtgatgttagggtgtcaattttagatctttcctgctttctcttgtgggcatttagtgctataaatttccctctacacactgctttgaatatgtcccagagattctggtatgttgtgtctttgttctcattggtttcaaagagcatctttatttctgccttctttcattatgtacccagtagtcattcaggagcaggttgttcagtttccatgtagttgagtggttttgagtgagtttctgaatcctgagttctagtttgattgcactgtggtctgagttctagtttgattgcactgtggtctgagagacagcttgttataatttctgttcttttacatttgctgaggagtgctttacttccaactatgtggtcaattttggaataggtgtggtgtggtgctgaaaagaatgtatattctgttgatttggggtggagagttctgtagatgtctattaggtctgtttggtgcagagctgagttcagttcctggatatccttgttaactttctgtctcattgatctttctaatgttgacagtggggtgttaaagtctcccattattattgtgtgggagtctaagtctctttgtagatctctaaggacttgctttatgaatctgggtgctcctgtattgggtgcatattatttaggatagttagctcttcttgttgaattgatccctttaccattatgtaatggtcttctttgtctcttttgatctttgttggtttaaagtctgttttatcagagactaggattgcaacccctgcctttttttgttttccatttgcttggtagatcttcctccatccctttcttttgagcctatgtgtgtctctgcacgtgagatgggtttcctgaatacagcacactgatgggtcttgactctttatccaatttgccagtctgtgtcttttaattggaccatttagcccatttacacttaaggttaatattattatgtgtgaatttgatcctgtcattatgatgttagctggtcattttgcttgttagttgatgcagtttcttcctagcctcgatggtctttacaatttggcatgtttttgcagtggctggtaccagttgttcctttccatgtttagtgcttccttcaggagctcttttagggcaggcctggtggtaacaaaatctctcagcgtttgcttgtctgtaaagtattttatttctccttcacttatgaagcttagtttggctggatatgaaattctgggttgaaaattcttttcttcaagaatgttgaatattggcccccactctcttctggcttgtagagtttctgctgagagatccactgttactctgatgggcttccctttgtgggtaacccgacctttctctctggctgcccttaacattttttccttcatttcaagtttgatgaatctgacaattatgtgtgttggagttgctcttctcaaggagtatctttgtggcgttctctgtatttcctgaatttgaatattggcctgccttgctagattggggaagttctcctggataatatcctgcagtgttttccaacttggttccattctccccatcactttcaggtacacaaatcagacgtagagttggtcttttcacatagtcccatgtttcttggaggcttgtttgtttctttttattcttttttctctaaacttcttttctcgcttcatttcattcatttgatcttccatcactgataccctttcttccagttgatcgaatcagctactgaggcttgtgcattcatcacatagttctgaggccgtggttttcagctccatcaggtcctttaaggctttctctgtattggttattctagctagccattcatctaattttttttcaaggtttttaacttctttgccatgggttcgaacttcctcctttagctcagagtagtttgatcgtctgaagacttcttctctcaactcgtcaaagtcattgtctgtccagctttgttccgttgctggtgaggagctggtttcctttggaggaggagaggtgctctgatttttagagtttccagtttttctgctctgttttttacccatctttgtggttttatctacctttggtctttgatcatggtgacgtacagatggggttttggtgtggatgtcgtttctgtttgttagttttccttctaacagtcaggaccctcagctgcaggtctgttggagtttgctggaggtccactccagaccctgtttgcctggatatcagcagtggaggccacagaacagcggatattggtgaacagcaaatgttgctgcctgatcattcctctggaagttttgtctcagaggagtacccggccggctgtgtgaggtgtcagtctacccctactagggggtgcctcccagttaggctactcgggggtcagggacccacttgaggacgcagtctgtccattctccgatctccagctgcatgatgggggaaccactactctcttcaaagctgtcagacagggacatttaagtctgcagaggttattgctttcttttgtttggctatgccctgcccccagaggtggagtctacagaggcaggcaggcctccttgagctgcagtaggctccactgagttcgagcttcccagccgctttatttacctactcaagcctcggcaatggcaggcgcccctccccaagcctcgctgctgccttgcagtttgatctcagactgctgtgctagcaatgagcgaggctctgtgggcgtaggaccctctgagccatgtgtgggatataatctcctggtgtgccgtttgctaagactgttggaaaagtgcagtattagggtgggagtgacctgattttccaggtgccatctgtcacccctttctttgactaggaaagggaattccctgaccctttgtgcttcccaggtgaggtgatgcctcgccctgcttcagctcatgcttggtgtgctgcgcccactgtcctgcacccactttccgacactccctagtgagatgaacccggtacctcagttggaaatgcagaaatcacctgtcttctgcgtcgctcatgcggggagctgtagactggagctgttcctatttggtcatcttggctccaccccccaatttaaatattaatctcatctaaaaaggaccatcactgtgaccgccagaagggctgggttctgtggcctagtcaagctgacacatcacagagagggacaacaaagtgctctcaggtgacactgtcctcccttggatctgtggctccatccctgccctcctgccctcgggggagcttgtagaaggcttcatctcagagcccactgcccctgagtcatgtgatccaatcaaggcccctgagcagagaataaagaggtcactctggcaagtctgggaggagactgaccagtgtagtcggtggaggcattggtcaagcccccagccctggtcctgaagcaaaatcctccccaggtccagactctcagcaccttcttcccaggcaggggctgacagatgcctctgtgggtgcttaggaaacagccagaggatgccagcggtccaaggagtggctggggcagggcctgagacccagcagctgccggccatgatgcaggctgggaagtggttcatttaagatggcacttgttgggcagcaatgtgtgacactccctctagaggctcagatcaattctcgtgcttttatcttttcttgaggctcagcatgatgaaaagtggcctatatctacagctgataaataaccagaaacttgctgtatctgttttcattttattttcttgaacaattaccgccagcatgccttacattcagaggctgagattttaagtggccaaaagaacttcccaactgagcctgccagggactcgtttgaaatgttctttgctgcatcgaaaagcaccagacatgatctgtgaaagagctgggaggaaaatgttgcatgttcacagcacaagcgtgtcctcctctccaggggatgggaacatggaggatggttcccacctccaacctcaaaccctaggagaggcctgtcccactgatgagagaggacagcgccagcccaggagccatccaaaggatcatcagggtgaggaggggtttggagcccctgggatggctggggaggaaatggggagtgtggagctgcaggatccttagatgctgtctacattcctctagttgagcactcaagtcattgtgtgaccctagtcacatgtctgcctcagcaccaggagagttagctccttgaagccaggaactgcttcttttaatactcagagtggtatcagcatttaacaacaggtgctcaatacatgttaaatagaagggaggacggatgcatggatggttggatgggtggatggatggaggagtaggtgggtagatggaaggatggatggatggatggatggatggatggatggatggttagatgggtggttggatggaatgatgagtggatggatggatgggtaggtggatggatggaagataggtggatgggcagctggatggatgggtgaatgggtgggtagctggatggatggatggatggatgggtgtgtggatggttggatggaatggtaggtgggtggatggatggatgggtcaatggatagatggaagataggtggatgggtagatggatggatgggtgaataggtggactggtggatggatggatggatggatggatgtgtagatggaatgataggtgggtggatggatggatgggtggatggatggatggatggatagatggatagatagtcaatagatgagtaagtggaggggttgatggatggaagatgagtggatgggtagtgcatatatggaggggtgggagaatgagtggatagatgtgtggataggtggattctttggaggatgatagataaatatttggatggataggtgggtgggtaggcagatgggtgaatggataggtgagtaggtgggttgacagatggactgttgagtgaatgaatgtgtgaatggaaaagtggcatgaatctttcctcaaatctttgaaagactgtcacatcttaaagagtggagtcgtatcttctgtggatccagaaaacaaaatcatagtagattctatagagaagcagatttggactcaggctaagaaagaactttctactgaccccagttggcttttgttggagtagactgtgtggaaagggagcaagtcatggtccctggaagtgtcaggaaaaggaagctgtcaggtgtagtagaaggtgtccttgtgctagttgcagggagaccccagaggtctttccatctctggcctccatagttcctcctgagcccctgtcctcaactgggtcaaggagccaatttttctggcccctgcaggagacccatgctctgctagtgcagctgctgacccatggcaggggtgcactctcctggcttcagaccttggctctcctgcccgctcctctgactgagctctcagatgctgcccaggtgacctgaggaagctgatctgcagagaggacaggaagcatgtgacagtcaagcaggcccagacctgaccaaggtcatgcaggtggtagatgggagaggcaaggaggtgctgccaggaagcccctacagagacaaattggacagagccagggcagagcctcccaggcctagttcctggggaatgctcagggccagggaaccctcctctggagcaggcacatgtccttagcactcaccttccctactaagagccagggcctgaaaggagacaaaaaaggcctgagaaagaagctggggcccaggactgcataacaccagtgcctgtttcactgtccccagcccagggaaagggattggggctccatgagaggctgatggcagggaaggagccatgcaggagccccatttggcttgtgtctgtccccttggcatctctttctccttagaaaatctgattgcttgtagcttccacactggccatcagtttgatctgagctcaagggtgcagcagaggctcaccttgttctgcttaaataatgcaggtagtgaagttattgacaatctgtcatctgcttgaaagtggcttcgacagagccagaagcgtgggagggccccaggggcctcagccggccacaggtccagtctctggctgaacaggggctcttcaagaagggccaggcccttggcatggtccaagatgaatggatgggagcttgagccctacctggccttttctagaaggacattctatggggaaattctaagcagaagtgagggcaggagctgtctggctaggaggcctgcgttgtggattggaaaggagtctcctgatgcaggctgggccccccgcaggggtgggggcagtgctgagtcacttcctgccagaggacagggtctgaactcccaggacattctggccccttcccactaccggcctagccctgccgcctgtgccttgcctcctggcctcctagccacagacaggggtttatgatgagccggcttgctcatccttgagcctgggttggatttttttttaatgtttaaaaattccccacagcatggcaggtgcccggctgctgggtcaccccatcggctgttctgtcatcagacatcatgtttacccatcagacgctgttttcctgacactcaacactcaaaataatgatctcgctggagcaccttcatgaatgattcatgaggctctgctcaactttgggtgttaacagcaaatcaaagcccctcagtgagggcagcagagcagcagccagaaggcaagccctggccccagcctccaggcccccagggatgctcagggcctgccacccctctctcaggctccagtccagccctgcaggagtgagccagcctcagccaggccatggcacaaaaggggaggggagcagggtcctggctgtcacccatgtcctggtgaccttgctgaggacattggagctccagcctcaagtcagatcccctggaccccagatctcttccacccacaggtggtgtgaccttgagcaggtcactttgcttctctgagcctctctttcctgtctgcaaagccaggtgggaactgccctcccgcagggcacctgtgaacacgtgtgagtgccaggaactgaggttcctggcatccgggtagagtccaaacatggaagctcggattattatgtactgctcttacttcacctctcctggtcttcattctcttatttgtgaaatgagagggtaaactgtggggtctccaagtctctttacctgaaatacagcacctgccgggtctgtccacactgtgtgtgcactcacaggagggagctgtgcagcctgcaaagggggagctgcttctcagggacgtttctctgccagattctgcaacggagaagcatggagggcacagcccagccaggggttgtgcaaaaacacacacacacacgtgctcacatgtgctcacatggcagtggcagcagccaaacatgacctcataaatacatacacagcctgttcagcacatagagacattaaaggcaaggctcagcgagaagagctgggatatctgggtcctgttctgtccctgtgtccccaaaccggtggctccctgagggaaaggccaagtctgctccatcaccaggacctgcctggctcctgcacattgtgcttggcactgaacttgcacttaataaacatgggtcaaatgaagggaattcctagtgttgagcactaggaatgcaatcccaaacaagaccagccacagtcaatcagccccgtgaccctccccccagcctcagtttctcctctgtggcctagcaggttaaatccctaatgccacaaatgttctagcctggttctgccattcaaaagtgactgggggcagactccgtggcccctcctataggcctgtcagcaacagttgcaggggggtgcccatccataaccctgaccccagggaagggagggagtggagccacaagaccagaagtggcctctgcccctccctagaaacaagatgcagccccagctgggaaggcctatggctttttctttcttccctaaatggcctgggagcccctaaggcaaggatgggtccttgccctgatggtgcagccaggcccagcagcagcacagagtggaggtcaaatagcgcctcagagcaccagatgaacctcaagaaagcagcatgaggggcaaaggccagggcttcccagtcctggtaactacgggaggccaggtcccaggcccccaggcagaggggaagctaagtggccaagacgcaggcccaggcctgagacccctagctctgccctttgcaacctgtgcagtcctggacaaatcaccttgcctctcgaagtgtccattttctcctctgtaaagcaggcagagtgaaagtacccacctccgggactgtggagaggaaggcgcggggccatgcagaagagagctgggccatggtgcgggcctagtccatgctctcggtgcagagttggggataagagaccagggcccacagcctggggggctgctgagtctgtgtttatttatcacgttgatattttgttcattgtggatttttttcacaacagttccaactttttagaatattgcactaaacattatctccgttactgagttttctggcacccccttaaattttgtggccaagacaagtgcctcccttgccttccctgcacagcctaggcctctggccaaagggcttggaccaaagtatctgagtccaggaggaggccaggttagaggagcaggatgctgggaacaggtttgagcgaggaccaggaaggagaggattccctctagcccgagggcctgagcctgacccgggtgggtgtgagagagcaggagccaagtggtgcctgatgttggaacatgccacctgggctgctggggggccaagcttgccaacaagagtctgacaagagctgtgtgcagcaggaggctctctccagccttactatcagacccttactgtacctcccaggctcagccggcctttcccacctgcactcgctgccagggtaaggtgggggcagctgctgcttcaggctgcccctcactcccacctctgcccaggggccagtgctgggggaccgcctggagcttctctgtgccttgccaagccccctgtcttgacctgagaggtgctgacctgacccactgaaatgggagagttccctgaccccgtcaagagacttgcaacggggtatggctcattttcttggcagctgccatgcgcccactgggagggggtgcacagagatgggcaggggcaggagcctgggcaagtgcttttgggctctggccccatggtagcatctagaggtgtgttacaattaatgctgttttggcagttgccatccacggacagctaagtgttaaaccagctcagtggagagtcaggatgacagccttttacaccctgccctcttggtacccagcttcttgtccggtatcccagaagaatcaggtcacacggacttgaaggatggtgaatgtggggatttgattgagtggtggaggtggctctcagcaggatggatggggagctggacaagggatggagtgggaagatgattttcccctggagtttggtcatcctgaagctgatctcctctccaactatccccagccaaactcctctcgacgtttagacactccttctcttttctctttctctgccgtgccactgtgccactcttctgcccctctgctcatctgtctgtggatcctggagcttggggtttatatgagtacaggataggagggcacggtgggctaaaaggcaacatttgggcgcagaaacaggattgcctgttcccatttagggctgcaggtttccaggcttgagggcggggcctttgctggggaactgccctcttctacccagtatttccttgcctcctgtccgtatcaccactccgagctcactgggccggaagggcaggggtcacagtgtgcatggagtgatggctgccaggcacagccattctgacatttcaggagactgtggaccactcagagacagggctctaagcaaggccagcacacagatggctgaggccatcccactggggctcttggggccaaaaccaccctttgcaggttaagagggcatttcaaagaaaaaggtttgggtgagaggaaggcggtgggagtgattctgcagaaacagattctgggcctcaattccctcctcttggagggcctgctccccaggagtccccatcaccctgtgggttggtcctcgccaccagaagggcctgtgttcttcatgaacctttccatgtgcaccagtcttaaccgggagtgtgtttcccaaagacaggtagctcaccttagcagttttatatccgtaccccaggcatcagcaggtgcccaccaaacccatgacccaaggattgcagggaccaggagagaagagcaggaagaaattgtgtctaatccatgggaaccccgggatgggatgtagatgagtgtttggccacacagttggcaagtcgccttggaactggaacatagagcaaagccagagtcctcactgaccccctcccgacacctgcctttcatctgcttacgttttcaagcccagctgtgtgcccagcactgtgctgagtgagatggacagacaagtagggaggagggtcctgagtggtgggcatggactggtgcagagcacacaggagaggcccagcctggcctgggtggtcccccaggccgtaaagccagagctgggttttggacaatccctggagctgagccaggctgcagggaaaagatgcacggaggcgcagaggcagcaaccagccccctccaggacctgcgggagtgtttatggcatggtccttgcccacaaggaggtggtgacaaattggggacaagttaaatagaacaagatttaagtcccattgccaagcagggaatgggagccggggcacaggaaagctcgtgatgaagtgccagatgaatcacacactgcatggctctcagcctgaggagagcgatggcgggggcggggcaggccggacccggaggagtagggggagcaggcgggacctggaggggtgggtgggagcagagcgatgggtattggggcaagctggacccagaggagtcgggggagcaagtaggacctggaggggcagatgggaggagagcgatggtggagaggggcaggccggacctagagtgtcaggtgggaggagagagatggtgggggggcaggtcagacctggaggggtgaggagaggagagcaatgggtggggagggcaggcctgacccagaggggtgggtgggaggagagcactgaggggagcgatgggtggttggggaggtggaacccagaggtaggggtgggaggagagggatggtggtgggggcaggcctgacccagaggggtgagtaggaggagaggagattttggcaggagaaatgaggatgtcagcaaaggcccgaggcctgaaggctcaggctgagtccaggtcaggtttggctgcaatggatgagttggggtcaaaggcggctgagagggggctcctcccagagcctgagctggcctatgtgtccatcccctcccttgttggagctctggcgtggagcttcccattctagcctcagccacctatttatgtccatctcctgctcacacaaaaccagattccagagacaaacagggagacataaaaaggagaagagatgaagattcattgatgccagaactgactctcttctggaaaattgaaatattttgtacgtaatgacaatcaagtcaccgtgcgaccttcccggaataacttcccagatatatgacagtgacaacaaccgccccattggcgctgacacgctgaaggctccccaaagccaccacttaaaaaatgcctcccgcgttattaacattcctcacttgggaatgtttatggctcgtcactgttatcaacagtaacaaatttcgagaacctataaatgacaccacccccagagacagcccgggacaatccaccatcagcctgcctggcccaggctagactgtgaacatcaaatcaggctcatctgatgggcccccagccccgctgctcccacctcccgaggctcctgtcctcctcactcaccttgacccctgaaagccctggctccatctgcatccacttaacctccatcagggcccttgcccatcagatactgctggggggagggtacaggggtctcctgttcagaaccagggctttgagccacagcaggtgttacatttcccaaccgctgcttcttcctgctgcagagccccactccacacacctacaaagagaccctttttctcttcccttccttcattcattcactcattcgttcatgtgtgtattcatccatacgacgtgtttgctgaagtgattggaatgttgcacgaatgccctggccatgcatcagttgcagtctggtgacttccatcttaaagggcaaggtcagtgccaggcagaggggcagccttaggacctgcgatgtcagaacccacagtgctgtggtccccatcctagcagcagcctacaggaggcaaagaacctagccgctggcaagaagggcaatgcaggcctcataccccaccagtccctccctccaactgatgctaaaaactgtccttggagacaaacaggaagtatatatatggcatagtgacaggcagctcgggctttggagcaggctgcttgagtgtggctgcagctgtgacactgattagctcgaatcttctgaacatcagttttcttggccataaaatgggactaaaagcattcccggagctgttaagagggtcaaatgaaatagtgcatgtcaagggtacagcacgcttcttgatgcaaagccaatgctcagcagatgaagactgttgccacttgtacagattctctctttttgctttgggctttaattctcctacaagggtagaagtccaggtgagggggttttgtggccacttcgtttggaggatgtgtgttccatgagagaagagacaaaggtcactttggggccatgggggaggtaccagggaggaggcagcctgcaagacggatggctggcatggccacctcctggctttggccagctctccctggcttggccaccatggagtgaccttaagccagtcactcaccctcccccagcctcagtttctccatttgctgagaaggcctcctcaggcctgccattcacatccagcacctacaatagctctttgtggaatgttttatacaggatttctgtgaaaacctaacaagataatgaatatgagagagctttgaaaatactcagtgttttgtaaatgtaagagattattattcccatttaccacccttttaaaaggatgtttttcctccattcagccaaatttaacttggatgatgaagaacccagcctgggcttccccagctataattttcctgttccttgtgcctctgaatattaaaacacaaaggctcacattgctgagagaaaccaaaacagcagcctattagaggtgccattgcacaaacggaattcaaagtgatatttcaagcagggcgttctgtttatgtaaaccttgagagcacttgatgaatgtcagcagaactttgaaattaaaatcacttctttttttcatacgctgctcactctgttcttgagcccacgtcttgggtagtcgtggaggttaagaaaccactcagggtttaccttatactgttagaaatgctaagagatgaggcagggaggcatcctaaatgcctccgaaccggtcagcccaggactgcaaggcgaaggccaagtctcttaaagcaacagcctccaggagcgctgtccagagtgctgaaaaggaagccgggcctcgggggtgactggggggcatttggaagagggtccttccccagggacacattcctgctgctccctagaatcctgagggggaatggagggggaccctagggaggccaagtcccctgtgtgagctggagggaatggaacactagcaggcagagggagaagcgtgacagggaggagagacggggcccccccaccagagtgacaactgcagtggaaatgaagaggaggggtgagcgcagaagctggaggaactggcaaataaagtaataaaacagagagatataccctatgacagcagggagataaatggagcaagttataccaagggctcatttttgtgcaaatatttggggctctataaaataaggctgtttattataaatctgtctcccaagtaagtcttgccagtgcacaggtgtcacccgcagggaagttttccctctaaggcacagagggttgagctcgtggggtaaagtgtggctgcaactgctctttctgttctataaatagcccttcccgcgggggaaatgagactgctgggagccaagagaaggagccaggttcggccacgggatgcctggtggccttgaccttcacttccagccaagcggctgctgtggctgtgcagtgtcccagaatcaagatgactgacacacatggtcgtggctgaggagtctctcagtcctgtctttaaatatcaggagggctctgctgccacattctctctccagctcagcgggggaagagatgacagagcacaaaagtgtagcagcagagaaccagctgagaccggaggaggacttcagggttcatccactccttcgaaaactttgaaagtatagacaaccctctgcctgaaatggctcgaggcaattcttcctggaaccaagggaaggattggaagacttcaggagcttggggaaattcccaggagaatttgagtcctctaccctcaggctctagggccagcatatcagcaaagcaaataaggcctcaaagctgatgaggtcctcaatctcagagcagcccctttccctgctaagcagacacttagacacccaggaaaggacacagcaggggtgccagatgtctcaatggtagggtcacctgaaggactttggtcatgcacacccacccccccacccccatgcatacacataaggtctaaggtactatttccagaggaccaggattcctgttcctcagaggaatttgctcttgggtccccgatcttcttgattgtgaaatagtccagtgaatggagaatcggggtccccaacttccaagagcccatttcctcagctctaaggtggggctgatcacaataaggttcttaggagaattcaacacaggaagctactcaaagcctgcagcccaaggcctggcacagatcgacattagttcttagcatgctctggacaagaagtcacccctgtaccatgcacacagtgggagctcctgaattacccagatggacttgagtctgcttctaagatgtggtgctcccacagcagcctgggcaggttccttgggggccatcatcataccttcatcccatgttgtcattttggctggccttgatcacatcacactggcacatcatctgtcttcttcacctcgaccctgaggacactgactctctcttcttccatctccatatctctagtgcctgtaactcaagaaggtgttagctgagtggtcagtggagagatggcatctcagcctatatcacctcccaagccagaccagattccaccctgtgccaagcctcagcagctccccacccaggagaaccactttctaggatcgggaggccctcttttcccaattctatgcccactcctctttatcctgctttgtgtgcggctccaggctctcaactctgcacctttggaaaagacgtcagctttctccctggcttggggcctctgccccaaagactgactctgtactgtttatcgtctccctcgttttcaaggctttggctggaaatttggctccttgggccggttccgatgatattttacagtgccttcttaatttactgtctttttatgactatagtaaaaggccacacatcagggaaggctatcaaacaggaagaaacatcccctctccttgtcagctcaagttgagcattgtaatttacatgaaaaccttgtggcttagggtgtttacctcccatggaaccagtttcttctcccattatgagaatgagataattaaaaacttccctgttcctttgatattgaattaggttaactcagcccaattgcaaatgccagtttgaaggctgttatgtcatttggatttcaatgtagagccatccttttttttttaatccagaaatgctttattcttgtctcttatcctgatcccaaattagacatagggaagggaaataagggatttattcacatttgaccaaaaaatttgcatctcaaacagaaattttaaggaggccagggccagggaggcagctgaggctgtgtggcttccccctagtcaacaggcttcacagttcacccaatgtgagagagggaaagcatgaagaggaaagtatgagacccagtccataggaggaaaaccacagtccaacttctctccacctgccatctaccatcaccacggagccatgccatggcaagctattcctgcccctagggagacaaaccccaactcaaattggcctaagcaatgcagaatgtattctatcacctacgcggaaagccagagagagtgcgaactgcagggtcagcctattcaggggttcagccatgtcaccagccaactctgccatcttgagtgctggcttcgtgtgcctcctgggagccaggtgactgcagtccaggttcacatgacacatagcaggtgtcacaaggaagaagagtgggatgttctgcagctcctaccagtgaaaaaccctctcctggaaaccttcacacttctcttacctcatgagccagaattgggtcacatacccattcctaaatattcccttatgaggaagatgggagaataattggccaatgagattcactcgccactgccccctgccaaacacacacaatgacaaaattgaggagaaattgatttttttttttttttgagatggagtctcactctgtcaccaaggctggagtgcagtggcatgatctcagctcactgcaacctccgcctcctgggttcaagcgattctcgtgccccagcctcctgagtagctgggattataggcaagtgcaaccacacccaactaatttttgtatttttagtagagacggagtttcaccatgatggccaggctggtcttgaactcctgggctcaagtgatccgcctgcctcgggagaaatgaattttgatggggaataaatgctgtgcagacaatgtatgtgatgctgtcattaaatgttgcacacattcaaagcaatgtatatgtacacaagcaaaagtaacaagaaaatgggccctcccagaatagaccagaactagacccaggcctttgaagttccctctaaggacaggctcactcttctccatccttgctggagtcttgaaagttgaacatcgtggtaccaggagagtgagtggaacgtggggccactgtggagcccagtgattctcaaacaggggtgattttactccccaaggacatttggcaatgtctgaagacaattttttgtcatcacccttcgagtaatttagtcgtggaggccagatgtgctgctgagcatcctctattgcacggcacagccccacaacaaagagttatacagccccaagtgtctacagttgtgaggctgagaaacctcatggaagcctggctttcatccaggatactcccatgatgctttgccccctgggaaagggagagaggaggtggcttaccaatgagatgtgactggaagctggagaacacagaactggtcttcacccctccttcccttctctcacagaactttcctttacctctggcaaaacaaagaaaaagagagagagagaatatattctatgctgccttgttctgcacgagtatcttactgggaggctgtcagcatttggagagcagggcccagttccaccatgtctgtatccgcccagcactcacagagcaggtacctcataaatgtgggttagaaggagggaggagagatggagttggaggagaggtctgggactgagtagagaagctatgatttagaggcaggcaagtcccctgaggcaaattttggccggggctgagatcagctggttcttagctggggaacaaagaccattcaagagtgggtcagccagattcaaaggtttagctcgagaaattgaacctgacagttcagaccaagccagaaggtcctttgacaagagaagcagggaggaggtgttggaggaggcagccctgaggacaggtgcaggatgcatggggccagagcaggtggaagcaggagagagaaagagagtgcgagggaaaggccgtagggtcaggggagtaatccatcaatgttccgtccaatgctgggaagagcagggcccaacagtggagaaaaggccaggaccttgagaggcattgcaccctgattaggggctggtgaactggagggagcaggcaggggtccagccaggaaaagaggtcctctcataggggcaactagagggaggctgccacagaagaggggccactggcccaagagagccaagggctctgggaggaccccccatggtgggtgctggagagcccctgagcccttttatttcacagtgacaggccacagccagaatacgttgtcaccgtcacctggctatgtcagcagaattttcaacaggggctgtggtctgggatgccaggaatttccccttggctcctgagacatttgctaagccaggcgccaactggagacagtgacgggagagtctgagcatcgtgcctcggtgctgacctctgatattcaaattcctggaagccctggtgcaccttgtcctggcagtgcagctcggtagaggtactcccctcaaagttaataagaaactaagaaattaatttcctgtcaggtgcctctgcccagcagtggcagcccaacactctgtgtcattgggagtgtacttaaatcgcaaggaaagttataacaagggggctggtgaggtgccaggtgcagtgctcgcccttctggaagtttcctggaagagggatggagacgtctgtgcaatcccgagcaggtcgggggtgccagcaacacagcctggccctgggaccattgcttccaagaaggtcactttggtttttacttgaccatggtttgttgcaaaattcctggcaccagctcagctcggccacgtctcggctccctggcgcctctagagagaacgaatatgctaaagatagtgaggcgtcttctctgggtgacctcgtgtgaccttgcaatcccgtcaagtctttggttctgcagaaacaactgtcagatcgggagttagtcacctccaaagacagaaaccaaaaaccaaaacagtgaccttgttctttctgttcatgaccctggaggtatggggggaggaggaggaagcggagattggttttgctcgttaactcattatcagtgactgagcggctactcatggctgggaacttgttgggtgccctccattacacttcccttaatcctctcaatggcttttgatatcctcaggtagatgggaggatccccattttacctgggagggatacaaggccaagaggggttaagtaacttgcccaagatcacacagcgtttgaagtggccaaggtgaaatttgatctaacttccacttggatgtgtgattccactccacatccaagttctttccatcatctggctgcaggcaagataacagattggtgtattctttctatcttatttgaattccaaagttagtatccgctattgaaaacagctgacttcattataacccatcattgactcctttctttaacaaataaccagcaaaacagagcgttctttcggagtaagccttccaccacctgaactttgacaactttctccctaatgggtttctccctgtgagtatttgatcttggccaccagcatgagcctatcctggtgatctcaaaatgctgaggtttttcttctgttaagagattgaatcttctgttccatgtggaggcttattcaacattaaagcgttcctgaaccatttcatttattcaacaaatattttccaagcccagctctgggccagatgccaggctcaaggcttagcaagccagacagatgtggagccgccatcatggaactcggccctcacaggccattgtccttggctttccagactgaacctctgtgctttcttgtttcacggctgttttcctgaatgctccctgtgagcccgagtctgtcctgaggtcttcgtccctattccctgtgcctgaatcctttcctctcccagagctccccacagctggcttctttttatcatctcagatacagctgaaggttccatcctcagaggccttctcaagctcgctggctaaattctccacccacccccattttttatgctcataccacttcatgccatccagaaccaccttattctttattccaatgtttatagctcgtctcttccatgctctttgagggcagagtcttagacttggtcacagtagaccccaaatgtaggccagtccctggtatcttgtggttcttgagagctaatctgttgaatgaatgaatgaatgaatgaatgagggaattaatgaacaccctgcaaagcaagtgccacagttacccctactctatagaagaggcagctgttcctctaaaaggctgagaatcccacctcagagctacctgcaggagagtgggtgagctgggaccccagtcatttcaggttaactgaagggaaagcctgacttcccatcagctccacacactgagtcctttctcctagaaatgaaggaaacacaaagaagtcactaagaaggcacctcgccctcaagcatctgaaaccctcagttggaaatttgactgcaacctctgcctcctgggttcaagggattctcctgcctcagccccccaagtagctgggactacaggcatgcgccaccacacccagctaattctgtattttcaggagagatgggatttcaccatgttggccaggctggtctcaaactcctgacctcaggtgttccgcccgcctcggcctcccgaggtgctgggattacagaagctctttttcaacattgccttttagatcccctttcccatcagcttcctccaaaggagctgctggcttgatttacctgcagccaccgcaattaattgctgtcccctggtagctaacatctcttaacagctccatagcaacagtggtttccaaatgccagaaagtgttttttccaaggggactctatcctcgacgcaaaatagaacattttgagtgaaatttaaacacagtttttgaacggtgctgttctgatttcttcacacttcacaaatgctttctttgcaaacatgggtgtcccagttaccctgggctggtgccaaggccctcagcccagcttctgttttctcagcttcaaggcagccgtggtaagacctaaaaacaaacagggagcgagtgctgtgggtctccccgctaaggggttgccttgcgcctgtgcagagatgaggaccacagtttgtctcccacaccagctgtgatcaattggtgatgacaacgcagaaccctgcctatgcgatttctgggaccccatctgagcttagtgggaaagagtgccatccgccatggttccagtgcagaattccaagggccaagatggggagtagggatttgtgtatgagtggttggttggaacaaatcatcctggtataccactgctcccacaggtggaaacagagaaactgggttaaaatgaagactccagtaaattcgcatgcagaagtacccagaaaggcccttgccatgtccttcactctgccttggtgaaggtggaagagatgaagggagagggtgatgggtgggtggtgggtgtgctggccaccgactggcacagcccccagcacaggggctgtctctagtgaccgatccaggatgagtgtccccattcagatgcagtcaacccaccactgattcaaccaacacttgctgactgcctatcagggaatacatttccttctgatgcacactctgctctcaggaagtctggggtccagagagggaatggaggtgccagccagcctgaagatcagtggaaagagtgaggctggctgatgctgcaggagagacacagaggactgtcaggggagtcccaaagggaatgaaattattttggttggaaggataaagggaggctggaaggacagtgtgacgttggatctgggtcttgacaagtaggtggaatgtggagagattccaggccttgggaacagcgtgggcagggccagtggcagagcaggctgaatggtctggttgactgagccaagaggggtgagaagggtgcatgggaggtggatccagccgatcatggaggccattgggatcaggagtggggttgcattcacaggaaatggggagccaggaaaggttagcagtgggtgacgtcatcagagctgggacttgggaagatggctctgagagttggatgggagtgcctggctcaaaggcagaccagtcaggaggctgatgccaaggagcatggggaaggcagtgaggggagactggggcggtggcctcaagggccaagaggaaagcaggatgcctgcccgtctctcccctccttcagctctgctggcattagcagcgcctcagacttggtggccatggagtcacagtggcaggactgctctgtggcctgattctgcccccatcgggctgacagggtcttggcctctaagcaggatgcttagagttgcccctgccctgaggaagctggatgaagccaggccgttctgtcgcatcatctgaagaggagtgagtggggttgccagctccctgctagcacagatgcccaccccaccgttgtcttcagcatctgccaggagagggacagtttgaggcagtgtcggggttcacgagcttgctctcctctgccattcgcaatgggctggcatagggcagcctcactgcttggctccagccagcgacttcaggatgtggcgatgaagatggggtctggatgggcgttggtattcaggatgtcgagccccactggtctgggggaccagttggcgcttcctgcaaaggcatgtgctctgggaagggcctggcctgctgcagcagctctgcagaggggccggccccagacttgcctatgtcattagtatagcaggtcccgttattacccgaggaggcttacaggttatcagcgagctccaggagccactggagaaaggaagaagataaagaaggatttaaaaagaaaataacaaaaagaaaaactgtattttctaatccaaaccttgccctgcagtggctttgttaacccccagtcactccttcaagacataaactgttgagagccacaattacttcagtgattacacgttatcttgtcctaccaaggtattaaagaggaactggggaacacattaaaaaaacatacagcccaatttaatcatgattccctctaaaacaattgctggaatctcaccattacagatgccagagcataaaaatcctgtagatgcttgatggaccgggcacaattcatcctctgctgcctccacggccagcccatttgtcagtcaagggagagctttggggtttaggtctttaacaggattgagtgcaggggctccccaggtgctcctccagagcagaggaagggtggccccatcccaacctcccagatttccctgcttggatcacctgccctgccatcactaccaccaggaagacactaaacagaaagcccaccaaacatctcgggaccctactcatagtcaaggttgtgaagaagtttgctggccgggaagcagccttgttctgaatgccacttgtggtgaacagcaaccagctctgcttttctgcaaattctctctgcaaagcgagggaggtgtaatcatttgcttcagaaggttctgaacatcaggaagaggcaaagctgagagacagcagagggtgggggtcgggtgcagctccctgtcctcactctctacctgtctgctgcgtgacgttcaactcagagtctctcttgcttcagttttcccaattggagatggaagggggttgataagttggcctggacaatccctaagtttcctcccaccttcactactctctgttccaagaggagtaaacagaagggtttaggagacccctgacttgcaggaccctggaggatctttcatgcacaaattaaaatacataaagcatccaggaagaggacagtgcttactagagaaggggctggaggcactggagctcctcaagggcttgcaggtcacttgatgcctgtatcatctggatgaggactagaagtgatcccattggcccaagggactcctacctatccaatgtggcaggatgtggatggggtgtctgtctctttaattcatggagagttatgggatatttttcgggaaaatggagctttgttttcttccagagtttggaagataaccaagaattgtctcagagatcctgtttttatgtttggacaagaatggctggtgtttagctcatcgtctgttggagatcatgatgcttcctcgatgtttgaaaagaatttaactttacctagatgggctcctatctcaaagaatcacgcttcccaaataagcaatatctgaattaatttgatgttgctccacatggaagttccatacgatcctagggaaactttgtccttagcaatagtgtgagatgacataacactggttagagaggtcagtcagaataatacctggcccttctgaaggtttcccatgcctcgggcactgttcaaatgctgtatcttgtttagtcttcacaactacctcagggagcaggcactactgttctctccattgtatggatgagaaaactaaggcacagagatgtgattgcccaaagctcacagctaggaggtagcagaacccagactcgaacctaaggcagttgtctctggagcacacactctctaccactctgcttcctcagcatcagatagacctgggcttaatgggcagggctttgatggactacttaattccttacgttttagattctttatgtgtaaagcagatggggccataaccagttctaccttgtgaggttgtagtgaggattaaacaagctaagtcccgggaagtagttagcactcagcacctggagcatacaggtctgaagaaatgctagttctcagcaatcatagcggtgggggttattgacaccagagggtcatctgaattgtgtggtggaaagagtgaccggcttagccgaaagaagatgtgatcattttttaggaactaaggctcatgggcgatgcaacaaaaaactcgacttgaactgactttgggggaggaagagatttgggggctggagttgctgaaaagtcttgagatgtgctggcctgtgttccatcagttgcatcgaggctttgtgtcttctcccctcagccctgctcctcgcaccagctcccttctccttctccatgtgctggcaagagatggcttccaggagcactagatttcattctcccaggttcgagttcagcaggaaagagcacccctgcctccaagtgactccaaccaaagcctagtgattagcactgattggctctggtggagccatgggtctctctctgagccagtcgatgtggcccaaagaatgcggcttggccagcctgagtgacaagctccacccctggactgagttggagaggtggctggattgctaaagaaaacttggaaactcttatcaaaagagctagtgcaccagagttgtgtccagctcagcctcccatgagccacgtggccgtgagcagatcatgtagcacctctcagtccagcagggatggtggcacatgcccaacttccttcagagctatggaggggagcagatgggcaggaaaggctacagagcacatcagtcactctagagatgcctcaatgactgtttgctgccattgtcatctgatgggcttgattcactgcctaatggggcacagttctgagcaggcacaccagctctgggagcagaagtggggcgcacgtgcttggagaggatggaagagacaggggagggcagcaggcctggcttccagccatccaggaggacatggccagtctaggctgcaggcaagacctctttgaggctggtgaggaggccatgtgcctatggatttagctcctgggagggacaggaggccagaggtatggtgactgcagccctctgagacctgattgcccagcatctgtgctgttccaccctctgtctctgctgggccagggctgcatgccctgaggaggacctttgccctacaggagttccctgtgcccctgcgaaaggcccatggcttcttgtcccaggggtggtcggagcaactcttgcagcattgctaataaatcaaaaattagttcaaggtgagagcaggagacaaacaggacaggacaccaaccaacaatctcatccaagctcaggctctgccaactgcaggacgccagcagcctgcatccctgacaggtccctggcaagagagagaaggatggttggacgctgaacagtccagctgacactcgcagccccagattccaccctggtgggggcaccggccatcatggtgtctcctagattttgtggtcccaaagagagatggcccccagcatcccgatctcttgcacaactccttatggatcagccatccgggaactaatgtcacccattttagaaaaagctctttatatttttcagcccatgtcgccttgcaataatgagtctcatacgttgactgcccgctgtgtagtttgattgtgctaaaattacctccctgagctccagagtgggggaacccgtattcttagctttcatggatctagagttagaagcaactttcacctcttctcccctttctgaagactcgaatcacatttcctctccactgttatctttctggaccggaaagcccttatcttcattttcctggagctgcctgcccctcctcagttggtgctccctcacccctgcactccctagttcagacccagctctgcagcaaggacgcctcggccattctgtctccagttcccaggtcctgccctcctctccaggctgggccctttctggtccctgcaacaactgtggaccagtggcttctgtggatcctgggaggtcctctctcggggggcctggcagtggcagctcgagctgccagcctccgttgccaatttgctttactcatcctgagcctctcgccctgcacgtcactgccctgggatacatctgtagctcccataccctctgacactggctctttttcgttactcattaaaatttagtgtcatctgcaaacgtggagattttatcggacatgtcttcccccgggtcatttataatgattttaaataaggccagcccgggcccccacgcatacgtgctgttgggcagccaggtcttgctgcgcaatgaaaagtcctcccctcccgggcagcgcccctccaggatggcttgacccccctctcagcctttgggtgggactgtttcagaggcctctggaaagtgcaggcagacgggaccctctgtcccctcttgaggtacatgcatctttatctgctcagcgagagtggagaactcccttcatccagcattctctgggtgtctaggatgtgcccaggattgtgtcaggcatgatctcccaccataaatgtgtttttcctacactacctttgggctaaaggaggcagggcaagccagcccctgagccggcatggttcccggaaccccgcaccaggtggaaattgtttaactatattcccatgactggaaaattctggtaattgtgtaacagcagcagcactcagcaattacccagggtttttcatcttcagaccactttacccacattaactaattaagtctcccagcctccctccaaagcagggaagggctgccggcctgactcctgctggcgcacaggcttgcgtaatgagggcagccatgggaaggtgctgcagggcccccaagggcagcctacctctgccctcgcctgtaggccctctgaagcccttgccagccatcgctcagaatcctccagccctgctgagcactgacaaggaagtggggaggtgttctgtgtgcctgccacactcggccgcagtgggagatccctgggcccagcacagattgcaggaccaagcccccagaagagcacagttgactactgaccctgcctattactggggcaccagggcccctctttcagttcctactccctcccttctgtttttgcttatcctttaatagctgccaactttggggacctagatctgtaccccagttaccgggtgctcagctccagggtccctgaaggctgttccccactcccctgcacaccccacagagggtgttctaactactgtgggcccttgatgtggagacagggacatctgcagcctcggtcctgccctgaggagcttacagaccagccaggagccttccagccacatccttggtcctcccagctccccacacctcacatgacccaaccgggctccctggacctacttttgctctggcatagacatgaactgggctgctgccacccggggcactgaggctgagtgcacagccctcccatgaaacatccagtgagccccacagagccctggggcagtggtctggaggtgtgagatcatgacttcaagcagggctggcacccagagactcagccctcaaaggcactctcctttctgtaaacagggatagcaataccacttgcacctgtgggttgtagaacttgaatgtggagcccgagacacagctgacactcagaaagcaaactgtgaaaacagaaatgcccactgggaggtatgtgctgtgggtccaggcatgctcccacccctgagtggccgtggaatgccacagtactatgcattggagccatcagaggcagggaagagagacccaaggagacagcagcctgcaggggccggcagatcctgggagacctgagcagcaggcgcccgcgtgccctggcccttctcagggagcatccttcttgtgcttccgtccatcctccaggcctctctgatcctccccctgcctcctggctaccctcagtgggtgacagtggggatagaacccaagcctgccaaggccttcatgatcagcctcctttctagtggaaccatcgtcccacctcacactgctacccagagcagagaggacaggggcccagctacctggggcagccagaaggtgggtgagaggattttgctcagtcctgcagcctagtgacaccacagccctgtgccacccagtgtcgcccagtgtcgcccagtgccgcccagtgccgccctctatcccgtccctaataaaccctgcccttctccctcccagccttgcacacccgtttcacaggctcctaccctcgttgttcattaagcatccaggtgcagggaaggctgtgcctctgatgatgaggcttatgggacattcggaatatgtataaatggtgctaatatgacaaatgcaaagatcgaaggagcttgtgacgcaggcaatgctgcttcctcgcccgtctccctcctatccggctggcggcaggcaggcccgccccccgcgcccccagcggcaagtggggaggtgtgtggcactattacatgctattatgactttctgggtaatgtatacattttcactatcacacggcctctctccttcatttttcatgagaactggcacgagattaatgactgagccccagaagaaacggaacgccatgccactctgatttattgaccacttagcgttgatgaagctgcaaacaagagtcaaacagatgttgcagctgcatttttctttatcaaaaccaacagctttttgcatttttaaccacttcttgcatcaccaccctgcttactccacagaaaggggtcctggctccaggcctcctcctcctcagcggagatggaggagccgaggccagggcggtgggaccctgctgcctgacacccattggcccaggatccacccctggaagcggccaggaaaaggatgtgagatccccaaggctcttgctgtgggtgacttgagtcccctccgtgggtctctggggaagagctcactgctgcatcctcaaccaactccaagggctgattgcgcacgcccaggcgtgggctcagcatgcgggaggtgcagagctcagctcccctctgcagcctggagcacctcccccacctccgcctcatgcccatttactagccagtgtaagtgaccttacacatgagcgctgctgggggccaggcccgtcctgagccctctgcctgcctcaccccctcctggcaaggttcaggctagcactaaagggcctgcttaacacagagcaggcattctctgcagaatgttcttagcctctcctgtgcttttggaggaaaggccctcagcttgtcccccgtcctctctttgtccctgcagtttgggtgaaaggtgccatctagaaaaggttctcaaagagattgactctacctcaggctcccgggagatgcccttccaccaccttcagcctgagagtcctgtgcctggcagggccctgggagtctggaactggggaggtcagcagctccaaatgcatttccaggaggcacagctgggttaagggacaagctgaacttccctcagagaggaagagctgcagaggggcagagagctcgtggacccccccagatgccacccctcctgggccccttctgggggagtggaccccctcctcttccagcccatgcctgggatggacaccgactccttccccgcaccctagtctctgtctgtccctctagaagacatgcctgggggttctccaggattggtcctgagacactgagtctccggagaggagacagccacccctgcaccagctcccccagccaaggccaggtgccccctagcaggcttgttggcccgtgtgctggagcagcttggcggcaccccgctatgcccccggttttcagtaagtaggatggagcccctgccatgtggctgccccgcagacagagtcccagccatccggagctcacattgtggccaggaaaacaggccaaacccgagtagtaattgagcggaaactgagagattagtgctgcaaagacagcgaggcgggaaccaggcaaggtgggcactgttgtcaacggggttgctgaatgaggtttccacaagaaagtgacctgggaccaatgtggcatggagcgtggcagccagagaccacagcccagggagagaagcggcagatctggggaatggggtggcgggagccaggtgcatgaggcaggcagcggccagcaagaagcacaggtggcccggcctggaaccgtggcaggagtgtgggcctgatctcagtgccaaggagccgtccggaacagcccaaccacgcctgctgctgtttgaagggtgggttggggaagggaggagcagacgtgaggacacccgggaggagggcacactcccacgtgcgcaggagagcaggtggaggatcagacttggtcattgcaggcagggggtatatgggaggattaggcttcctggggtgggagaaatggcagaactgggtgatcgactggccgttgagggagagggagggaaaatgagaggatgactcctgggttccagacctgggcagctgtgggaagcctggaggggccaagggtgctgagcaggaggtcgggaggcgaggtcggccatgggaagtcatggggattttgaggccttcgaggggtgccgtcaacaggcaggtaggcaagagaggagaggtaggctggagagggaaatctgggtgtcctgggaatctggtgggtgtgaggtcaggacactggatgaggccactaaggagggagagagggaaagagggagaaagagagcgagagagagggaggccagagccccaggctggacgctggtggaggaagggcctctgtacacagcaagaggagagctgggacaggctggggctgccggaggaggaagggggctctaagcagcagaagtgcccgctggaggcttaactctgctcaccctctcaggaagcacgtcagggcttttttctgtctgggtttggttttggtggtggttggtggtggtagagcggggcctctgtctctcctgacgacattccagctgttccgaggcctgaccctgctccctgcagcagccccagtgagaaagaggcgcagcttccatgcttatgggtgaggagcctgaggcaccaagagggaggagggatcccctcgtccacggctcttccagaaggctgtggaacttctctgagacttttacttatccttggcttcctctaccaccaccacagtcacagaccatgccacggggctctctctccccagcctttggcactgaccaggcctccaggaaagcaagggctcatctccaaaggtcacgatcactttggggggtgacccctagcatctctcatgaaaactccatagcccagggaggggcttctgcacaagctcttcttccctccctgaacccacagggcctgacagggtggtgaaccccacggaaacatcagggcagcctgggcaagacaaaggcagcttcactccacaactgtccagaatcaaggatccgggccgggcgtggtggctcacgcctgtaatcccagcactttggaaggccgaggcaggcagatcacgagatcgggacaccgagactatcctggctaacacggtgaaaccccgtctctactaaaaaatacaaaacaattagcggggcactgtggcgggcgcctgtactcccagctactccagaggctgaggcaggagaatggcgtgaacccgggaggcggaggttgcagtgagccgagatcgcgccactgcactccagcctgggggacagagcaagactccgtctcaaaaaaaaaaaaaaaaaaatacagggccctggcggggtctgtcccctgccgtgactctcagatccaggcccaacccgggcattcctgcaggccgccctgctgagctggtccacctgagcccatctcgccaccagcaaagcagctcagcaaggactctgacaccgttatgagcactccatgaaactgatacattaggactccaagctaatatatttttctgccaaaaacacccaataaaatgtacaactaatgaataaaattgcaacattgccaagaagcgatgtgtgccccaaatttccaaaatacctccatcagcccatgtctgaaaaccagccccacgccaggaaatcgttactactcaactctgggcattccaggtgcaagagctccaggccctgggatggaaaccgggaagctgcctgctcctgcatctcctgagcctccacttggtctcctggaactgccaggggctgggacactctgctaattgtatcaaaacaagggagaaaggcaaggcccagcatggaggctcccgggaagggaccccccacccccggtgttgggcaggtgccctgagttgaaaggggtagatctggatgctacaatccctacatttgtagttactgaagtgggatccactgaccactggatctgtgagcccttgaactgaagtgttgatatgccttggggtatgttggaggatggggtgggtatccactgcctgcgtcaggctctcaaagagatctcatacccagaaaagatgaagaaccagccttgcattgtatcttaccttcctagcaacaacctgtgtttagaaaggcttcccggccgggtgcagtggctcacgcctgtaatcccagcactttaggaggccaaggtgggtggatcacctgaggtcaggagttcaagaccagcctggccaacgtggtgaaaccccatctctactaaaaattagccgggcatggtggcagatgcctgtaatcccagctgctcgggaggctgaggcaggagaattgcttgaactcaggaggcagaggttgcagtgagccgagatcatgccattgcactccagcctgggcaacaagagtgaaactccatctcaaaaaaaaaaaaaggaaggcttccctgccctttgtggacccagaaaactgaagccagatgtcaggagaacacaggtctagggagggcacaagcaggaggtcagaattcagcctaatttgattctacaaacctgaaataagcaccggtgattgttggactgtcgtagctgcagggcattgtccctgaggttgaggaaataaagttgatgttcagacaattaaaacacaaagccaaatgccaccctactatggtagaggcagagagggaatcagggaaggcttcctggaagaggaggggatcctggcatctgacctcaaagaataggtggaggctggttatgcagatggaggctgaggcctgcaggcagagcttcctgagatagcagcttttggggtgctctcatgcaggaactccacggtttgggttcatggtgagagagggcctttgccccacaagaccctgtctgcctgcccgccaccttggcctcccacgggtcccaggctggcccaggctgtgcccagcacgactgtggggcaggatgcggcagtcctttcctctcccaggcgtctggcatctccgctccctcctgcagggccgggcttctgctccagggccaggatcagaggcagccctgggcggcctgctggcccctgcagtcctttgatctttactcatcttgctcagcagctggcattgctgcctggccgtgcccaggcacaggcaggagccctcagcccagacgcggtccctgggaggccactatgttggtctgtaggaagaacacggggcaaggacacagtgaatcaccccgtctctccgccgttaccccctccatgcaaagggcatagcagatctacccgacccacctcttgggcatactgcaagaatgaagtgaaatggagatgagacagtacttaggccaagcaaaaagagaggccagcagatgtcctggcaggacccgaacctggagtcagagccccagcttccagctcaggctgtgccctgctggcacatagctttgggcaatcacaacttcttagtgctacaggcacctctctatagacagagggcaccctgccctgccctaccctgcccagcccgcctccttggctagcaggggcaccgaataagataatggctggaaagtgctttgaaaagaataaagtgctgcgcttatgtcagggattatcgtgattattaaggagcatgattaccgcaatccagaaaagccgccattaaggagaaggctcctgttcgtgttgattgagtttcctggttaactgagcgttggcaggaaaaaatctgtttaattatgccagtctcctttcttacattggtcatggtgtggtcttgagtctttatttattcatggattgattgattcatatattcatgtatgactctttccctgacaacattcaaaaaagcagttgcagacccagctctctcctgcctggggtcctgcctgtcccaggactcatggttgagtctcagtctatcagctggggaaagcagaggggaaagcagctttcctctatcaggaggaaaagcacaggatgaggcctcccacgtggctttttccattgttccctgcagcgtctgatatcctgccatgtttccttaggagaatgcaagaaaaaaatggttcaggccaggcgcagtggctcacaccggtaatcccagcagtttgggaggccgaggaaggcagatcacctgaggtcgggagttcgagaccagcctgaccaatatggtgaaaccccgtctctactaaaaatacaaaaattagccgggctgtggtggcgtgcacgtgtaatcccagctactcaggaggctgaggcgggagaattgcttgaacctgggaggtggaggttgcagtgagccgatattaggccactgcactccagcctaggtgacacagcaagaccctgtctaaaggaaaaaaaaaaggttcaagaaataccctctgattgagatgggagggtttagctaggcttttctggcttatccagatgcatctagaaagtgacaggattgctttttctttaacaaacttgtcagtattgtcgtggccagataagcagcgctgccttctggggggaccatgagaaagccaccgaaggccccatgctcatcccagggacactgctgccttacacaggcccctgggcatgtcctatctgagctcggggggcagaaagcgacagaggacattcttaataagatgtgatgagaaggcgctgactgttaaatggaactgatttgagacaaactgggcctttttatttttgagacagagtctcgctctgttgcccaggctggagtgcaggggtgcgatctcggctcactgcaagctctgcctcccagattcacgccattctcctgcctcagcctcccaagtcgctgggactacaggcgcccgccaccatgcccggctaatttttttgtatttttagtagagatggggtttcaccgtgttagccaggatggtctcgatcttctgacctcgtgatccgcctgcctcagcctcccaaagtcctgggattacaggcataagccaccacgcccggcccaaactggtccttttaggtcttcagactgagagatctttcccagaatacctgtgggcagctggtgcccagaagtttgggaaactccgccccagaaaccaacaagaaagagtggacgagctggatggggtgacagaagagctcttccagggaggagtttccagagattctgggcaccaactgccccctgggtattgcttagatggaaagtgccagctgggtgcggtggctcacgcctgtcatcgcagcagtttgggaggctgaggtgggcggattgcttgaacccaggagttcaagaccagcctggccaatatagtgagaccccatctctacaaaaaatacaaaaattagccaggcatggtggtgtgtgcctgtagtcccagcctcaggaggctgaagtgggaggatcacttgagctcaggatgcagaggttgcagtgaactgagatcacaccactgcactccaacctggacgatggagtgagactctgtctaaagaaaaaaaaaaaaagtgcttcattgcagggctgtttgtcaggggagaagaccacggctgaaggcagaggggctccagccctcagcaggaggagccttaagccctgggagctccttttccccttggggagaagcgggtgaccatgcctgtgttgggggcatcccgcaagctgtgagggggcaacgcgtgttgggcgtgaaggagggagagggcagtggctgtggtgcgaggtcagggatgttgggctggagggaatttgacctcatgcccgtggttcccagttacacacatatcagcttatgtgtaggtcagagtttctcaaccaggggtgatcttgccccctaggggacactgggcaatgtctgaagacttctccaggggtcacagccggagggggaggggcctaatgacatctagtgggtagaggccagcgagtctgctaatatcccacatgcgccggacagcccccaccacagaaccatctggctgcaaccgtcagcagtgtgaggtcaagagagccgggtgtctggggcctcagtctctgcctgcacctgcggggttgggggcggccctgaccctggtgggctccatgccaccctcatgctgccagtctctgctctccccacagaaccccgacatcgtcctggtgcactacctgaacgtgccggccatcgaggactgcggcaagccttgcggccccatcctctgctccatcaacaccgacaagaaggagtgggcgaaatggacgaaagaagagctcatcgggcagctgaaacccatgtgtgagtggccttggccggcctggcgcccccacgctgggaaccaggctggcatcaaccaggcggggccaggaaggtcctctgtggccttggggatgcgggtccggagccccatcttgctggaatgacagtggcaccgtgagcttagcttttgccccaccttcacttggccccttgtaagctccctatacaacagccagggcacaaaatgccaggcccacgtgacagatgaaaagagtgaggtttggagacacagagcatgtagaggaagaagcaggccaagagtgggccaggaccgggtctccggggccacagacaggagtggaggccggctggggagggaaagtatggaacaggggaggggtggcgggagcggaccctgcctcctgccttgcccatccacgtgggatctgggcttagccaccacctcctggactcagggcctgcctcggctcccaggctgggtggcaaatagatgatggtaattgagctggatttcattttgtcagcaaagtggtgctttctgaagcatctgtcaggtgcaaatcacagaatgcaaaacaccgagtgaggcagggaagctggggctgctccgtactttgttgccgtggccacagctcccggcagccgctggcggctctcagtggcttctcctgccccctgttcagcggggctcgggaaaaacaaacatgggtctggggctttcctgacccaagaagagcatgggggctgtttagtggtggacacgtagcccacggggttcagggacattgatggccagggctcagggcaaggacctgccatcagcagggcctgagggggtgggtcagtggctcactcagaagcagaactgtccctggagctgggctggagggaggaagcagctgttggtcaccatatacagcggggggactgaaatattctttctgcggctgggaggaaaggtgaaggtcctgtgcctgggagggcccaggctgaggctacgggcacctgcggtgatgctaatcctgagagtcccctgggtgctcggatttagggatctgctcccagcctcaaggttggggatgagggtcaggagggacagaggggtctgtgtggcaagggaggccccccagtgggtgacagccctgcccgccaagggcaggaccacaagactgagcttcctcacgtgtcgtcctttgagccaagtaccccgtggggaggtttggaccaggcttgcctcagtgcttctgcctggaacctcgaggcaggcagcccagggacctcctgagctcagaccacacccagtggcaaccttcttaactgcagccctgaccacatccctctctgcttaaaaccactcaatgcccattcaatgcacgctcaatgcccaagctcctgagcacagcctgcagcccccccacccgcagcccccggcctctgcaggactctgcgccctttccacctgctgtagtccccactccccagagcctgctgcctctccacctgcccctctccctggctctgcctgctcaccccacctttccctcagctctcagcctctccacaggccctcccaccacccagctgggccttcacacccctgtgccctggcctcctcgagcccccacgggggagatgtcagcttcccgcgcttcatcaggaggggcctcgtgagcctcttcaaaatgctgccgagcaccgggaagcatggggaaatggcacagctgcccttgggaagccctccggctctctgcacagtgctgggtgtgcacaaggccctggaaatagccctggaatggtgggggggaagggacctgcccagggtcctgagcagaggacagaagctgcagtgtcctggctctgggagccggggctgctgagtggcactttcccaagggcaggccagaggctaggagtctggggcaccggtgctgcgggccctgctgtcaggcccgcctgcctgccttcgtactcagtacatagggggcacctcactatgcagggctggcaccggacactgggtcctgcctagaccccgccccagggggcctactgatactttctctgccgcagagcctcagctgggccagcgctatgactgctgaccaggaatgctggtgccccctggccagggcggtagaaagagtcagggctggcaagtcaggaggcaggtgctcatcctggcttcatggctgcccctctacacagccccagaccaatgccccaccctctctgcaccccagtaccccttctataaaggggtagcaagaatctagcagcctctgccctaagaccagcacttccagccatctcagggggcccggctcagctcctccacccctgcacaccatgtccaaggggctgaggctgccagcctgtcccatttcttgggaggtggagtcactccagagggctcagcttggtcctgcagaagctgccatggctgagtgcactccaggcctgcaggaagtagcctggaacctcctttctggggcttagtcagtgctttcaaaattagggtcctaagtactcttgccttgaaagggtgaccagggtccaggtgcttctgaagctcctcccacccctcagtgtttacatttagaggggagttcctgctcaaaacaagtcttcagtcaggaggaggagttgccttcctggcctttctgagccttctgtctgcttcttcttaggtcactagaaggaattcctcttgtcagattccactggaaaatgagggcccctttgctggacagaggccccatccatatggccggggagcagccccaatcccctgggccccagcaaaagttccaagagattgtgtgagccagagattagccaaggaggttctcccaagggaaaagatgcctttcaaggtggctcctacagtcagaggctgctagcctgggccttcccaaattcttctcgacacacacagacagcccttctccttcagccatatgctccccatttttcctggagctgcccatccatcagacaggaatgccacctccaggctgggtgggaggaattaggctttatgaactccagggggtggaaaccagtccggagccagcctccaatgctgaactggagggaactgtgaatgcctgctcaaaaatctgcagtgcatcagaaaattatgtaaaactacaacaaactccccataaatctaataacactcagctctctggtgtcttgggctgggggaagcagagccgcacacaattccttggctcgggcgtgcgtgtgcacggctctgacagaaacacagcccgagaaacagccctggaaatgcggctgcaggagaaggcgcagatgacgatcaggcttggaacacacagagggcaccagctaagtgtgtgtgtccggggacagcagaggtgtgctgagagccaagaagacctcagatttgattccagaatcaggcgggtcacccaacactggagccaaacacattagcttcatcccattttcacataaatcgcgtgccttcgaagacttcacagtttgatttcctgatgtttccaaatttccctgcccgccagcggagttgtcagcggtttaatcacaatgtcgtgctccccagggctgaagggagatgggtctgcagccttcacctcacctgctgtgagatgggggctccgtgaccttatgccctgggaatctcaccaggctgattcagagaatcccatcctggtccttgcagctgtgccctttggtcagaagggggcttcccttccacctgcaatctgaggaatgcttccttcagatgaaaaaaaacacacacagaaataaatgaagatagctgataggaattcccaggacattcccagagatctttcctgtcttttggaatcccttctgtaatcatgagactatgggtcctgctgctatgaggaagaccaaaataacagtggcttcaatgaaagggaagctcctttggctttcatgtcacagttcagggttgatgtggcagccccagggtcagggatcggccaccctggctccctccgggtggctgctccccattcctagggctttgccttcttttacatggtccaaaatggctactccagctcctgccattgcaactgcattccaaccagtggaaagaggagaaaataaggtggagggtgagttccttccctttaagcccacaacttgcatacatcatttcatctctggtgtcgttggacagaattttgtcatatggttactcctagttgcaagagagtctgggaagtgtcgttttttgctttgtagttccatcctaacgtactttggggaaagaggttctgcatgtgaatcattcagggctgagtagagctgtgcttagcctggggtgcccctgtgggcttcagctttctggcttatagtgcacagaattgcccatctcagtccaaggcctggcaatgactgtctgaggcgccgtctgaggcctggagtttacagtacgcaagtgatctaaagcttagtatgtctcatcctggaaattccagggtctgttccaatgcagctggtctgagagagcaccagatttgcacccagtaaacccccatagtgtgagtgaggagctgaagggggagtcctctcctcccagattagccactgagagatgactttgagtggagtcgactgctctgccaggcaggctctgtgcttctgtcctgccaagctggcaggaaacttgctcagtgatcttgggctgctcagagccacagtggttctaaactgccatgccccaaaccttgcacccttggctccactggaacctacagaaagccagatggaaccgtttcctcggagaagatcctctccctctgagcacccgtggctttcttccctgcccatttcctggcagcccaggaggggatggcacgccaggcatttcccagcaagctgttggtgaggttgttccatccggagtgagtggcgagggcatgacttctaagctgtgttcacagcccttcccgtgtggtgatcttgtcccagctctcccacctggaggctcctcttggagtgccctggctggccagatggccctgcagccatgagcaagtcctaggccttcctgcaggcttcgaaggcccggaaatcagcaggcagctcccccagccgcctcggggtttagctccaccctgcctgccagccccagagctccgctggcatcaggccagagtactcaggcctctggggcaggtgtcctctgcagcactgggcgggcggcaggagggctggctgtggaatcagcagagccccagggcctacgcccacaccacacaagtgctctgtgcacctccatgcttctgcacgggcacacgacgtatccacaggcacgagtgtgtggggattcagcacctccacccccacacttcctccaaaagcaacctcacctccatggcaggtggtggaggccatagtaaatgtgaggccacaaaggccatgttgaaagtggaggtggaggccatcctgaatgtggggtggaggccatagtgagtgcaggtgaaggccctggtgagtttggtgggggccctggtgaattgggtggaggccatggtgagttgggtggaggccctggtaagtgtgagcggaggccccgttgaggtggatggaggccctggtgactgcaggtggaggccatggtgactgtgagggtggaggccatggtgattgtgaaggtggaggctatggtgagttgggtggaggccctgccctggtgagttggatggaggccatagtgagtgtggttggaggccacggtgagttgggtggaggccctggtgagttgggtggaggccacggtgagttgggtggaggccctggtaagttggatggaggccatagtgagtgtggttggaggccctggtgagttgggtggaggccctggtgagtgtgactggaggccctgttgaggcggatggaggccctggtgactgagggtggaggccatggtgactgtgagggtgagggccctggtgagtggttggaggccatggtaactgtgaaggtggaggctgtggtgagttgggtggaggccctggtgagttgggtggaggctctggtgggttgggaggaggtcctggtgagtgtgagcagaggccctggtgaggtagaggccctggtgactgagggtggaggccatggtgactgtgagggtgaaagtcatggtgagttgggtagaggccatggtgactgtgagggtggaggccatggtgagtggggtggaggccacagtgagttggaatggaggccctagtgagtgtgaatggaggccctgttgagttgggtggaggccctggcaagtgtgggcttgcttgtgctgtcatggcccccacagtccatctcccctaacacactggtcctcacctgcagcctgttggttttccaggggccagggtgtcagtcctgccagccttcagcatctgtaaggcagtgctgccgagacaccacaccgtttccagtaccgggcctcggatggggtggctgcaaacgggcccctcattgctgagcagtggctgcagtggcagagaaatctgctcagagcggctgcttagccagcacctgctctccagggacccagctcaggctgggagaggtcgcagagcccaggatccccagacccccagcctccctccctctgttccggaggccctcgctgttgccagtacccaagcctggggttgtatgttcagtgcgccttttgttttctcataatttttcagacaaagaccaaagatccagaaggggggggggctgtgtttatttgttttgttttttgcttagattgtaatcctggtgattatagaatatcaagaaggaaaatcaacaaagccttccttcctggggctcgcggagccgttcctggtcgaccagcgccacctggtggccagtggcagcggccccgctcggagatgggagccccagggaagcctgactccccggtccaggccacctggagcttgcaggcgggggcctgtcccacccgcgcctctggacctggtgtctgagatgtgctaggaggctgtttggggacctgctctgtaattctggagtggtggggcttggggtggggctggaactagcagcaggagaccctagggagaggtgcctgtgcccaccttttttcctctccagctcagtcgatcctgatccagtatcacctggctggctggggacggcgggctgggagctccgagcctgactaggaacaggtatccctaaggctcagccagagcccatcgaggaaggacagcagccagcctaaaagtccggacgtagtggcttacgcctgtaatcccagcactctgggtggccgaggcaggagggttacttgagcccaggagttcaagatcagcctgggcaacatggcgagaccctgtctctacaaaaaatagaaaaattagccagatgtggtggtgcacaccagtagccccagctacttgggaggctgaggtggaaggatcacttgaacctagggagttcagggctgcagtgagctgagatggcgccactgcactccagcctgggtgacagagcaagaccttgtctaaagaaaagaagagagagaagagaagagggctggacatggtggctgacacctttaatcccagcacttcgggaggctgaggcaggtagatcacctgaggtcaggagtttgagaccagcctgaccatgtggtgaaacctgtttctactaaaaatacaaaaattatctgggcatggtggcaggtgcctgtaatcacaactacttggtaggctgaggcaggagaatcacttgaacccagtaggtggaggttgcagtgagccaagatcgtgccattgtgctccagcctgggcaacagagtgagactccacctcaaaaaaaaaaaaaagagagagagaagggaagagagctgcaaaaacttttcccccatggagctacaggtgtgggcacagtaaggagtggggggatcagccccgggtgggagagagagggggtgttgttagagggactctttctggccagcagtgttcacttagaggcgtgttccagggtcactacctctgagcagagacttctgggataggagcaaatggctgaatgtcaggagtgagctcgggccccccaggccacccagttctggggctcagagggagccgagccggctgcagtcttaccctggaatccaccaaggtcccagaaagcctgagcagagacaatggttccccctcagaaccacctgggaggggctgaaaggcaggcccttccccagacattctgactccctgggtctggagtgggctccagacactgagttttttatgaagctaggttcttgtgctggggtccccaggaccatactttttaaggaaccccggcctatagcagcctctggcgagaggccagccaagagcaggaccagcacctctttgggccacaggcctcctttctcacatccaggtgcgaggagggcaggcgttggaggccacacggagcttagtgtagccacactcccagaggaagccagtccccagcatgcactaagtactgggtgtaccatttctggatgttccaggactgtgtgaggactttccgtagactctgggttaagaaatacgactctagaagtttccttgttttgcagctgaggtgttggtgccggcacatggtggagccttgccagacacttgttgacttgcacttgtgagaaaccctggagttgcataagaggaagcacatctgtgtccccacggcagcccagacagcagctcggtccctgagagcagaggcccggctccctgcctgcatctgcggggcctgggagtcatgggggaggcagcgatagcgctgggggttcctggagaggatttcctctgccttttacccttccctttgggaaggagctgctgccatgaggagcaggcagggcaggttcctggaatctccaggtgggtcccagccctcttcctggctcctgccagaatgcctgcagcccccttccaacctggcatggaggacagcagagggtgggcacggagaggctgacttgagtgtggggcttccttcctactttgctccaggatccaggtttgttttgcaaatgttggtttctcactccagctagttttatggagccgatccggcccccaaggaggactggaagagaaatactgcttttgatttcctgtctctcctggcgtcttgctgcccagggccgcttcaaggccgcatagctgcttccgtgacaggagatcccccttttgtggagtgcgcccctgtgctggtgttggggatacaggaccccaccgacgtcctgggccctgactgctatgcagagctgatgctgagccctgctaggtgccagggagtggttctgtcaaagttagaattcattgccaacattcaaatctccagattttcagcctctctttaaaaatggaaggctccaggccaggtagttgggagctcagaggcggctgctctgtggaccgagcctggcttcctgcggcgctacctccccacacaccaggaggcacctgagtccaggaggccctagagcagtcttaccaggagcaagatggaagcatccagaatcccacttggtcccccacccctctttccaagtggcctggaggggcagataaccctgaggctctgacgctgccaggcggccggcactcctagcgcactcacacttcacccacggtgcaaagaattcccagcctggtaacaatgccgcttcgcacatcaggagaagattccgagagcctcaggatggctctaaagtgccactttgtatgtcactgagcaccttggagatttcctgtgaggccagttacaggggtaaaggacatgccaccccacacgctctgtatttcctgatgatggagtcactggccgggctggaatggcgcctctccctacccctcattgacaatgtctgtcccacttgcaagaagaaagaatacgggaaggtcaagctctcaacaccctggcagtctgctggaccctccacccccgccttttccagaggacgtgtgatgttgggacgaagcccatgccccctggcagagggaggactgtgatgccccaacagcgagcaccagaaatgacaggctcactggggacacggcagataggtccccgcatgtgcacacggtgggcgcacactccatcccgtcccccctcagcctctgcgctcctcgaaatgagatttctgaaaattttgtcctcaggaccaataggcgaatgagagttgagtggtgagatcgggaaattgaatagtatgtgggtgtctggatatgagaagttaaatctaatgaaaatttcatccagttgaaccaagaaatcagaaacagggcctttattcctgtcaacaagaatacagtgaaaattaaaccaacccggctgccatttcccattgaccttgtcgccatggagacagccttctagtgtcaacaacaccgaggactccgaaggggcctcattcactccaggagaggcacgtggccgctccctctcccgtccgcctccggcacgtggttcataaggagagcagccacacgtccagggttgctggagagcaacccagcctataccagcacctggacaaatgaccacagcaccctttgttggctcccaaggtgacctggcttgactagttaaatggccaccctctttctgggtctttcttgggtggcagggtacctaggtgggtggactggacgagcccagatggaggaggaggacagggccccccacagccctccagaaaaggacactgcccctcgtccttgccacctgctcatcacagcacccagaaatctcttctcatgcaaaggaaggccaagcgtcgattccagcaggtgccgcctgtacagttaccatggtgaccaaagctccaggtggccttgccctgtcatccttccaagagttactgccccacagagcagaggggacaggtagctggttctcacccgttccaggagccaccaggggctgaggcagacttctggagttctctctgtctcctcgtccaattcctttccaaagtcttccaggcaggactgcggagcagagagcttcccctcttgtgaggctttccaccctggcctgggcagatctcctgtggatgccatcacatcagaatccaggggtggggccacctacctggatagggcccagtggcatacagtcaggtgaactggcaagaggcaaccactttccagatgaagaaactaagatccagaggaaacaaagatcttgttctaagatcacacagtgcatgagggaaacagctgcggccacatgggggccccgaccccaggccagcacggtgctgccacccggtctcccactgtttctaaattctcgcctcttcttcccacatagccagcacagggcatcgcacttggaggttttccctgccctttgggaaagccccaccactgcatgggacagccatgtcaggaatgaaagacagccaagacgaagctgcccctcagccccctgccatccctcagggggtcccctcccacccccaccataccccaaatgaggaggccctgtcgtggagccaagcattgcccccacacatcctgtaccgtctggaatgaacccttcttagcttctttgggtttttatagaaattccccccaaatgcacctctaaccaggcacaaagcctgctgccgtgacaagaccagcacatgcctcagggaagccccagctcccaggcttggatgcagcgttgctgagatgtcctccttgcagcagcctcccaggttttcttcccccttcctctcctgcttgctctgattttccaagagcaagtccccatcaggccctgcctcccagttcctcccgtgggaggctcaaggacgagtttcttctgccctggtctgggtggcttggccagatgagtgacagctgacctgaccccgaagtgaggaaatcccaagtggggagccagggactcgggagcttctgcccactaaggccccagccagcaaggcctggcccctctgagacagcccagcatctgcgaagtcagggagggcaggagacgaagctgggcatcagcttgggatgacagcatgtggtccagcaccaggaccctgagtttcctgcacagtcaccagcccctggtgaaggggccgagggaaaccagacttccctccaggaagtgaagtgagtcttgctgctcacggccagcaccctctacctccagatggggtcgcttttctcctctgcccaccaccgagctgctgtccagtcttcctcacctcctcctaggagctggtcctggcagagctgaaagccaggcaggtcgcccagtggaaagagcttgaatctgcagcccctcctcaccccctacgcacctgctgtgtgaccttgggcaagttacataacttctctgagtctcggttttggcattaataaaatgggataatatattctgcctcaagggatcactgggaggttaaagatgtcatctctagacctgagcttctcaaacttgagtgtgcctcgaaggcctattaggacgtggatgctgggccccaaaccccagcgtttctaattctgcaggttggggcggggcctgagaatgtgcgtttctaacaagtgtcaggtgattctagtgctgcgggggccacactttgagaaccactgctccacaggagagtgtctggccccgtgccctgcccacagcagaggctcagtggagtacatagtattgttattatttttttccccttctttttttgagacagggcctcactctgtcacccaggctggagtgcagtggcccgatcacagctcactgtagcctcgacctccctgggctcaggtgatcctcctgcctccgcctcccatgtagctgggattacaggtgcccaccaccacaccagactaatgtttttattttttgtagagactgggtctcgccattttgccaaggctggtctcaaactcctgggctcaagtgatccaccctccccagcctcccaaagtgctggcatgagccaccacacctggccttgttctttttttctttttggagtcaacatatgaagatgctcacatactgcctggcatggaggatatgtccaataactatcattgtttttgttgttattactgagacatgagctctgcttatagctcactgagggaaatgatgaaccaattaaaaaaaaaagtgctagggagggcatgattgagaaattggccattcactcattcactctaccagcctttattaagcatctactatgtgccaggcattgttctgaggatgggagatgagcagtgaacagcttggcaaggcctgccctcaggatccaaactccagctcctagggacaggcatgagcagccaggaaggctattgtgatttctatacccatagttctcaaactggagcatgcatttgaattcccacgagggccccttaggacacaggtgctgggccccatcctgagtctgtgattcggtgggtttggggagggcctgagaatgagccagaggcgggggcttgagctgggctgtgctggaaagaagggtggcatttaaagtggtagaagggctaggcgtggtggctcacacctgtaatccctgcacttcaggaggccgaggtgggtgtatcacttgaggtcaggagttcaagaccagcctgaccaccatgctgaaaccctgtctctactaaaaatacaaaacttagccaggcgtggtggcgcacacctgtagtccagctactcaggaggctgaggcatgagaattgcttgaacccaagggtcggaggttgcagtgagctcagattgcaccactgcactccagcctgggtgacagagtgagaccctgtctcaaaaaataaataaataaatatattaaaaataaagtggtagaggagagaggcattctggaaagcccctgatgtcagaaccccttgaactgtacacacacacacccctatacatacacacacctatacacacatacactcctatacacacaaacacacccatctatacacacaccggcacacacctatacacacacacctatacatacacacagctatacacacacactcctatacacacaaacacacccatctatacacacacaagcacacacctatacacacacacctatacacacactccatgcacacaaacacccctatacacacaaacacacccacctatacacacacccacacacctatacacacacatatacaaacacacccacctaaacacacacctatacccacacacctatacacacacccacacacaccacacacacccctatacacacgaacacacccacctgtacacatacccacctatacacacacatctatacacacaaatacatctatacacccacaaacacacccatctatacacacacaagcacacacctatacacacacaaacacacccacctatacacacacacctatacacacacccacacacacctatacacacacccctatatacacaaacacacccacctatacacacacctatacaaacacacccacctatacacacacacccacctatacacacacacctatacacacacctatacacacacctctatacacacaaacccacctatacacacacctatacacacccacacacacctatacacaaacacacacccctatacacacaaacacacccatctatacacacacacacctatacacacacacctatacacacagacccacctatacacaccgttatacacacacacacctatacacacacaccgttatacacacctatacacacaaacccacctatacacacacccttaaacaaacacacccacctatacacacacacgtatgcacacaaatacacccacctatacacacacacctatccacatacacaacctatacacacatacctatacacaaacacacccacctatacaaacacacacctatacaacacacatacacacacctatgtacacacccacacacatacacactgatatgcacacctatacacacaaacacacccacctacacacacaaacacccctatacacacacctatacacacccacacacctatacacacacctatacacacactacacacccacacacctatgcacacacactgatacacacctatacacacacacctatacacacatctatatacacatacaccgatacacccacacctatacacacacctatatgtacaaacacctatacacgcgcacctgtacacacacacgtgtgcagtgcatagagcagggttggtgtggacctttagccacagagcctgaggatgggggaggcctgagcccccatgcggggtgtgttatttagcctgctgtggtttgaatgttttcctccgaaactcatgttgaaattgaattcccagtgcaactgtgtctggaggtggggccccatgggagggattaaactgctttacttagggtttctgggaatggattctttttcttcgcccttccaccatgcaatgacctagcaagaaggccctcaccaggcactggcagcttgatattggacttcccagcctccaaaactataagccaatacacttgtgttctttatgaatttcccagtctgtggtattctgttgtagcagcacaaaaaagacgaagactaaaacactgccctcacagtgtgccacagactggcggcttaaacaacagaaattgatcgtctcacagtctgcaggctggaagtccaagattaaggggacattggggttggtttctggtagggcctctcttcctgggttgcagacagccaccttctcactgcttcctcatataaccatctatctaggcataggcactcctggtgtctcctcctctacttataaggacaccagtcctgctgggatagggtcccacccatgtgacctcacttaaccgtaattacctccttaaaagtctgtttccaaatacagtcacattggtggttagggcttcaacctatggatttggtgggggacacaattcagttcatgacagaggaaaataggacggccctaccgtggctcaggcttagcctgtgtagctgaagctctccgccgcttcccaagggcatgggatggagcagctgcaacccaagaggctctcggctggcagcctgccccatgtggggtgaagcccccacgccttcccccagccctctcttctagatctcaattactcttttcccagcggttggccgcctcttgggtaaattgttcatcagaagatgctctccaaagcatgggccacacgctgttgtcattgatttcattttgattattcatattagtggaagcgctgctgccttgccaggggccataattagggtaaacatcttgtacgagggctaggtcagcattggagtgggccctgggttcctgcgacggccactcccagcctcggctctgcaagccgatcctcacacaggccgcgctgcaggcagccctgtccgcgagaatgcagtccccggcctgtgtttcacggggcagccgcagggcttctcgggtagctgtaggaggacacctttcgaggagccagcatcctgcttcccagtggccagtgtgaccatcctgcctgcccctgtcttgtggagccccatgctggggtctggcttatcccaccccatgccagccctttcttctctctggtacttcccctgacccagccttcctagggatacaggtctctctccaccacctgagcagaccagggaccaccaccaaggctccaactatggggagctgcagagagggtccctctgtctgggattcagctcaggccattctgcctgagaacggggagtcaggtaccgcccggtgaggtacagtgagcaggaggggacagatgtgacccagagccaccaggacattacctttctgggaattcctctttctgtgcctcctcccttacaagacatgtcatgaccttacatgtcatgggaggtcacgtgatcaagtgtacttttaacgcggtttcccttttgctgctttaaaaaggggaaggggccgagggggcggccggcatgcgtggctattaaccttcctttcataaagcgctttttccctatagaaatctcccttcccactgattcattccgtgttgggaagcagagcatgacatgttaaaagccgtcttgatactatttgatattcagtgctaacaactcaccacctcagaggaggggcttttctccacccacccacccccaacaccagagcaaggagggagacaatctgcatattggatgtgccaagacagtaggtaatttgcattaagcatctagaaactctctgcttgcaatctgtcacccttcactgggtcttcattttataaccttcacaacataaggaggagaacaagaggcagagagaatgcggctgccgcacccccatcaggactggaggagaaacctggcctgatcggcggttgtcagagcagaggggaccctgatctgaaatgccaggagactctgccagccaggggattcaaaagcctcactgtgccaagacccaagaccctcaagtggggtgtagcctgaaggccgaagccagaggtggggctgccctgaaaacagctcatctccacagacagccaagttcaaattcagcagggatcttcccagagaacatgtggcctggcttggcaaggggcacctgctccgagttcccacagggagaggctcccgtgatgagctctgcagggctttctgctcttggacttgcagttccctgctgagtttaagcttaggacagagctgcgtgttctcccatcctaacagcatgtgagacagagctgcgtgttctcccatcctaacggcacgtgaggagcctctgcagagctctaaaaaaaatacctggcaccaccccagaccaatgacatcagaatctcctatctagggcctgggtacagccagagtaggggacccacagctggaacagaccactgcctgtgcagcggtacagaggagagtctcaaatcctgccctgtggcctctggaatgtgatttgggctgtcacctcccctcctgagcctctgttttcttatctgtaaaatgagtctggaaatgtctgtaagccaaggagtgccctgggcatagggacaggccagagagcctgtgacccctcatcttgcctccaccaggtcctttctgcagtaatctgtcttctgtattgaatttcttggtagaggtttatttaagaaaagggtcccatagctatgatgaggtttaaaaagcccctgacccgggccttccctccagctgtcagggacaaggtgcttagggggatgctggagaattcctccagggagcccaagatgaaagcactgtccacctgaagaaaagtgggctgtcaatgctgccacctgcctgcctgcgcctatcacatgttcgccgatcacaagttctgaacatggcggcttggcaaacaggtgccactcagccccacccatcccccttagtgacccaccagaatcccaggccccctgagaataagtgaagatgcaggaggcagagggtgctgcagacctcagaggagcctcttcagagtgaagcagaggggaaggaaagggagcggacacccgggtcaggcgacagcacacacagagaaggaaagcagcaccctgaaggtattcctgccagatcccaagcctcacacatgggtgatttcctttgaaaaactatcagaggctgggcgtggtggctcacgcctgtaatcccagcactttgggaggccaaaggggggtggatcacaaggtcaggagttcaagaccagcctggccaatatggtgaaaccccatctctactaaaaatacaaaaattagccaggcccggtggcaggcgcctgtaatcccagctattcaggaggctgaggcagaagaatcgcttgaactcaggaggcagaggttgcagtgaaccgagatcgtgccactgcactccagcctgggcaacagagcgagactctgtctcaaaaaaaagaagaagaaaagaaaaaccatcagagttataattaaagggagagctctacacccaggaacagaggcttgagatgaatggccaccacagagatctacccgcagtgttccggggctgagccatctgtggatttcacagcaagaagcttcctgccacaagcccagtccccatagcatcggccaggccccaggcagggccagcactgcctgctgggtgtcacagtcattactgtcatcaccatcatcactagtgatgttatgacaacagctaccctttttttgggtatgcacaaagtgccaggcacgtagatcgtgttttctcctggccagttctccaggcaggaactactatatgcccactttacaagtgaggaaactgaggctcagagaggctaagtgacttgcccaaatccacacagcaagatcaaaacctagactcagaccaggtacacacctataatatcagcactttgggaggccatgagttccaaaccagcctgggtaacatagtgagatccttgtctctacaaataattttgttttgttttgttttgagacagagttttgctctcattccccaggctggagtgcaatggtgcaatctcggctcactgcaacctctgcctcccagacgattcttttgcctcagccccccaggtagctgggattacaggcatgtgccaccacgcccagctaattttgtatttttggtagagacgggtttcaccatgttggtcaggctggtctcaaactcctgacctcaggtgatccgcccactttggccttccaaagtattaggattataggtgtgagccactgcgcctggcctctacaaataatttttttttaaatatccaagtgtagtgacacatgcctatagtcccagctactcaggaggctgaggcgggaggatcacttgaacccacgaggccgagtctacagtgagtcgtgtttataccacagcactccagcctgagcaacagagtgacacctgtttcaaaaaaaataaataagtaaaacttggactcaaatccatgtctgaaccgagccagctcctacctgccatgtcgacgctctccttgtccccctaccttctagagcccttcacagaactggggccagtgctgcgagggttagcggctgtccccctggagctggtgggagaggagcttcagccaaaggaggaaggacattgctcttgtatcgataaagccactgacctctccgtatctcgaccctgtgcccggctcctccgcgcctggatccccagcaccagctccagccccaaagctgcgaatccactgcctctgagcctggccccactagagacagctggattgctccatgtgccggactcaggacttagcgaccccttggccgggtctgctccagctgagaaaactgctctgctggaaaagtcggtttagacttccagcccccatcctgccaggcaggtggggaaaccccaatcccaactccaggaactgcaaaagtgcagggaggaaggttgagcccagctcccggggtggctgttcagatggctgccatcagtcagcactgggcactgagctacctgatgtccaggccacgtgggcccttcagtcccgtccccatctcccctggcctctcctgcatctgcactccctttggggcaaagaagtctggtgagggcaggaagccagagtcttaccccccagggtggggccacctccccacacactcctgggagaggcattggtcctcccggctcggtgcttgttggtccaccacctctatcctgagtctccacaagaagctcacaggctgggaagtccctcagcctcctgtccactctccttctgtccttgttccctttctcttccattccagcacccctggaagagccgcctcgtgcactctgactttagggaaacaaaagcagaactctatgcggtccactccctgggctgcaccatagtgagggggagctaaagagctcagaacccccgatgggagcagggggtctggcgggggcagcctggcctcccttcccctcctcctcccctactcatcaattcgccccaggagccagctccccagcagtgagagggctgccctcagggagggcctgggtcctaccccttggccccacccaggtcccctctgcacccacgggctctgacagcccccctgcctctctcttcacagtccatggcatcaagtggacctgcagcaatgggaacagcagctcaggcttctcggtggaacagctggtgcagcagatcctcgacagccaccagaccaagccccagccgcggacccacaactgcctctgcaccggcagcctgggtgagccggggctcccggggcaggcgggcgccacggggacagaggggccctaccaggcagccgtcatggctgtcctctgtgggagtagccatgacatctagtgagggaggagggggacagtcagggactgggcgacaccaccgcacccagcacagacacaaggcaggccttccgcctcgtcctgccctgcaactggctggcagtccgctctgggcaggagggagcagtgtccagagggacagcttcctccgtggggcaagaactgggggcagcagagttggggaagcgaggagctctggggctcggggcctctctgttcaggcccacactcttgggcatcctctgccagagggcactggggtcttgagggagacgtgccctgcgtcagtgacaccacgcaggcgcaacctctttctttaacctctgtctcctccaagaacatgaagcgtcccgcgctctccttcctaatgtgtctgtttttctgataatggtatttgctctttgaaatgtgtgttctccactccccaggctgacttaattagatagtcccattagagggtcgtgtcacttctctacgcagtcttggtgcattgaggagtcttggtggtgaggccataacaggatcagggagaatttgccctttcatcaaaagtaaagtgacccttatcagatgaaatgaaaatggtgaaaatatccaatgggagggagagaaaagccgtcctggctgccggggctggaggagctgccagggaggctttgccaagctcagaaacgttcggctcctgaggcttgtacgtctgaaatgaggagcaagggctctgtccctacttaggacctagaaggatttttgtaccccagagagctgagggtaggcctgggcttaggtacctttccgcctctggagcagggtcgagaaccctctttggtcctggggcctgagagctggtcccgagactgcatttccatcacctccccattgacctctggttgccaggccccaggggtggctcctcactggggcatggcctgagcagctgtgggaagttggggaggggaggtggggcaggatacgaacgtagccactctcaccaggctgatcccctcttgccagcaaaagcccttccagatgagtggtatctgtctctgatggcggaggggactttcctgggtgttgacattctctccaccttctccttcccaacttcccatatgcttcctatttgaaaagagcatcaaggccaaagcccctctgatctttggaggagggtcaaaggggcgtgggacggcccccgggcttggggtacgtgtccaagggctgagagtctgtggcctgcctggggtaccgggcctggactttgccagggaccccagccgctgtggggcaggtccaccacggtcctagctctgactctcttttgtgtgtgcatgtgtgtgtgcacatgtgtgcctgcgtgtgcgtgcgcgtgttgtgttccgatctccgcaggagctggcggcagcgtgcatcacaagtgtaacagcgccaaacaccgcatcatctcgcccaaggtggagccacggacaggggggtacgggagccactcggaggtgcagcacaatgacgtgtcggagggcaagcacgagcacagccacagcaagggctccagccgtgagaagaggaacggcaaggtggccaagcccgtgctcctgcaccagagcagcaccgaggtctcctccaccaaccaggtggaagtccccgacaccacccagagctcccctgtgtccatcagcagcgggctcaacagcgacccggacatggtggacagcccggtggtcacaggtgtgtccggtatggcggtggcctctgtgatggggagcttgtcccagagcgccacggtgttcatgtcagaggtcaccaatgaggccgtgtacaccatgtcccccaccgctggccccaaccaccacctcctctcacctgacgcctctcagggcctcgtcctggccgtgagctctgatggccacaagttcgcctttcccaccacgggcagctcggagagcctgtccatgctgcccaccaacgtgtccgaagagctggtcctctccaccaccctcgacggtggccggaagattccagaaaccaccatgaactttgaccccgactgtttccttaataacccaaagcagggccagacgtacgggggtggaggcctgaaagccgagatggtcagctccaacatccggcactcgccacccggggagcggagcttcagctttaccaccgtcctcaccaaggagatcaagaccgaggacacctccttcgagcagcagatggccaaagaagcgtactcctcctccgcggcggctgtggcagccagctccctcaccctgaccgccggctccagcctcctgccgtcgggcggcggcctgagtcccagcaccaccctggagcagatggacttcagcgccatcgactccaacaaggactacacgtccagcttcagccagacgggccacagcccccacatccaccagaccccctccccgagcttcttcctgcaggacgccagcaaacccctccccgtcgagcagaacacccacagcagcctgagtgactctgggggcaccttcgtgatgcccacggtgaaaacggaggcctcgtcccaaaccagctcctgcagcggtcacgtggagacgcggatcgagtccacttcctccctccacctcatgcagttccaggccaacttccaggccatgacggcagaaggggaggtcaccatggagacctcgcaggcggcggaagggagcgaggtcctgctcaagtctggggagctgcaggcttgcagctctgagcactacctgcagccggagaccaacggggtaatccgaagcgccggcggcgtccccatcctcccgggcaacgtggtgcagggactctaccccgtggcccagcccagcctcggcaacgcctccaacatggagctcagcctggaccactttgacatctccttcagcaaccagttctccgacctgatcaacgacttcatctccgtggaggggggcagcagcaccatctatgggcaccagctggtgtcgggggacagcacggcgctctcacagtcagaggacggggcgcgggcccccttcacccaggcagagatgtgcctcccctgctgtagcccccagcagggtagcctgcagctgagcagctcggagggcggggccagcaccatggcctacatgcacgtcgccgaggtggtctcggccgcctcggcccagggcaccctaggcatgctgcagcagagcggacgggtgttcatggtgaccgactactccccagagtggtcttacccagaggtaagctgccgccgctgccaccacctgtcacctcccctcccacccacctcgccagcccctgcgccaccctgcagctaagggatgcctgtggctgcccttcagaggaagctctggaccacaaagatgatgctttcccctccttgtgtccccacggcgcttgaacacctccgtctttcacgcagtggttctcaaacttcactggggcaagtagctttaaagtcagggggtctttggccgggtgccatggctcaaacctgtaatcccagaactttgggaggccgaggcaggaggatcatctgagccaaggagttccaaaccaacctgggcaacgtagtgagaactggtttcaacaaaatattaaaaaaataagccaggtgtggtggggcctgcctatggtcccagctattctggaggctgagtccggaggagcacttgagcccaagaggttgaggctgcagtgagctgtggttgtaccactgcactccagtccggatgacagagtgaaaccctgtctcaaaaaaaaagagagaaagtcagggtatccttggaagcaaaatgctcccccagctccagccagagtcgtctgccgtttctcaatttatgtgttgagtccatctatgttttgctttgctttttttttgaaaaggggtcccagggttgcttaaaaaaattcaaaagtcaccattggccgggctcagtggctcatgcccataatcccagcactttgggaggccaaggtgggtggatcacctgaggtcaggagttcgagactagcctggccaacatggtgaaaccccgtctctactaaaaatacaaaaaattaactgggcgtagtggcacgtgcctgtaatcccagctactcgggaggctgaggcaggagaatcgcttgaacccgggaggtggaggttgcagtgagtcgagatcacgccactgcactccagcctgggcgacaagaatgaaactgtcttaaaaaaaaaaaaaagaaagaaaaagtcaccatcatagatcgtctacatccactgccttcaccctacttctctaagccaaacaaaaccaaaaaccaaaaatctctctcaaaactgaacagggcacagcttctgaagagtcatcctgaagatccttcttaagtaaacctggccttctgcaaaattccacacaggtcataggacgcaggattccaacgtgcaccctcccccagcccccaggccgcctcagctcccggggatctgactttgagaaccactactccaaagaccaaagcatcttgcctgagggacacaagcagtagaggaatctctgctttttctgtagagcagaatagcacaggaaggggacagagtggcccaggctttccctaaataacctagtgcagacaagcacgtgcatcctgacctctacccagcccatctgggtgctcagggaccagcacatgcaccacgggccctgattggacactgcctgggaggtggctgcccacggcccactcggctggagaacaccaaagaagggggctcatacttcctcacccttcttccccgctggcaaagctaagaaaatctgtgtacagacacccccagctctcccatccccgataggaagagcccggaaggatcagactgggcttcctcttggtataggttggtgtgaccgtgtttctgacccccctgctgttgttgttttgttttgttttgttttgttttgtttttgagaaggaatttcactctttttgcccaggctggagtgcaatggcgccatctcggctcactgaaacctccgcctcccaggttcaagcgattctcctgcctcagcctgccgagtagctggggttacagacacaccctgctgcatccagctaatttttgtatttttagtagagacggggtttcaccatgtttcccaggctggtcttgacctcctggcctccagtgatccgcccacctcagcctcccaaagtgctgggatttcgggcatgagccaccacacccggccctgacctcctaatcttatcagtgactctgagctcaatggcaccttcggagtgcccaccacaccccccaccccaccccatgaaggccagttgggcatcttccccgtgccccctgaccctgggcttaagaaagcgatgcaaagggacagggaggaggccaggatcagggtgcggggggacggtcagagctgtcttctggtcctggctccttgagacctgactctctggggctcagtttccttacgtgtaaatggctgagagggggtggcctcgaggcactcccagtcctaggacctgggagatttggtcctcgggacacttagaggcgccctggagcccttaatgtcttgcagaagccaggaggtgggaggagggtcccctcttttcccgaggtcctggcctgtcagacaggccctgggctgggtgcagacccacaccccagcctcctgggtgtcctggcgagtgggacattagcaggcctgactccttctgtcctttctgggcctgcagttcagcagctcgccacacgagggcggcccaggaacaggaacgcaatggcagcctggcagcctggcagcccagcagagggagcggccagccttgcttttccagaagccctcaatgcttccagttacccacaaccaaaagctgctgaaattcagcttgatttggaaaatgcgcataagccacccagctaggccctttggggccccacctggccacacagtgaggcctcagaggttgtgaagggccccttcctccttgctgtcctctcctacccaggccactgtctccacaccacagcaggggtgcccccatcctgggttctacaggagagagcaccttctctcttgacacttctctccctttgtctggccctcgtcctgtcccctccctgccagcctgtctgtgcactgactgcatcaggagtccaatctggccaggttctgccaagctcagggagggctctacaggcaggctcgtcggcctgggccctacttcccagtctgcaaaatggggtttggctaaacggttactcagcacccccacccagctctaaacctcaatgcatctacctagcaggaatgcgatggccggggccatcctgctgtctcttctctgagtggccctccctcccacaggctgctcccatttctcctatctctgtccaccccttcacctccagctgcagctggtcaccaacacacacacacacacacacacacacacacacacacacacacacccaccacacaccccagaggcgtccccctatgccccagcatctgccctggctgcatcagacatgggccctttatctcaggactcagagacctcagatggcatttcgtgccccctccccacccccaaaaccctcctgcgtcatctcccaccactgacactcctgctgcagcagcagaagagcctgcaattacagcctcaggcacgcgcgtcaccaccagttcagcgcagccaggcgggctgttgccatgggaaccatcccttgaatggatggatgctgagctgtcctgcggcggtttccatggagaaggtcctgatgttctccagtaatttctgcagttctttgttcccggcagcagccccagcctcatgctagcagctgttgattgcggttattattttttccctttttctcacatggtaactgtctgtggccttttgaagtcactgctcttccacttcccaggatcctgggggatggtgccctgagctggccttctggtgcttccagacatcccaaagtcaggctccacctgtccgccggcactcttctcagccaggcacccactccccccaatgccccgccacttccacggagctgcaaatatccctgggcatcagaacaagggatgctgtggtcagaagggcccctagcaaggagatgccacccagagaggctgggccacttgcctgaggacacacagctactgaggcgcaggagcaggcctcctgcttttgtttctcggtcctgagctctctctgctgccgtagcagtaaagtgacctcccaggccagagccaggctcatgcaagagcaggggtggaatatgctttccagcctgggagagccccttccgtggaagaagtctcttttcctggctgggcaatgggaggagctacttccacctcatccctggaaacactcactcctgctgcagatgccctgggccaggcctgggttccaggaacattgtggggcgcctagggcaggctccttgtagaggccggggcttcctccagggcaggggtgggccagggcccaggagaggccaagcaagaatgagtgactgaccagtagggagcatctggttggcacggagttggggggtagggaatcacttctctggcctggagcagtggggaaggtgggctcacagcagctcctcacccccacctcccaggctccagcctgcctggcggccttctccagcctggacactaggtggtgctctccgccctgacctagcagctctccgccccactgcagggaaaggtgtttactggtttgggggtggggtggatggcgcctctggggtgggtccacccaaggttagccaggagagtccgggaggccggcacccctaccttcctcatccccagggagagcctccctctactcagtgaccagcccctctcctcggctaagccgtaagtaggggacctccaaggtgccgtccacctcgcacctccctctctcatcactaagcaggacaatggccatgaagcaggactgcccgggccccggacatgaggccaccctcctcctccactttctgcagcagccccaggctggtcggaacggggagtcagggagtaccccagcccttccgatgctctcctgcccctgggcgccctgggaggttcctgagggtggggtcctcccccctggagctgaggaaggtcattcgaggctgctcccagccaggctgcatggtcactgcttgcttgtgggaccccaggctagctgtgtaggcagtgacacagactcaaggacctttgatagcacagggttgggggagggggcagatgctcagccccgttccactcccagccccaagctctgagccccaaactcagctcccagggcagtctctgagcgtctccttcacttagctcctttagctcctctgtttcttcatcgggctcttcagcccgtcctgctccagcccctcaccttgccatccccacagcctggggatcctgggtctctcctcaactccctacaagaacttctggtccctgggctgacacggagatgctcaggcctgttttcaaaacttggagttccctcagtctgtccacaagtgaatgacggagcaagtcccctccctgccctcggcttccttccaggccatttctcaggggcatcgtaggctgaaagggtttgcaaaactctgcactccctcctgcctggatctgcgagttacacaaaagggagaaggtcaggggttggagctgccggtcctggggcttcctgaggggctggggaaggagcgccttgggctctcctcttgctgtagtcctggagctgtggttctcagaagtcggggctcactgcaatccctggagtgagggcctgggaatctgcatggggcgaggggtacagacccccatctgagcagtgaagcctcaggggggcttccccatgctgcctcccacagtggctcacactccaactctgttcccctctctgttctctgcagggaggagtgaaggtcctcatcacaggcccgtggcaagaagccagcaataactacagctgcctgtttgaccagatctcagtgcctgcatccctgattcagcctggggtgctgcgctgctactgcccaggtgagaaagccgccccccaggcccccaaggtgagtgtgatggcctgaggagcactggactcggagttggccttggggtgaccttgagcaggtcatgtccttactctaggcctcagtttcctcggctgtgaagaagcggatccccgatagtctattagaacgtcacctcctttggctcagggacctaatataggacagggacacaggcacgcttgactgggattttgaagcgaatgtgatgagagcacgatttagggcaggaataagccaggcccaggcgatgtatccaggactggccacagtgggaagcggccaccaccctcagcccaaagggtgactagagctggtaagagctggggccagagaccacctctgcagcaaggcggcctctctgcacctgcccgtgcctcccatggcccaagccaaccagaagccaggagagcccaggcaatgcagcccacacacaggctccatcctcccgagggccctgggcagggggcagaaggctggagaaagcctggcaggggcggagggagatggggtggtgatgggaggtcaatctaacaataatcagcacaaatgcctttgagaatgtaaaacagagccatctaccctgtgcccagaaaaggtgcatataatttgcttccaatttcaggggctcaaaaatcccccaagaaacccttgggacagcctctgtgctgtccctgtgcctctgaagcccttccccaggctccagcattatctgcttagcacggtgtccctgtctggtcaacttgtcattgatctctggccatcactgcttccccactcgcctgtcccatggggtcagggactatcttcttgatcaccatagtatccccggggctggcagagtgccggacatgtcacagagggggatggagattgtgacggaatgaatgagtctccaggcatctgaagcctgtttctagagctcatgtcttctgctcctgggctgttgctggcaggactcccttggctgccccatctcatcaccaccagccctcaggatggcctgtccagtgagccctgaccataaacaggaggggggtaaggatgcaggggtgcggaacggcagggagacccacccctgtcctctaacgtcagggagcctagaaaggagagaagatgctcagtgtagaagactgggggtgaggaggaaaggtacggggtgggagtacagagctggccagtgctaggcaggccccagggtgtttctaggttccacccaaggtggtccagcctgagccttggctgccccagctgtctgccaccaccaccccacccttgaaccatgcccccaggctgggccagctgagtcccaccacccatttctccttttctccttctctctcaggctcttctttttgttggtttttttgttttgagatggagtctcactcttttgccaggctggagtgcagtgatgcaatctcggctcactgcaacctctgtttcctgggttcaagtgattctcttgcctcagcctccctggtacctgggactataggcttgtgccaccacacccagctaatttttgtacttttagtagagatggagtttcaccatgttggccaggctggtctcgaactcctgacgcaagtgatccgcccaccttggcctcccaaagtgctgggattacaggggtgagccactgtgccccatctctctcaggctcttcttgcagccaccagagcagaaaacccctgctccacagctggctgcacactccgcctctgcttgaacccagcaccatcttccccaaaaagttcccaggagccagtgcagcagcccaaggtgcccaccccaccccctgctggcccagccctcccctcccagcccccacctgcctggctccagaaggcccacctagctgccctgctcggcctggagcacagccagccggggtggcagccaggccgggtctgcctatcacagctcagggctgtgtgcagctgatgggaccccggcccggcgggagtggcggggagggcactgtggaattaaacagtgcacccatcatctgctgccagaatgcgacttgcctggcctataaatagatgccacttcctgtacctggttctcgcctggctaaggaccagggcagggctgcttaggtctgctctcagttatctgacccctctacagaaaaagaaaggctgggctttgtgtggccccggggctggagtcagccacactcgggtccatcccagatcagccagaaaccatccctgttgctggagctcagtgcctgacctctctgggcctcagtttctacagctctgaaaactgcctgccagcagggcgagagcagtgagtgagaggaggtgtgtgaagcacctggcccagtgctccattcctgaagggttcccattaaggaggccttcgctcttcctttcccaagggggagttcggagagggtaccagggcagtttgggtctcaacaggcagttctcctggtcctggggcatttctgggtccccagagatggcaggtagagtctctgcccaggccactcaccctcctagctgttcaggctcattatatgagccataatgtgtctcggaccaagggaccaggagccacaaggctcaaggcacactgagagctgggactcccctgctagagccagcactctgtcttcagctaactccacaaagggggcctcctttggacatctctgctttgaggcccaaattggaacacattgctctgtaaaacagcactggatgtattaattcattcattcatttcttcatttgccaaataacttttgagtagcccctgcttgctctgcacagagtaggggcctggaatggagcaaacaataagacccagcttctcaccgggcccctgatcgtaaggggctctcggtccagggaggagtgcagtgcgcaaatgaatcactgctccggagatgacgctggctgcttggggacctcatctttgggtctccccagaggaatctgaggctgagctcgaaggatgaacacttggaagtcagaatcaaactggcctcaccaaaaagagaggctcagaggcttatgagcacaagccaggaacgacacgggaggagggggcactggcaacacagttggccaatgcccacccgtctcccaacacacctgcccaagcaaaacagatgagcagggtcctgccctggcagctcccacaccgtcacaggtggcaggagacacgcaggcactgagtgtgtcttctgcaagactccagggtgcttcaggggcaggagggagcccaccaagttagggcagtgagctgagggcagtgagcagcagtgagtgagaggaggtgctggggaaaagaggcgactcaggcttgggagaagataggggaatccaccaagaagactctactggccagagagccctactctggattcctaagaggtcaccagaacacaaaagatgaaattcaaaatgaaagccaggcacagtggctcatgcctgtaatcctagcatgttgggaggccgaggcgggcggatcacttgaagtcaggagttcgagaccagcctgaccgacatggtgaaaccccgtctctactaaaaatacaaaaattagctgggcgtggtggcaggcacctgtaagctagtagggaggctgaggcaggagaatcacctgaacctggcaggtggaggttgcagtgagccaagatcacgccactgcactccagcctggaagacagagtaagactctgtctcaaaaaaacaaaaagcaaacaaacaaacaaaaacaacaaatgaggtgtagaattgggtttcaaaacaattcattcaacaaatagttactgagccgccataacatcctgggcactgaccttggcactaggcatgaagattaagacagagccagtcccagctctcatgagctaatgttctactgcagggagacagaaaacaaacaaggagaaaaagaaataaccaagataactggtgaaaactgtatcccagcagtagaatatggtaataaggtcacctgggaagaaggaggttccttctggaacatggatgagcagaggcctctcgcagactgggacctggatgatgggatggagccagtcatgggaagtgggagaagcatccaggccaggtagagggtaggggaagtgcaaaggccctggggcagaaagaggtttggcaacgtggagaatctaaagcctgagaaaggcactggctgcaggatagtgagtggggtacggggagctgaatacagtaagactggagatgatagcaggaactaaaataaatcgtgtccatctttctgcatcataggaaggagtttggtttgatgttacttgcaatgggaggctgttagctttaagcagggagtggcttgatctaaatgatgtctttaaagatgattctgggtgtgtgggaaagatgattctaggttgtagggaggaagaacagaagcagggagaccataggaagaaggcagagggctgatctttccagatgtaaggagaagggctcccttgggcaccacactccccctggtttcctgtaggggtgctgggctgtggcccccggtgctggattatgggcctcccgacaccctcccagcaggagcgggtctcaggtgcgctgatgttgccttcgacaggaggctaatgaaggggtctaggcaacaaatgatggcggcatggactacagcatctgcagtggagatggagagcaatggatggacccaggacttgctgatggactgcatgagcggggaagggaagagcgagtccaggaagcttcctgggtgatggaactgcaggagcagggctgctgggctgggaccccggagaccacagtaggtcccctctgctccgtctctctgggaaggaagaaatgccttggagtctgccaccattccagcgttgctgcaggttgtgcacttgccagaagatggtggaagagcagcagcagttgaagaggccatcccccccgaccccaagctgggacacattgtcccagagaagccgtgagttctccaaggctggcccaaggaggctgctaagaggagcagccctgagcgggctccgatgggtgtaggtgctggccacctgccttcctgttggcaagccaggccaatctccagggcaggcatgcgaccacaagcttggagacccgcccagggatgccaacagagccatagcaggttctggacttggccggggctccctgcccaggcacctcggaggtcctatgtgacctccactgtggagtcctttggttcaggttgtggcctggagctgaggttcccagccagggtggaaaacacagaggaaaaacccatgggtccccttggacagtgactcccgaaggccttccctggggacaatggcaagatggctgctgccttaacacatccacccaggatggacagcggccaccggtcaatgagctggttttcccatcgggactgggatctgcatcagagtcctcggaggaaagatggagctctgcttgtcctagggagcggctggcttggacggcttcctcgactctataagcttctgaaaaccaagggcccacacagtaatgtgatccccacgcatgtcctccctggaagtctgtactggggaggccctgggtatcagtatctggtattccggaaaagcagggcagaaggcacagaacccagacatctgccagggatgaggcctggcggggcagtgtgcacacccaccattgcccacgggccacctctgtgggccacaggccagcccccaagatgccaacatgagccatggagaggcaacctcaacccaagagctgaagctggtctccaccgcaggctggcttcgtcttactcacagtgagaacatacctcgtttattccacaaatagagttatttgttgagccctgtgttggggccacagcagttaacgagacctgccagggccctgtcttccagagcttactgtcgggccactggagggaggtgcaaccttcacatcagcatccccagctcaacacccactggggctgagctggggccagggtaacagaggcacatctgaagctccttcatcggggaagcagaagaactaaaaatacaagggatggctggctgttcatcgagtcaggacaagcttgtaggaataggtgaaacaaaataagcgcaaataaatccaaagcaaattttgtacccgagccccacccaggaaggatgggacaagaggggaagtcagccagccatgaggcagggatgggggccattcactcattcacttgttcagccagtctgtactgagcacccagctcctgccctcactcggaggacaaagcaaaggggcagttacgtacctgggagtgatcacaggacagctggctgagtctgggcgaaccaagaaggttcctagaagcagcattgtgtttgggcctcgaatgagcaggcataggctaccattaaggagagctggacattaaccaatgaagggtagtggggaggggacattccaggccctgtgtggttcaccaggctgtaggtacccacccatcccttgacctggtctttttctctcgctttcagcccatgacactggtcttgtgaccctacaagttgccttcaacaaccagatcatctccaactcggtggtgtttgagtacaaagcccgggctctgcccacgctcccttcctcccagcacgactggctgtcgttggacggtaagaacagtgcttgggtcgtcttgccaggcaccaagggagagggatgcttggggactcttgcacaaggtgtgaaagaagagtaagcacccagaaaggggcaggaagtggtgccaatgtgagcaaaggaaggccgactgggtctccaccgccaggctgagtgcctatgctgtcagccatttgtgtctggacactggctggccccaccctcaatctcagtctctccctgggacagactgaaaagtatgtgagtgtgggcctgtggctggcacgcctgctgggctgtctgagtggccaagcaagcccagggcagctaagaggctctggcgaaggaccccaggcagcaaggtccaagcacccgctgtgcccctccaggcctgtttccgcgggctcctggaagcaaaaagggttcccagaggccatcgccaagccccaagcctctcgagaaagaggacggggaggcagctcaggcctgggcttctttcgaatttgggggcttgcttctgccttttggggctaaccagccaaatcttctcctggaagccctcaaataccctcaactccagcttcttggctgattttaattccacctctggcctgtacggcgtctgtggcaagcccaggatcacgactgtggcagagggtagagtgtcagggaccccagtgggcttcaagggagcaggcaggacctggtggtcaaggagaggcagggactccaagagctgccagccttggccatgggggtcggtgagtgttggtggttccccttggggtaccaggggctctgcagagaagagctgccaaaggcaggctggggacgccagagccagaggctgccatttcccacctgggcacacgtcaggaggcccagagctagccaaggcctggggggctgagcccagtacactggggatgcggtaggagggatgcctgtccataacctcagtatcaggtgagcccacagaggtgacactccatggggtaccttgctggagaccttgctagcccaggatgttgaggtctgggctaagctgagcctgagccccttgcaggggtgggttctccaagcaacaccccctcacgcaccccgcacccacagctggccttctgggtctcacctctcagactgccccttgctgttggctgctggaggatttctgggcttgggtacatagttcatttcctgaaccacccagtgtgtaaacctcagccttatcccagtccctgccccagccgagagagagggtgccgacagctgccctggctggtgaaccctcaggagacaattccctggggtggctttgggtcttcaaaccctagcatgggctgccctggggcaccgagctgcccttggcagcatctctggctgaggccggagccaggcagagctgtgatgaccacccacaggatgtaacaaagaagggcagggtgaccaggggctcccgtttaggaaatctggttttagttttgcagaacaaatggggaatggagtcaggaactctccagagctctggctctccctgagtgacttggccggcctcactagaatgaacccaaggatgctgggaccactgtaggaccctgcctggcagatggagccttttcagagagcaaagtcacagtcaggcagtgccccagagctcaggacacatctgcaggccccctggaaacccagagagccagctgtaccccagaagctacggcacgggaggatgctgccatagaaaccggggggaaggggagccacccaactgcttcatgacagacacaccccgggacctcggccaccccaggcccctcgagatgggcctgccgccaagctgggcacctgctccctagctgcccccccccccagaactttgagctctgaactctgtgggcctccaagttgaaataagcacccctgcacctgcaggatacacaggagggtgacaggaattggggcggcgatgacatcaaggcctgggcgtccagcagcatcgcctctgttaccaccagccagggcacagctaggggaacagtagctccgcagcttggacccccagctcagagcgccctgctgaaccagaggggaccagcctggggtccacctcggcccaggggccctgcagagagcagatcagggccctgaaggacgctttcctttggtctgggccagttgtcctttcaaggaatgagtgggaggcagggacagaggaactgccagaccccacctggctggggagaagcgggtcttccctggctattctttttccccctaaatgaatacaaggcactcacccacccaagggcccagccttcccagcctttcaccagcttgataaatactaagggaggggaggggaagcagcgccgcagtcgcagcgcaaagggggccgcgggaacagctagtcgggagcgcgggggtcccgggcctctggccagccacggggcctggccatgaactttgcgtccgggccaatgctgcagtggccgggcggtggtgagccttccgttccccgcctgtccctcccggcccctcccctcggtctccgcagcttctcggctcagcccctcccgtccccgcgggcgctgggccgattctccctccgcgctggccaggccgtggagacgggttcgccgcggagaggggaggagggctggggaaggggtgggcgccaggggactgcagcgcggagcaaactggggcacggctgccggcggcgcgcgtgcacacactctctcccacgcgcgcgccctcccgccgacgcgcagccgcaatgcggggcccttcgcggaactgctggcggcgccgcgccccgcggggtctggggccccagcagggactgcgaggaccgcgggactaggaaggcctgagcccggccacccgcctccgagtgcgccgcaccgtgcggcggggaccacaggccttcggtgggcggcgagccctggctccctcgttcggtggcctctgctgcatgtgggatgcgccctttgtcccctctgccatgcgcgggggaaaatgtttgagggcggggaagagactgtctgccctcatttgatctaaaacatgaatttgtttgcttggctaaaggccgggggggggcgtgggtccggggcgcagagaacacgcgcgcgcgcgcgcgcgccagcagcagcagcagcagcagctgctgcggcgaagtctttgtccccgcggcgcagcctttgtccccgcggcgtagcttttgtttgcgcagccccgccctgcggagggcgatcgtccccacgttggggccggggggcagggacccgacgtccccaaaatctcagctggggcgcagccatcctgggagagaccgggcgtggagatgggggaaggtgggaggaggaatcgcagccttctggatcccggagctgcagcgcctcccccagacctaggggtcttcccctcccttcccctgcgccccactgtgagctccagggtcaaaggccctgtctgctggacccccatcacttagcccagggttggcacgtggtgggctgcagtacatatttgtgatatgaatgcaggcacacgtgaatgagtgcaggagggactgtcaaaaagctgaatccaactagtggtaaggaaggtttcacagaggaaacgacccccttggtgagacctgaagcctgagcagggttagcccgggaagagggggcatcaagggtggcaggagagggaatgagcggctgcctttaacccagggtcttcgggaactgccgttttcaccatttctcctccacccacaaaggtgcggattcagaacaaatttcctctgtcctgacctgaccccaggccatttgcacaggaccccagggaggtctgagcaggccagctcttcatacaaagatgcaagggggacctcttccaggctagaggtaggcaggcaatggggtttaccctggagacccactggggaggatctctgggaaatgtcacttatacctgtgataggtcctatggatacaacagccagggccgtgctgaacttcaagaggatgctgtctgtgtagatttggcctcgcctgtgcctgtgtttacaaagagaataaacccaggcagttcaacactgcagccctggagctgaggggatggggcgggccctcttctggccaaggacactgggacacctttaagtgacctgggtccctagaagagaaggtgagcggaatttttgtgtgcctctttcttgtcttacagcatctgattctcccccaaggccaagttgagaagatttagggtaccctgtccccacccccacctgccggcccttcttggaaccccactaagccgcttagacttagactctattttcagtgcttctcaggcaactgagcctccttgcctgggtgagaggattggagtgagacctgcgtgcagctcccctgggcttggctggtctcctgggcaggcccccttctggcctcaggggtgaggggggaccctgtcatctcaggcagagcggggagcatggactaaaagctcaaacttcattatccagttgcctgcttcctgggcaagcctcagtgtaaggtgggtgagcccagacagcttgcccctgcagctggccagagacagacggggttatcctgtgacttctggggcagcctggccctggggtaggtgtctgggaagactgagagcctcgctcctgtctaagcaagtggagagaaggaaaggcctcttggtttggccttctgatccgtccacgctctctgtgctaacagatggaagatgtgtctctggggcagcccctagctctgcccccacttcggagctgccaccttaggtgtgagagggcctgtccctggcatgtggctgtggtcctgctggcctttccttgtgggctgattctagtaccagcctccacccaccagagctgggagatcacacactgtcccagagtccaggggtacattccagggacagtgggaaaggccattctagctgggacactggtccctgggaggcctctgggtgcttcttcctccaatggcaacactccagggctttctgctgagtgggcctgggccggccgctcctaggctggctccctccctcagatccacccagcccacctccgagcaaccctcagctggcccatgaacacatcgcatgacatgggatgctgtaagagaacatacacagagttggctgggtgcggtggctcacgcctgtgatcccagcactttgggaggccgaggcaggcggatcacaaggtcaggagatcgagcccatcctggttaacacggtgaaaccccgcctctactaaaaatacaaaaacaaaattagccgggcgtggtggtgagcgcctgttgtcccagctactcgggaggctgaggcaggagaatggcttgaacccgggaggcggagcttgcagcaagctgagattgtgccactgcactccagcctccagcctgggtgacagagcgagactctgtctcaaaaaaaaaaaaaaaaaagaacatacaatgtacactgagaacacattccaaaggcatcacttgtcccagataatggaagacagaggagcaaaaattatttccttgctaaataatgtaaaatgcctttgctttactaaaaccaatacagtttgtattgtggagcagaatacaaaattcacaagaatttttcagattagacagtatgggtgaatggtcttgacttcaaagagctactttgaattacacccatagtgaaagactggaagcccccacctaccctctcccacctccgggagctctttaggggagctggagaagcactgacccaggggtcacccaaaggaagaaaggacgcccaccccaccgagagctttctggcatccacctggagtggggactggggccagcacaagctggttagcgcatgggcccctgggtacttctgtgcatagcagtaacaggtgacagaagcagctggcgtgagccggtcttgcactcgggacctgaggctgagtggcaggagtcacgtcctctccgagcccagccagtgccatgctccaaagcacagggccctcctcgtaacccgtctctcgctgtctgtggggcctccgtcattatacattgcggtgggtgtctgtcagcttgggtgcatgtgctccccaggcctgctttcctcagcaccgcagtgggtgggagtcgcatcagcatccagtttggggagcatcttagccattggggctcctaaggagccagctgtgctcctcagccaggaccaagaggtctggtcctcagatcctcctgggacagtgacttcctgccatttgcagctggagccacaccaagcagacctgtgtggagctcctctgtgtagcaaggagtgggtcaccttggagctgggtcccatccggcctccttggagcagtggcaaatggtgccctgcggagaaatggcctttaggaggaagcttgcctctcagcaaaggccgaggggcagcctttgccaccctgtcctggccgttggggcaggaagcaaagttgactctgtggaggacgccccaggactcgggcagatgcaggctcctctcccaggattggcttccctgccacctgcgggccagatggctccttccagagtgtgcatgactatggcagctcagaccctccaggggtcaagatcagccagctgttcctgtgactgccagacaaatgcccaccaactggctggcttcacacagagatgtgctctcacggctgtggagactggaagccagagttcaaggtcccagagagccgtgcccccaccaaaggcgctagggagggaccctctctggccacttgcagctctggtggctgctgatcatcgttatggatccatggcttgtggcaacagaaccccagtctctgcctgcactgtcctccctctgcgtgtgtctgtgtccctactttcttttaaggacaccagtcattggattaaggccaaccccatccggtgtgaacccgtcttaatgaattactaattacatttgtaatttactaattacaaagactccatttccaaatcaagtcccattctgaggttccctgtagacatgagcatttgaggaacactgttcaatgcagggctccatatcttgtaggcttagtccccagggcatggtcctgggcatgatcccagccgtcaggcctcactgaaggcaaaactgacccccagaaaataccagaagcctcctgagggtttgttgtgcacggggttctgccctaggtgttgtgagaagcgcagtgaagaagccgcgcaggttaggctccggggactccgcggtgtcggggagttcacaggcaccgtcccgcggtcacaggtggcatgttttgaggagttcgcaggcaccgtcccgtggtcacaggtggcgtgttttgaggagttcgcaggcaccgtcctgcggtcacaggtggtgtgttttgaggagttcgcaggcaccgtcctgaggtcacaggtggtgtgttttaaggagcatcacaggaagtacagttccgttcagtgtttattgagcatttactatatacacagcaatacgtatttagggaaggatgcagatatgggaaagatcagttcctggcttggaggagccactcacaggatgccctcctgttggaatgctcagggacggccatggggcagcaggatagggcggcctcccacagccacctgccatgaacacactgaccagcttggctcctgccgagaccacagcacatccctgtggaccccacggcctgattgtcttcattccacttgaggactcccagcccctgtgtccccattgatggccccttccccaggcgaagccctctggctctgggcagtgcgattctgcccctccctcccactcccctgcttgctcctcagtctccaagcttctccttccaaaattctctgtcatgtccccatggccggctctctcctgactactctcttctccctgcccacgctccctgagggcttcttcccagccagggctcgctctcccacctactagggtgcagggatggctgcccctctgtttgtcttcttggatccaggccatccatctaacggcctacagggcagcttgacccacgtttctcttgggcaagccagtaggtcccagacaggacaaatggccgttctttctgttttccccaacctacctctctgataacattcctgacccctgtggataatcccacccaaaaacccaggagtcaccccttgctcactccctccccgacatcccaatactagcctagcatgtttctttcctttatttctctcacattctctacttctcgccatcctctctgccaccaccttaattcagcccaaactaatcaattgtgcacgtcctaaccagtcttcccacctccttccacctgggctgcctggtcttccatcacctggtcaacatggactcggcatctgctgggtgccaggcactgttctgggctctggggaatccttattctcctgtagtttctattctagcgggggagaaagacaacaaacaagatgcaaaggaaactgtcagatgttgatacctgctgggcagggaacttcccctggatggtctgggagagggtaccagggcggctgctttataggccaggagaggtcagaggaggcctgtatgagaaggtgatattcaagctggggtatgagtgacaggcaggggccagccacagtaagaccgtggggggaatattccaggacagggaatcaggagcaaagcccccagggagagggcaagcctggcgcgttgggggagctgcggtcagaatagaggaaggggaggtggagggggttgcggggatgggagagggccagggggttcagcagaggccacatgggatgcatcaccaagagtagggggctgggcttttattctgaggtcagtggggagccacgggaggggcgttgccacacacaggtgtatgtttgcaagaacaccgcagctgccacgtggagaatgaattgtgtctccaccggcacagagactactccagggctcttgcgtccgttcgggcaagaggcgattgtggctctgacaaggccggaacaatgactcctgagggacagggtgggtttggggttgtttggaggtgaagtgaagggctctgctgatgatttgaatatgaagaacgagagaggacaatgagtaataatgcctagatttggggcttcaaccaccggaggaacagcaaaccatttcctgagatggagaagtctgaagaagcagcaaacccaaggggataggggaatctagtgttcagttttggtcacgttacagctgacaacctcattagagatgcggggttcacattgcggtctgaaagtctggaggccaatgagagatccagaatggagatgacgtttaggagtcctccgcgtgcagatggcgtttagcgccctaggtctgagcacgaagactccgtgaaacagcacagatgaagcagaggagaggctgcaggatcaagcacaggctaccctggtatgaggacaccaagcagaggaggagctggccaaggagggagggggacagccagtgcaacggagggaaaccagcaggatgtgacccatggaggctaagaaacgaaggtgtttcaaaaaaaaggacgtggtcaggcaggtcagatgccaagcagggagctgggtaagagccctccaagcagggggaggtgggtaggaaggtcctgaggcaagagggagctccacggatttgcagaattcagagaagtggctggaaaatccaggtgacacggcaccatacctgtctctgagctcagagtcacagccttccacagtgtggggtcagatgagaaagggcaggagcctcctggactcttgcctggcccaggagatcgcgtgcctcccactgccccatccactgctcgttcagcagaaggcaaggccccgtcccctgcttttcccatcttgcacctctggtgttggtcttgccaaccttttgataggtccgtgggccccaggagggcagcttctgtgtccctgggctcgtggagatgtcccacatctgttctgagtcccagagacagattccttcttcatggctccccgctggggagcaggggctccaggtgagccccaaagcaggaacaaactgtgattcacccccaaacactgtgttggtatcagacctggtggagacagctccagggccctgaccactggttgttgctgggtgcaagaatcgtgcagattcaccggaagcctgcctggcaggcctgctcaggcaattacgccccagctcctaaatcgattacgtcggactctcattattcctttttttttttttttttggcagagtcttgctctgtcgttcaggctagagtatagtggctccatttcagcttactgcagcctctgcctcctgggttcaggtgattctcctgcctcagcctcccaagtagttgggattacaggtgtgcaccaccacacccagctaatttttgtatttttagtacagagtttcaccatgttggccaggctggtctcgaactcctgaccttaagtgatccacctgcctcggcctcccaaagtgctgggattacaggcgtgagccaccatgcccagccggactcccattattctaccacagcatttggatgtgggtcagctgttccactaaaagcacagccttgaagaaaggcctcttggcaaagctgggaccacagagagaccggtcagggaatctggctggtccaggccagcaatgggctgacatccttagcctttactgggattgggctcccagaatccatctccctggaaaccaagggaggtgccagtctgtgtgtgcagctgccgggagaagtggtcctgagacccagaacacccaccatggagaagagaagacacaagtgctggttgggggctagggcagcctctgaggggatgtgaattcctagtggtcctgagcaaggtgagaggacacccttcccatccagtccaatgctcagcctctaactggggccaaggacaaagccctgtcctttcagaagctcctaaaaatacacatatctctgacccttctgagcagcccagcaaccttgtcccccacatctgtgacaccaggacattcaaaatagtctttgataggctgaagactggctccctccccagcagtaatctgctgaaactttgcacctgttgtgaaatcagagtcctttgttaggggaaaaacagtgagaggcaggtatgtgtcatatggaccatacttcatgaataacaggagactttttaaaaaatcaggccgggtgcagtggctcatgcctgtaatcccaacactttgggaggccaaggtgggtggatcacataaggtcaggagttcaagaccagcctggccaaaatggtgaaaccccctctctaccaaaaatacaaaaagtagccaggtgtggtggcacaggtggcacctgtggtcccagctactcgggaggctgaggcaggagaatcgcttgaacccaggaggcagaggttgcaatgagccaagaccacaccattgcactccaacctggatgacaaaagtgaaactccttctcaaaaaaaaaaaaaaatcagtggcaagccaggcgcggtggctcacacctgtaatcccagcacttttggaagctgaggcaggaggattgcttgaggtcaggagttcaagacctgcctgggcaacatgatgaaaccctgtcttgacaaaaaatacaaaaattagccaggtgtggtggcacaggtggcacctgtggtcccagctactcgggaggctgaggcaggaggatcgcttgagccctggaggttgaggctgcagtgagctgagattgtgccattgcactctagcctgagtgacagagcgagaccatctcaaaaaaaaaagaaaaatcagtggcagagggaaaacagttgatacaccaaaaacaaacggaggttgttcaggagttggaacttgtcccatagtccaatctcctcattcttctggaaggaacccaggccccaggaagagcagctgctggccccaagccatcgctgaatcgggatggaagtcacctcctgactccttctgcatgctctcctccctctgtctgcctccccttctccatcccacagccaaattcacccatgccccagaagctaggacacaaaggcagataagaaatgagccggctagtgggcacagtggctcgtgcctgtaatcccagcactttgggaggccgagttgggcgtatcacctgaggtcaggagttcaagaccagcttgaccaacatggtgaaaccccgtctctactagaaatacaaaaaattagccaggcgtggtggcaggcgcctgtaatcccagctactcgggaggctgagtgagacaggagaatcacttgaacccgggaagcagaggttgcggtgagtcaagattgcgccactgcactccagcctaggcaacaagagcgaaactccatctcaaaataagaagaaagagccagctgggagccctgggcggcttctgtgtggtgggttgtggtttctttggcgaggtcaagttttgcctctggtgtccccgcggagtgagctgacactctcccggcattcacactggcaggagagagggagcagtgacctggctctagccctctgctccctggccctcatgcagaaggaccagttctggcatcagcagatcgggaggtacccagtggaggcctcagagtgtctcctgtcataccaaatcctgagatgtgctggcatgtgggcaaggaactctaccccagccccacaccccatttggtggtcttgagaagagctggtgacatcctgcatcacttcagtggcaccaagctgcatcgattggtcttgagacacatggcagacttctgagccaccaggattgtttctttcagcaaaacaccttctggcacagagttgccaccaggagggacagcagctgacatctgcacatgcaccacctgccaggacctggccatgaagtactgatgtgtacccatgtgtagtgactcactgagactttccggcaacccgtgaggcccctgttccacagatggggatgctcagacaacagtgagtgggtggcgcagagagtcacacacagcagtgcgaccccatcatccgctcttgacctctatgccatgtgaggcttctggagcctcttcctgttgcacctgcactactttggagctgcctcccagggctagagcctgtccttgcttcccggttattcacgacaaccgtcagtggagtacccgttaggtgccaggcactgcgtcacgtgatgagtatcagaagaaatggatcagatgaggacctgcagtcaacgagcttcccgtccaggggaggaaacatccgaactgaccacctgtcttcgcacaaacaagcatttggggaccttatgatggaggatggtgacttctcgaggaggtctgggagggatttcttgaagaaatgacccccaaaccaagagctgaacgatgagcacaagttaactccctgaagagagaaggcaaacattccaggccgcaggaatggcacgcgcagaaactctgtggtgggagggagccatgaagccagtgaggcagaggggcaggcagtgaatcaggccacaggggctggagggaccctcagagccagggctgtgtgtgccaggctttatccccaaggagaggaaagccactgagggctcgagaggcagggacgtgaccaagttggcttctgaagaagcgcacatggcagccacatggagaacagattgaaggaggctcagagagggtgaggggagaccaggaaatcatcctggctagagatgatggtaacttggcagttctgggggcacagggacagtgtgagagccaccgaggagatggcatcaggaggtcttgtgggtggattcactatggaggctccatgtcattcaccttggaggaggaccagtcaggagttgagctgagtttaaggggcttttgggacatctgtgtgaaaagtcaatggcaggtgggtgtagccccagagctgagagagcaaatagacaagagagcgagagagagagagaaagagaagtctgaaatgtctgcgtggaggtggcactgaataaagcacatctgtgggtgtggaggaaattgataagcatgacaatattgctgagtcccaaggccaagaacttctgtcttaattatcattgtgccccagtgtaggggtccagggacacagtagggtctcgatgaaggtttcttcaagggagggaaggaagggagggaggaagggaaggaaggagggagggagggagggaaggagggaggtacagatggcctagtggtatcttcagggccattgtcctcagggctgactgcagctttaggatccagccacccggatatcctctctgacatcagaaccaggctgggtagggtgtccaggactaaccaggcagcgtcacctccctttgggtctccctgtcactgaacaagctccaggcaaatgacccaagaccaaagtgcagaagcttgaccctctgctacctctttattgaacctgccctgaggctgccttcagagcttttaaagggccacctggtgagaaatcctcccttcagctcactgaagctggaagagaaaggaaaaagcacttttcttcctggagctgctcagccctctctctaggcctcagagagggagggggtttctcaggccggtccttggcaagtcactacatggtaggttgtggtgcatggaccctggaggagagcctcatctgaccctctgtaatgcccctgacccagtcccacattagcctggtgaaggaaagaaagaacgaaagaaagaatgaatgaatgaatgagtgagtaggtgagtcggggccatgaaaacctccctatgcacaggaatcctgctgcttcaaaacacactggtgtgacagtgacagtaatgatcaccagccaggccccaggcctggtgcttcacatcatggccctgttgaagcctcccagcacccagcctcaggttgtcattcacaggcacctcacccccaaactgggtcataaactatatggaagaaacagcgttgataggtggcagcccgtccacccacctgtcattcagcagtacctgctagaaccaaggctttacccatcaaccaggcatccccccaccccccaggaactcacagcccagggcagggggcacacggaacaacacaattaatgtgaggagtgcttgagtgtccgggaggtgtgagaagccaggggaacccctctgtgcctccatctggagggaacacacttgacagtggctaattctctatcaaaactgtaatgtgtgctcataggagtgcccttcatatatagaaagaatgtgcaagtgttaatgtatcagtctgttttcacaccgctgataaagacatagccaagactgagcaatttacaaaagaaaggggtttaattggacttacagttccacgtggctggggaagtttcacaatcatggtggaaggcaaggaggagcaagtcacatcttacatggatggtagcaggcaaagggagaaagagctcttacagggcaactcctgtttttaaaaccatcagatctcgtgagatgtattcactatcgtgagaacaacacaggaaagacttgcctccatgattcaattatcttcgactgggtccctcccacaacacatggaaattcaagatgagatttgggtggggacacagccaaccatatcagttagccacctgtcaagttaaagggagcaccatccacataagaccacctttattgctgcaccaactgcaaggggtaccctagaccaccctcaggtttgatcattcactggaaggacgcagaactcatcaaaagctctcatactcacagttgcacattattacatcaaaaggatacagattaaaatcagccaagggaggaagggcatagggcatagtccaggaaggtaccagacatggagcttccactgtcctcttccccatggaatcatgaaaagcatgactttcctggcattgatgtgtgacagtacccatggagtactgccaaccagggcagctcaccatagccccagtgttcagagtttttattgcggctccatcacacaggtgactgccctccctctccagctcctccagagtcagctgataccacgtgacccaaagaccccaccctaagtcacattgttggtctttctggcacagccaacccctaccctaaacctatccagtgtggccagcatctaccctaaatcatatggttagaccattctgtgacacaaggatcccaggcaaacaaactccaatcaggcatgatattccaagggcttagagttcacctcccagaaggtgaggacaaaagccagacctctctttgggcaacgttaaattctttcctacacaaaatgccatcttcccactcctctgcacccacttgcttgcacctgcttcccctactcctcaccccagagaccagattcttttcagtatctttatcgagggaggaaagggttgttgtgtgtctgaggtgtttgttgttgttaaagcatggctcctacacagatcttatgtagtattcagcagttctctggggacaaagagcacattttactatgagaaatagtttgggtgaatactttgtcgtctgcagaaaatattgtgcagagctccagttttcctagatggagatgtgaaattaactaaattacagatcagtccacctaaaatatgaaattaaatgacaaattccaggagcctttgactgctaaggtcattattctaacatatgattccaatcacctttttaaattgctcacctgtgccatggtccacgatgccctggaaacaacactgcctcctgtctctgtcctgcagacggcacccctggctcaagcaatgctctcctctcggtcaagtgtcctcccaatggctccatttgctgtgcggggttgtaaacggctccattttaagccaccagctccctccctccggccctctctgctgtctccctctcctgtgctgggggctgggaggctgaaggaagccctagcaccactgtcccctcctcgatggctactcttctccaacaagacctctcttcctctcctcaacactgatgggaatggatcggaccttgcaattagtgcccagctgggtgcagacagggatctctgagccagggcggggacctggggagagagcattcctgctcaataattcacccttaagggaaaggaaagctacgaatgcagcattcagccattttccaagacattaacaattcagtgtaattcctgaggcataaaaaatgcatcattgctctaattttataagctccatgatgtttattatgacatcagaaggtctggtctgggtcacccaggagagctaaagccaggagaaaccggtagatagctctgtacagggcctgcacagaggtgctttggagccagcccagaaatgctgcagacacagcccccacgaggtgggacctgatgccctggaagcccccagcactctggaacttggaaatgactgacgcattcatcatgagtctttacacccctcccctggaaagcagcaggcaagagcgagctctgagcagagagaagagggcgcggcagggagcctgaagctccaaggcccccaattgcactcaaagacatcattcctccccggcgttctcattttttcattcccagtaacagagtgagtgggtgctcatttttatatttggtgaaacgccctggcattattccaagtcacttgaaagtgagattagaccaggaggatcactgggtggggctgcgtttcttgttcccactctggagacagagcacgatccatggtatttcactttggacataggtgcttcttaggccctggggggcagcagagccaagcaggggacagcctccacttcattggttccagagccagtgaggtgctggcctgcatgggactgtggctgcaccatgaggggccacagtgacaaagtgacccagggtgccaaagagagatcagcagggggtgggggcatgcgagtgtgtgtcatgtgtgcgcttttccctggccacttttttctttttctaagtaatgtcatttagcaccaaaggtatctgcaaatgctccctgaactaaatatgtcagctctgcctcccctggtgcaggagacggctgtcatttaaaatgcacttgcacagaattgggccttcctttgtgattgctctgtctcctgttggtaacagcacagctcctctcttcatgaccttggtacttattattcttagggagtagctagttgcttccctaaaaggacaactttccagctctcattttcacgggtacctgacagtggctcagtggctgtgaggatggtgatgtcaaaatggctttctcataaatgtcacagtcttttgactccactgttgcctatgagagagcacacttgtttctctttaattagatctctaagtttttgttttgttgttgctgttttgttttgttttttgatacggagtctcacactgtcacccaggccagagtacagtggcgcaatctcggctcattgcaacctccacctcccaggttcaagcaattctcctgcctcagcctccgagtagctgggactacaggcaccaccaccacacctggctacttttttgtatttttagtagagacagggtttcactatattggccaggctggtctcgaacacctgacctcgtgatcctccctcctcagcctcccaaagtgctgggattacaggcgtgagccacagtgcccagccagttttttttttttttaaaataaatgttatctgctttataagaaagccacaccatgacagcttgatttagtgcattttttgagagtacttttctgattaaaatgcccatttaccactgtgactctactgggctgtagggtacacggcatcctctttgaaggctcagtggggtctttctgcctcatggaaaagttgactgtagccccacaggacctctgatgctgtctcagacctgaagactggggtctcctgagcacctcttcaggagcttgagaagggttggaccctgcacagggagccgtagagaaggccgtggcagcccatacactctgcacgggaggatctgtgagcccttagccaggtgaagaagtgcatggacatgtgggaattcttgcttagaagaaacagcctgtattgctttgctggtgcaggctgggctgggtgggacctgtgagttaaaccagtgcatgctaagaggtctgggcctaggtcgtctcactccagctactcctgaatggctacagaataagattccgttggagcacctctcttgtacctgtgtgggattactcaatctgcctagggcatcctggccaactccctcacacagctgctgtgcaggcaggaaaggcaagctcattcgaacagcatagggaggaaagtggcaggaaggcatctgccaccctgaaagatctggagcacatcctgaggacaggaggacccgaagtgatggtgatttccgggttctatcccctgagccctcactgggcacccaccaggccctgggctatctatttaagtttattatccaacttcatcccggccgtattccagatctttccatccccattctattgacgaggagcctgaatcttagaggagtcaagtgacttgtcctgtgtcacaccgctggggattcgaactcagggccatctgacattgcagcccagtgggcactttttcaccatgccttcccaccacctgaattgatttgggacaatccgctttttagtatcctgctccccttcacagcagagatgtctctgcatttcgcccactttaatggggagaatagctgtgtattttaacatccaacatgtgtgtaatagtgggggcctggtagaagttgctggcggaatggatgggcctgtgtcagccagcagggagaatgagttgaaggtggtttcactccgcttccttggattcttttctgcattatgtccattaggagaaacctgccagtttttgggctgatggctaatgcatctcttcctccctccatattacagctggcaccttcccaggatgacgccaatcatggcatatcctggtagcaaacactgtttctccccactatcctccacatcactgtcaggaccattatctctggccgtataacaagccaacccaaagctgaatggctcaaaatgatgagaatgggtactttctcttgatgccgtgggttggccaagctcacacatgcaactgcactcatgggactgatgattttaagcccagagtccctgcagctgaagcataggggcacctgctctgtcaggtcatgctggccacgcactgtgaccccccccccccccaccaacatggccttagacctgtcccttcagcagcaacaacggatttggattaaacaggatttttaaagaattatgttgagactctagtccagggtgtccaatcttttgtcttccctgggccacagcagaagaagaagaattgtcttgggtcacacataaagtacactaacactaatgatagctgattaggttaaaaaaatcacacacaaaaaaatttcataatgttttaagaaggtttacgaatttgtgttgggccacattcaaagctgtcctggctggcatgcagcccactgactgcgggctggacaaccttgcagtgtagtctaaactgattttacagaggaggaaactgaggcacaggaagggaaaggagcttgccatacaggtagttctggggggcaagggggggtgcggaactggaaccagagcccaggctgctgaccccaggccaggaccccgttccccacctcagtgcctccttcttcctggatggctcaggggccctgacaggtgcagctcagctggagatgtttgaggctctctgcaaagctccccctttcccctgagtcagccaaccattgtgatctgcaaggaaaatcccaagttctgaatgctgttctcgccaggatccccagctgtcagggacatcatcatggccagcagggactttacagactcacccctggctttttcacgaccttcagaagcactgtcaaactgcctgtcttctgacatcttctgccctgggcatcaccatcgtgtgactcagggcctcccctgtgccagtctcatctcctcactgagtagtcatgggacagggcctgtctattcagattcccctcctgccactgcaccccacattggcccagaccgactcactgggaggatcggccatcagactctcctgacctgggcctagctttttccgtcggtcagtcttcttttctcaagttaaatccattgatttctattctatacttcttcattctctttctattctcctttgtctatgtgtgtgtgttacagcattattgagacataattaacataccatacaatttacctatttgaagtacaaagtttctgagtgttttcacagggttgtgcagtcatcaccacaaactaattttagaacattttcatcccccaagaaacatcctgctgcccatgaaccagggtcactccccattcctcctcagctcccccccaccaccctccctaggcaattattgatctatttcctgtcaccataaactttcctaatctggacattttctataaatgatgtaatacaatgtatggacttgtggctggcttcttgcacttagcatgatgtttttaaggttcacccatgttgcagcatgtatcagtacttcattatttttattgctaagtaaatgtccatatgtatggacatctcctttcattctcttggatatatacctaggaatggaatggctgggtcacatcataactttataattaaccttttgaagaactgccagactgttttcctaagtagctgtgccattttacatttccaccaccagtgtacaaaagttcaaatttctccacatccttgccaacgcttgttattgtctttctttgtgattatagtcacttagtgggtgtgaagtggtatctcattgtggttttgatttgcatttcctcagtgactttgatttcctcaaatcaaatgttgagcattattgattattgcccttattattgatcttctttggagaaatgtctattcagatactttgcccattttaaaaactgggttctttgctttttatttttgagctgtaagagttctctttatatttgagatacaagtcccttatgaaatatgagatttgcaaatattttctcccttttagtgaaatgtctttttacttcttgatgttgccctttgaagcaaagaggttttcaattttgataatgttcaatttatttattttttcctttggttgcttgtgcttttgatatatttaagaaactatcgccaaatccaaggtcatgaaggtttactgccgtattttttttccaagagttttgtagctttacctcttatatgtaggtctttgatccactttgagttacattttatatatggtgtgaggcaggggttcaacttcattctttttcatgtggatagcccattgtcctagccccatttgttgaagacgattctttccccattgaattgccttgtcagctttacctgtggctttttaaaatattttctatttcttcaagccttaaagatatactgaatatgcatcttgctcttatttttaaattgtcacttagtttgagcagaatcttatgattttttcttttactggaagttgatatatacagaaacatctgatttcttatcagacaggagaggttagattatactgcagtaacaaccaattcaatctcaggactggatttctcattcatgctacaagtccaactacaattgctagggagggccctactcatcatggtcacacaggggccccggctggcagaggctaccttttcctataaacaagcttgcacaattgccagggccgggggaaagaatgtgttgggcaggtcactggctcttaaagcttctatctgtaataatacacatcagatttattcatgtttcattggctcaagaaagtcacatggtcacatctaacttcaaagggtacaggccagtgcaaagcacccccagggatagcaaccagagatatttggtatataatattaatgactaccatttccctggagtgtattgaaatgtaacaggtgtaatgaaatcagttgatgtggactttctgttgtgcatctcgaactttaatcactgtggtaaaattcctttgtagagatcaaggctgcatcgagccaagatcatggcattactctccagcctgggcaacagagtgagatcctgtctcaaaaaacaaaaaaatcctttgtagaaatttccagactgttctgttaaacaaatgatatctacttaatggtaagagtttttaggtgcttggaatagggcagaatgaacacaggctctgaagtgaaacccagatccactgctttccagctgtgtggctttgagcaagttatctgactttttgaagctttcgtcttaccctctatggaatatcctgcttgcaggagacttagcagcagcgtgagtgcctggcacaacagcaggcagataacaggcatccaacagactgaaattcccttcttcctcctctgcaacaggatccaccccctgggttcatcctgagaccctcagcagggttagggctgatatatcaactccctgtatctgctttttttctccccctttttgagacagggtcttgctctgttgcccaggctggaatgcagtggtgtgatcatggcttactgcagcctcaacctcctgggttcaagcaatcctctcgcctcagcctcccaaatagctaggactacagacacacaccaccacaccccgctaattttttttaaaaaaaattgtagagaggagatctcaccatgttgcccaggctggtctcgaactcctgggttccagtgatcctcctgcctcagcctcctaaaagtactgggattacaggtgtgagccaccgtgcccggctgtatctgctttaaaggacaaaaattgcacttaaccttggtactgccaatggactcataactgagtattctttttctctattttacaaaacaacccaggtatgctcaaagccccataaaaacccagtgtaacaatatgcttgaatcatgcgcgtgccttattctctcatcttctaacttggaagaaagaacatgaataccacaaggaaccacctgtggagattcagttttagggcgctggcagcactcggggcttgcctcaggagcacccagctcatcccaccctagctctgcctgactttccaagaaagggacccaaggaagcctcctgctcctgtggtgcagtgagtggcaggcactccaggagaagaacgagcccagccgagaaacaataccaggacattccccatgcagaaacgtcaccccaggctcctgaccccaacccactcagcagggctcagccagtgcctcctgggctgctgcagccatgaccccacctgtcccacctgctcggcagaggtggggctgctgcaggaagggtgaggggtcatgggtacccctgaggcccctccttcagacagctgggatgccagggctgaaacttgtgtctgccaaaacaaacaaacaaacaaacaacaacaacaggaaaaagaacttccccacctgagagagaaaagactgaagattccttctctttaactgggcttcaggtgcctgaactggatccaaatcaccacgagttccccggcactttagagtacagaggcaggcgctgtctctcctgtcagcctccacccctgctggtctcttgctcacaatccattcagagcaattcaacaaccatcagctgagcacttacagcgtgccccgccagcactgtgcaagctgctgggatgtcaggctttgttcttgttctcaaggagatgagggctgtcctgctcttagtgaaaaacaactaacttctagaaacactttttattaatgtatgatggacatatggaaaagtgcacatattctaagtatgcaactcaatgatttttcacaaactaaaaccagtgcccaggtcgagattaaaacagcaccagaaacccagaagccaccccaaccccagcctccagccactcctcctcgcccccaagtaccccgttttggcaaagctggcaacggtagctaactttgattgaatgtacatcagtgccaggcactggtacatgcaccttccacctattgattcctttaactcccgcaccatagatatgaaggcacagacagtggagcacacagctagcaacgagcccactctgaacccaggggggttggtttcccgagcctatgtgtccctgatgactaccctttcattgccgccctggaaaacaaacagaactcactcactgtgtactgcaacaccaacacataacaaagctggaggtttggttctgctgagagcgtcaggaaaagccactgagggtggccagatttgagctggaccttgatgaatgcataggagtctccctagcagataaaggggaggagttgcatagcaaaggtggtggggggagcgtgcaaggggtcctgcgtggtgacccggggggcgggcgaggggtagacaggtgcagtgggaatactgacctagagcaggattggaatatgtactggggctttgccagggcaggcttcggaacaggagaggaacttgctcaggtttacagtgggtggcagcccccaagggaagccatggacgatctaccggcatgggcaggacccagcttggtcagggtgtccttcacgcggcctctaaccagcgattcctcattgggtgtacaggcttaagggctctgcaaatgttggggttgtttctgtgtgcgtttgggtagggtcagaaaagagactccgcccccaatttcgagacacctttttacccaggtggcagagacatggccgattttacagataattgactgtatctatatatctatatctattagtatataacaaaaacaaaataggcggtctcatcacaggtcttggggtcaggcactttctctgtgcgaggccgtgggactgcaaacagcacagggaaaaaagaaagcgggatccgctcgggacgcctgagcctcgattaagaggtgcggctcgggatttgtggccggggcgagagaccctcacgcagaagtccccaagtgcgcagggctggagctggaactttggaacgcggaggttagacccaaagggtgggcggagcctgcactccagctaagggggcccagcgccgcaccccctccccaaagccggagccgccgccaccgtccccgcccaccgtcctccgccccgccctggccctccccgggtcctcgggccccggccccctccctccagcctggcccccacgcctccccgctcgttgcgcagcgccggctcctcccgccggctgcattgcagacgccgccgccgcagggcgcgccggggccgcgcagggagcccgagcccgggaacgcgggccctcggcgcggagcttcgggcggccccgacggcgcggggagccaggcagggcgggcgcggggcggccccgcgggaaggggaacgggaggcccgcgcggggctccgggggccgtcggcccgggcagcgggcgcagccgtcgggctccgagccgtcccggcctcgagggaaccgtcgccgccccattcgcgggccgcgctgagccgggcgggcggagcggcggggaccgcgtcgcgagggaccgggggcccggctctcgcgcggggacgcccgggccgcgctccgcccgcaacctccggccgggcccccgccgtccagcgcggctcgggcgcagttccggcgcagtccccgcgccgagcggctccgcgccccgcaccagcctctgcccggctccgggtgacgtcgcatcctccgattggaccacgcggcctggggggcggggtctggtccggtgagctcaccgccgcgccccgccattggtccgggcggcgcactcgggcagtggcggggagaccgcggtacccggagccccgcgagtcgttccagctgcggcgagtggagctgagcgggcgcggggccgggctgggccgggccgggcggggccgggcggggcgcgggagccagtgagcggcggctcggcgcaagcctgacgagcaggagccgagctcagcaggtccgggtaggtgcgcggcggcgcggggctaggcggagggcgcgtgcggtcgagggcggcggccggcgggggcgcgcgcggggcgggggcggggccggggcgtggggacacgcgtgctcgcgggccgggggcgtggtgcgcggccacgcgtgtttctggcgcgagtgtgcggggccaggccgggagggcgtgcgcggaccgggcgtgtttacgcgcggcagggaggggccacgagggtgcgcgcgtttctggcgcgagtgggaagtgtggggatccggcgggcccggtgtgaggggcgtgtttctggggcgagagtggggagtgagtgtgaggagcaagggtgaggggctgcagggaggggtgcgtttggccgaggagtgggtgggagacacgcgtgtccatgccgcgagggtgtgtcgacgcccgagcctgcgtggggcccggggccgtgtgtctggagtggccgagggcgtgaggggcgcgcgtgtttgtgcgaggggcgtgtgcggcgggtgtgagccacgcgtgtctgggtgcgcgcgcgggccggatgagcttctggagtggtgcgaggacgcgcgcgtgtgtctgtgtcggagcgagggcggggacgagcgtgtcgggcgcgcgcgggcggggctggggcggcgtcggggcgcgcgggggcccggcccggccggcggcgagtgtgttggggcgctcggcttctcctcaacacgggtttttgggacccagtgccgcctccttcccgcggcggggcccgcggagctcccggtttccctgggcagacaggtgcgaggcgaggtgcgggcacagccctgcgctcctcagcgggtgcgggatcgggcgacgggggactgtctctaactacagaccaggggagcggagggacgctcgattcacccgcgtgcacagggcagtcctgaaagtggatggaaggctcggaggaacttctgagagctttgcttccctgcagactggcgaccagagagcactttccacgcgcagatgggccaggatagatgctcggggtggcccttttgcattttcggagctctggtgattgggtttctaggtattgcgcctctttagaggtggcgctgatggcgttctggtgtttgagactttttcgatctctgtagattactgcagacatcaaaagcatttctctacaaatcaggtatcagaatagatttctgaaatgatgatattcttgcagactgtcttcttaatcagttgcctcaccagggaaggacgacaattttaaagtccattttctattttgcccacttttacttgataggatttctgctggcagcctgaagtatctaatcccggaagcggactcagtaaacgtgagaggtgccctcagataactacagaaatgcctcctgtgtttggttgcttgaatgaatgcattatattttttccaccagtgaggccaacccctgactttttaaaattgtgctcccaagttttatcgataaaatgtctggctattacatacaaggagtctttttctcttactaccttgaggaactgaagtgttccgtttccctgcagaatctgtgtcttatcgagaaactattgctgggaaccggatcaagagaaatgcattatgcagaagcacttttcctgctgtgtgtttagaaaaaaaatagttattattccaagaccagaattagacactagcaaataaatttgtttctctttttctttgtattagatttagagagtaataatgtttaatgtccaagaaaatagcatttacttacagcgtatgcatttcctaaataaatttaacctagtagtgaaaagaagcagagaactgctgtgtattcctgagagaccttgatgaggtcgtcctgattaattataatctgaacaactcaaatggaaatacagtatttcatgtactcgttaataacagtcttgtttgtattatttaaggatttggctttggtgataccctggcggatgcattatttcaggctattcttttttttttttttttttgagacggagtctcgctctgttgcccaggctggagtgcagtggcatgatcccggctcaccacaacctgcacctcccgggttcaagtgattctcctgcctcagtctcccgagtagctgggactacaggtgcgcgccaccatgcccagctcatttttgtattttggtggagatggggtttcactatgttggccaggctggtcttgaactcctgaccttgtgatctgcctgcctcagcctcccaaagtgatgggattacaggcgtgagccaccgtgcctggcccaggcttttctttagtcttctatttaggactgaactgggcctttactaagagctgtcactgctgcagtgtattcatgtggggctgttctagaatccagtacgtgaataacaagtggaactgagtattatttacttaatatgagaaagatagcaaagttaaagcattggttgatatgaaagtttcccgagtgaaaggtgtgaggctctttttgaaacaggtttcactctgtctcccaggctggagtgcagtggcatgatcatggttcagtgcagcctccacctcccgggctcaggtgatcctcccacctcagtctcctgggtagctgggactacaggtacacaccaccatgcccggctaatttgttgtattttttgtagagatgaggtttctccatgttgcccaggctgggctcaaactcctgagctcaagtgatccacccgcctttgcctcccaaagtgctgagatcacaggcgtgatggtgggagaagtccagatgtgatgtattgaattacattaaaaaccacaagttagtattactcacatttaacatttcagaagtgcttattagcctgctgggtgataccaatgggtagtgtcacatcatgtcatggggatgttggcgttcatagtcatggagaccttcagttagagtcttctcctcttcttgagtgaattgccctgaagtcaaatgaccatcttttctttgctattctcttatgtgactacatttggcttaacatgacaggcagacaaggagatgccgtcgccatcaggagatagttactcttcaccccacaggcagtacagcaagtgactcattaaaaccatgatatgataccttgtgaatagtaagtttaaaaatacggccaggtgtggtggctgacacttgtaattctagcactttgggaggctgaggcaggtggattgcttgagcctaggagttcaagaccagcctgggcaacatggagaaaccccgtctctacaaaaaatacaaaaattagccaggtgtggcgttgcatgcctacagtcccagctactcaggaggctgaggtgggaggatcgcctgagcctggtaggtggaggttgcagtgagctgtgattgtgccattgcactccatcctgagcaacagagtgagaccccatctcaacaaaacaaaacaaagaatagccaggcgtggtggctttcacctctaatctctgcactttgggaggccaaggcagaaggattgcttgagcccaggagttcaaggctgcagtgagccatgatcatgccactgctatgcagcctgggcaacagcaagaccctgattcaaaaaaaagaaaaagacagtggagggggagaatgccagtatgatcttgtgtaatgctttatttcagtaaagttcctttgatagactaactggaattttagtttataaagtatcgtgatccctgtaatttgcttaattttatattgtcttataaacattgaaaatagagcatagctttagacatgatgtggagagactggtcagctcatctttgaagcacctactatacatcagttgcttagcaaattaaaactaataattaaatattactttgaggaaggtaaagtatacggagtttaatgagggtaaatgtttctaggagttaaagtgctgatcataaagctacataatgtttttgtaatgtggaaggtgatgataagtcatgtaaataaatttctccattatattaaactaatatttatcaactactaaaaattaatcattctctccattttttcagctttcgtgtttcacctgactttcaccaccccatacatcatgtttcactctccagctggccacaccccatcctcagccacacagcatgagccctctgtcacacgcagccaggctggtgtgctggtgtgctggtgtgcctaccgtcacccatactccatgttaaattctgtctcttttttcctttgagcctcactcaagtcttattaatgaagctttttttctcccctcccagattagattaacagctgtttatggggtgcagaggggccccacctaagctgtatcttctactatgcctagcataatgccatctgggacttgaagtttcatgaatactgttagttggcaaagaagttatccagcgtgatgctactcattagatagggtgaggagactgtaatgaaatgtgtttcttcaagcccaagacaaacgtgatcctactccgtgcctttggttcagtcttgtttgttggtcatttaggcacaaactccaaatgatttcccatgcaggtcagttcaaggaggagtgagagggtcgaaaatcaatctatgtggatgtgaatctaaagccaactggtggatgtgagttttcacttaggtggtcttgaggtggccctaaaaatcctggacactgtaccagtgtaaaataggcctgacacctgaatcattttcccagactgagaatattggccagaagcccactgtctagggatgtgtgtaggtaacagctgttctctttcatataatacagcaggatgggcactgggtgtttcagctctaccattcactcagtgagaaaccttatgtaaattaccttgtatctccggctctcttacctgttttccaaacccattagtggttcagaaaagcatggtcaccatcatcagattttaaaatcagagtgcattgcacatagtaagcgtaagtattgatttgggaagctttttggtttccatatgggagtgtgtgtgctggcttctatttctttctgtggaccacagtttaaaaaagttgaaagccactagactggatatttcctaattctctttcaattcagctattctgctgtgattcttttctgtggtatgtgtctgttatgacgccacatttagcagtcgcataaggcctgaaagagttaagatacctccatatgtatgaattcaacagatagtctccagccaggccagagctcagtatacctttccttgtcttactgaatgttttggcagtcaacattgaatcagtgttttgaataagcaagacagtttattgctactgtcatttatcacatgttttgtagataaattctaatgctgcaagtgacaaaactccacctcagactggcttacataaaaaagggaacttggccgtgtgttggctcacacctgtaatcccagcatgttggggggtcgaggcaggaggatctcttgaagccaggagtctgagactagcctaggcaacatagcaagacctcatctttaaaaaaaatttaaaacaaatagctggacacagtggcacacacctatagtcccagctactcaggaggctgaagcaggaggattgcttgagcccaggagtttgaggctgcgggtgagccacgattacaccactgcactccagcctgggtgacagaacgagaccctgtctcaaaaaaaaaaaaaaaaaaaaaagaatttattgactcttaggaagtccagaattagtgttatcttcagctagaactagctctagatgtacaatgatgtcattaggcctcccccattgcccccaccccactctcctcctctatgttaattttattctcaagcagggaagggtccccaatatggcagcagcaagatggcccactctgagctacaggcttatcgtctgccaaattaccagatgtctccaggaagacagctcttatttccctgtagttccaggaaatgtctcatctcttattggcccatcttgagtcacgtgtctaatctcttgaataaggggacatggtcctctcattcataaggcctggctcatacacccctggagccaagaattgggctctgcgccacctaaaccgggtgcagttccttagttcaggctgctctaacaaagtaccatggacaggtgtcctgtaaacaacacagatttatttctcagttctggaggctgaaagtccaagatcagtgccagcatgatgagggtcacttctgagttgcagactgccaacttcttgctgtatccttacaaggtggaaagagggcaagttgctctctggggtcccttttataagggcacccatatataatcccattcatgaaggctgtactctcaagacctaatcaccttccagaggtcccacttcctaataccatcacgttgggagttgggatttcaacataggaattctaggaagacataacattcagtccattgcactccccaaggaagaagtaaggtgccctgatcagggatgaaggaagggacgctaggggggccaactgtgaaggaaccaataggttttggtcttcacacttgattgtcatagtcctaaagaaaacaccatcctgaagctacagaaactcactctagggctttcttccttgcttttattctcatggtcccattttaaatgagaaagaggaaccagagcccatcaccttttagtgaatctttaaatggatattgactaacaatttctaggaccatttccagaaagtatggttcaattccttagtattatacactgtggtttggattaatcaccaaagaatttatttaaatatcctcttttctagtgaaagaagcgatgtcactctagccagaaccaatgcccctggcgcgcgtgtgtaagatgttttatctaatgatgtaaaaaataggaagtacttagcctaaaactgatgattctgaaagcttttaagtcagttgagtaatatttcccagaaaaacagtgcaataaatggcaggtaggttcccaggctagccagagaacaaaaaccttttgggacccactatagatactctgcatttgcaggagagaaataattaaaataatgtgtgtgcacatatatatgcatattataaaacattgaactacataatctataaaatctatcaatatataacatacaagtatgtattgcaaaacaagtgaaagagtgaacctcgcatttatatattaagtgatgctgcttaaataaggaaatatataaaataactttggtaaatggaaacagttttggtgaagattcttaattcacagggtagaactcaaaatggttctctgaaaatacagtctagttctctaatgttttagagtaaagttgcatagaataagtaatataaatttattgataacctaactccaacattattcattataattactattttttttttttgagacagggtctgactctgatgcccaggccgaagtgtagtggtgcaatctcggctcactgcaactcccactgcccaggctcaagtgatcctcccacctgagcctcccaagtaacagggaccacaggtgtgcatcactgtgcctggctagtttttggattttttgtagagacagggtttcatatgttgcccaggctggtcttgaactcctgagctcaagcagtccacctgcctcgcctccccaagtgctaggattacatgccagagccaccacatccagctcaatcttacttttattcccaaatggaacaaagagagtgaaagaaatctttctgaggtggctcagataattaaaacaaggatagggaaatagtccattttcatgctgctatgaggaaatactccagactgggtaatttgtagagaaaaagaggtttaatggactcagttccacatagctggggtggcctcacaatcatggcagaaagcgaaggaggagcaaaggcacgtcttaacatggcagcaggcgagaggacgtgtgcaggggaattgccctttataaaaccatcagatctcatgagtcttattcactatcacgagaacagcaggagaaaaatccaccctcatgattcagttacctccgactgggtcctgtccacgacacatggggattatgggagctaccattcaagatgagatttgggtggaaacacagccaaaccatatcaggagaggttggattaaagaagtgattctgtctgtcaaaggttgtctgaagtggaattgactgaccacacagagtgagtgagggagtctcctgagatgggagagaggcaatgatagtggggagacattgggtcaaaccatttcccacactgatctctggttggcatgcaccattcatccacgtaattttattggagtctgtgctaggatggagtagcacctgagcctgatgagagaaagaggaggaagagtatggaccaagactttcctaactcggagactgtctatatcaaaaaggtatccttagggctagtttccttcccaaactcttctgtgggaaaattagtttcaggaaatgcctgtaagaactgccccccagcccccaccccacaaaaagtttcacataagtttaagaaacacacctactattggcgattatcagtttatagcatctgttagcatattagggttcagaaaagtcttcccttaatgaggtgtaaatgtgtttgtgtttcacctagtatttccaaaacatctttgatacaacattttgtgtttgctgatcaatagctcgtgggaaatgttctgcagaatgcaacctaggaaatgcttcagcagatagaccatcctcacaaaatagttctgaggccgtggcatggttctttgagccccctgaaattgaatacaagatcttatatgtacgtatgtttctaggagaggactcacagcctttataattgtcaaagagcccctgaacagaaagcgcaagaattgttgttaagggctcttttctaacaagggaagtttcagtttctcttaaatttctcttatctgtatatttcatatcagcataggggatattgcccggtgagcaccgcagccactcgggggtccacactgaagaggccaagttatgaacaggggctgggcagtcacttgattattgtgtttatggttgaacagatttaaaaattggcagctactctctttccaccacgaattgtggaaagatattatctatgcaagacactgacttttagccaaactccaggtacattcaattctgaaaacagaagaaactaatgtgttatttcattgcagtaaagagacttcttgaaaagtgaaggcccactgacctgcagaagagaatgttgagagtgatttagtaatatgcaacttaaaaccaatgaactatagaaagcttttccttcaagaaatttagaacatccaactcatctacattcagatttagaaatcagcatgtattcctctgaatggtctacctttaagccaattcatcagagcatccgagagctgtgaagttggaccacattggacctttgctgaatcgcttcgatgaaatggtgctttggtgttccttaataccaaacagtaataaacagtcacttgaaacctagtagtgcttttgtcgcaaggatgttgaaatctattaaatcacagcatccttttttttttggagacagagtcttgccttgtcacccaggctctggctttgggcgcgatctcagctcactgcaagcctctgtctcctgggttcaggtgattctcttgcctcagcctcccgagtagctgggactccaggtgcgtgtcaccacacctggctaatttttgtatttttagcagagacggagtttcaccatgttggtcaggctggtctcaaactcctgacctcaggtgatcttcccgcctcggcctcccaaaatgctgggattacaggtgtgagccaccacgtttggcccacagcatccttcttattaggacctatgggagaaatttatttcagatcctagtaccagggaaagtcatactatccaaagcaactgacgtagtgtgatcttgaaactcactgcccccttttgctttgtttgctacgttcagccccatttgggactcacatttcaccattttggagggtttagtctgtgttttctgtgaaacagttttcctggagctttcttttattcttgtctgtaacatcatgagtcctgattttgcctgatctgctattaatcacaagtatttttgttagccacctcacacaggattgttaccagttaagtgagagcaggaagggaaataaagaggcccgggggaatgggctgggacagggaaggaaaatcaggaaaaggggggaagagcagagaacagactaaggagcatctggaggtattagggattcgagagagaggatcctcagaaacagtgcacagtgccaccggagttggctattaacgttttgttccattatttaaccattccgtcaaccacttgggggggttctgtaaggatctgcagattgcatagcccctgaaactggatgaagtcaagctgcatcccatagccacacactttttttttttttttcttgaggcacggtctctctctctgagccagactggaatgcagtggcacagtcatggctcactgcagccttgaactcctgggctcaagtgatcctcccacctcagcctcccaaagcgctgggattacaggtgtagccactgtgccagccacatccccctttcacagaaagcacccttaagtgttttgcttttttacgtaatccaagggatgctttaatgctggcctcagtaattcatacatttgttcaggcctcactgatttgaaatttgcaaaaatcggaggatgactctggtctaggggtagggtgccaagggatactcagaggaactgagtgccgtgccggcatgggagagcagtccttgatgtattctgatgtggcataaggagccgagacatgaaagaatcctcacaagcatcctgacactactcggaagaagcttaatgactaaaaattttctgaaaccctgtacttcccttggggaaatagtttatttctgaataaaatatttatgtggtatattgactttttaaaaatatcatctatttatcagaagggtctatgatgaattataaaattgttttgctttgttttattttgtttttgaaacagggtctcactctgttgcccgggctggagtgcagcagcatgattgaagctcactgtggcctccaccttctgggctcacgtgatccccccatctcagcctccagagtagctgggactacaggctcatgccaccgtgcccagctaatttttttatgttttgttgagatagggtcttactatgtggcccaggctggtctccaactcctgagttcaagtgatcctcctgcctcagcctcaaagtgctgggattacaggcatgagacactgtgcccagctaatattcttaagtcattttatccattaggacctattttattagcccctaataataaagataaaatattggacagatattttatccagaatccagctatttattttaaaatatgtacatttcattctactaagttgggaaggacttatttacctatatgttttccagattttgtagcactatgaaaaacattataattaataaacttgtgagttctggaacagaagtctctcatgtagaatccagtattcagaaaaatacatatttttggaacgtcttgggctttaactctcacaagttagcaagacagttagcaccgtctgtgcagatggtccccctagagttagttctgagagccaagccttgccaatagcagtcctaaataatgtatggagaatgagcttggcacaactaatgaggatccagcaatcccaccactgcgtctgtagccaaaggaaatgaaattaggatgtcagagagagatctgcactcctgtgtttattgcaacactgttcacaataaccaggatacggtagcaccctgagtgtccatctgtggatgaatgtgtaaggaaaatgtggtctgtgtctacagtggagtactattcagccataaaacagaatgaaatcctgccattgccaacatcagagctgaatatggacagcattctgtgaagtgaagtaagccaggcacagaaagacaaatgccacatgatctcactcctaggcagagtcttaaaaagttgatctcatggcagtggacaatagaatagtcattaccagaggctgggaatggggacgtcggggagatgtttgtcagagaatgtgtatttacagttagacaggaggaatcagttcaaggggttattgtacagcctggtgactcgagttcatcatgatatattcctgaacattgctaagagggtagatgttaaatgccctcaccacaaaaatgatagctgtgtcattatttaatgaacaaatgtactccaaagtacatttgtacatagtgcattactatgtagtacatttgttaattagctagatttaatctttccacaacgttcatgtacttcaaaacatcaggttgtatgcaataaatacgtacaatttatgtccatgtcaaaaaaatttgaggccaggcgtagtggctcacacctgtaatctcagcactttgggaggctgaggcaagaggatcacttgagcccaggagtttgagattagcctgggcaacatagtgaaaccctacctctaccaaaaatacaaaaaattagccaggcgtggtggtgcatgcctgtggtcccagctacttaggaggctaaggcaggaggtagaggctgtggtgagtcatgtttgcaccactgcactccagcctgagcaacaaagcgagaccctgtctaaaaaaaaataaaaaaataaaaacggatatattcttattagctaaaaggtgaccatgaaggagctgcttttaataacttggctgaaaaaaagcccatcatagaaatgactcatggaaacaaatatttgttctacatgttattctgtaccttgttcttcttgaagttcacgttgtgtatttccgatagttgaaattaaatcatttcgtcaataaatatttacagagggcctactgtgcaccaggaatttctgctaggcctcaggaatgtagcggtgactgggatgaacgtagtcactggcctcactgagccaacacaatttctctttacgttcatgtatatgagaccgagtttctggtgacaaaggctcatatcgtgttgggtttttgtagtcccggtggctaacaacttgagttgtcttgttcacccttagttccctagagccttggcgcagtcttagccagcagtgggcgttccgtaaacacagtgggcgttccgtaaacacagtgggtgttccgtaaacacagtgggcgttccgtaaacatttgtggaatgagtccgttctggccggattctccatagttcttccccaaggatttcaagtggtgttttgatcatgctaggcgccaccaaacaagccgctggtgcttaattattgtatccatacctcctgacaattcctgctcactttgtcgtttctgtctttgcagtttcccttcttaagtgttaggattttcattttccattttcctttatataacccatttaaatcacgccttcatgtccaggttagatcattcattgttcatctccaggtctcattacagcacttttttttttttttttttttgagacagggtctcgctctgtcacccaggctggagtgcagtggtgccatctcagctcgctgcaacttctgccccgccaggttcaggcgattctcctgcctcagcctcccgagtagctgagaatacgggcacatgctaccatgcccagctaatttttgtgtttttagtagagactggtttccccatgtttctcaggctaatcttgaactcgtgacttcaggtgatccccctgcctcagcctcccaaagtgctgggattacaggcatgagcccggtcagcccttttttttttttttttaaagacctcattagtcttaggagtaatacgctttctctgttcttctacattcatttcactagtcttactttagaatgtctcaattcttgtttataatatttctgattttcactgtgcactgaaactgttgaggcagtgtgctccaaacttgttgctttctgcaaagttagccgactttaagatgttctcctcttttgtagactctttaaaggtgggtgcagaatctgtatgggagttccaaatctcttttgtgcttcatgccaattagctgcagttttactacctttgtctttagttggatttgttacttcactgacagcagagttggctcctgcgtggtggaggtgccgtcggtgcctgagactgtgttgtgatgtggctgcctgaatgttccttggagaataggtttgagattttcaccctgagacacccctagctctagtattgaaagatttcaaatgagagatgattgtcagtttgctttgctgcccttgtaacattttgtctaatcactgttggtccgttgttttggcagtatcctgaatgatttttctgaacaagtccaagactgaatatggggatagtgtaaaacaaagatcaggaagaagaaatatggatgcagaattatgacaaatgaagaagtcctaagcagcattgctcattgccatttctagtgttttggtatacagagtcagagagttttcaaaaagtggagtatggcggttttttctacggctaaatttagccattgctttggaaaatcagagtggtacagcttgtgcctcatctccacccggcccttacccttccctctgcacttggacatcttaaacggcttgccagggaggagcagcttaatatactctcgtggcaccatttattctgggagggaattaagtgacttcattttccctgtccttctgagcttcctaaaaaatttaggagacttcctaagcagcgctcacagtgctctacagaaatagttgcaggcatgcctcctttgcctcctcagctctccctgccagggcagccaagggctgtaagtggaatgagagatggatggcagtgggagagcacatgtgcacttgagctacaaataacgtgttttaaaatagcagatggtatttgacgattgcttcttcattcacttacctgccaaggcaaaactttttcttctcctctggcaacaagacctgagatggctcagctcagcagttgtaataacaagttctcacgtttgccgatattattcattagctgatgtgcaggcattcatattcatggacgctttctggggctgttctagaaagtgttccttttgtttaacccgatcgaaacctcatgtttatacaacagttgaacctggctgacttgttaaacaccttggtaactaacgaaagccactcctttcattgaggggcgctgccagtcatttgtattccaaatagtccatttttctcttgaaaagggggaacatctcaaagttaggggttgggtggttttttttgtttgtttgtttgttttgtttttgaggcagagtctcactttgtcgcccaggctggagtgcagtggtgcaatctcggctcattgcaacctccctctcccaggttcaagcaattctcctgcctcagcctcctgagtggctaggactacaggcacctaccaccatgcctggctaaattttgtatttttagtagagacggggttcaccacattggccaggctggtctcaaactcctgacctcaagtgatctgcctgcctcagcctcctaaagtgctgggattacaggcgtgagccaccaggccaaagttagggtttggtatttttcatgagaaactcagtggctatagaaaagtgacactgctgggaagttccagtgtgtgcctgtgaagaagtcacctcatacccagccttgcttccagagtcttcactgtagctgcgtggtttccttccctgagcttaaagcagatggcagccagccgggcagacacttgctttccaagtcagctctgctggccttggatcactttgaccatcctctcttgcccctggacaggtgataaagctgctcactggtatatgagccacctggactgcacctggggagcggaggctgctcagggttcttgccccagagtttggatgacctcatcaataaataggctcccaggagcttaaattagaaaataatcctttccacatgcactcactttctgaatggtgctagggatacaagacaaggtccctgctttcaaaaagctcacattctagcctctagcaggaatgacacctaggaaaagaactatcccttcattggctcagtactgttaggacccagggcaaaatgtggaaggtttaccaggcatagcagaaagaacactggtctggagtccagtctgtgttcaaatctctgccctgatacttacaagtggtatgctcttgggtaagtaacaaattttcttagcatcagcttcctcatccgaaaatgaaggggaaaatctttatttcagagtcattttgaggattagacataatccatgtaaaatgtctggcttactgtagatgtccagtagctgctattattattattaataatattggagtgatgtctgagccacactctgaagagttaagaagttcaccaggtggatgaggagaaaggttggcctcggcagaggcccagaggtaagtaaaattcctggtcgtgagccaggaattttggagaacattgagttatgagagaaccctagaaacgtagcctgggatggttggtaaagaacagtccattctgtgtcacaacaaagagtttacattttattttgtatgttcaggaggagggatttattttaccttatttttatttatttatttttttgagacagagtctcactccatcgcccaggctggagtgcagtgtatttttattagagatggggtttcgccatgttggccaggctggtcttgaactcccgacctcaggtgatccgcccacctcagcctcccacagtgttgggattacaagtgtgagccaccacgcccagacagaggagggacttaattttttaaactaaattatctgataaaatatcaggaaccatctcctggtgtattgctcagtacaaccaggaaaattgattagatttgaagattgaaagtgagttgtgtaaaatccagaggaagcagtaggtgctgctggggcctgagggcctgggaaatctggctaggagctggtttcctggcatagacactttctcactcacagcagacgcccagacactcgggattctccacttttacagcagcaaatcccagcccttctaaacttagaacacactgtgggtgtctgatttcatgaaattgtctctgtctttaaaacattgctaaggaattttaaacatttaaatgaatattaatttgggacattttaaagtgagtccctttgaaggttaggaacccctgtcagagaaagaggaaaagatgtcccatgactgtgctgtgtgacacttcgtggaacagctgtgatggagaggctaggatggggtcgacccagcaaaagaaaagggaatctgaagccccaactaaccattccttgacccttgggccattgtttggaagagttttttcatcttcttcttgatcgttgtaatactcaaagctattctgggattatgagtctatttctatttatacttatgctttctaatattgttggaaactaagaattgaagtataataaggtaaatgaatatactactatactataacctatgcttatacttttgagatacaggagttaaacctgaaggtctcttttttttttagtttaatatatcaataaggtttcttttcagcatttcatttatcggtttattacagctaggtaacacacacagttactttcatcatcatttgatctatttttaaaatgccagctgggcatggtggctcatgcctgtaattgcagcactttggaaggctgaggcaggcaggaggatagcttgaggccaggagttcaggaccagtctgggcaacatagcaagaccgcagctctaaaaaaaaataccctcagaaggctctaataaacactgcagtgctatagtagacacagagacatcagtaggaactcatgtttacattagtgtgtatacaggtagatatatacatatatacgtatatttcctagctttcccatcgagaaggcctagaagcagtgatacctcaatagcaatgaacgctcagcacccagatgttcatttctaaataccgttctccaataaaaagaaccaaagctccactccttagagaaatggacagttctaggattggcacaggggaaatgagagatgaatctggagcatcttgtaatgccagaaaggaaggaagtgctaaaaggaagaaaaaaggatgagggcacgtcagaggggcataagggtcagccggaaagagctcctgatggccaaagctggaacacttggagcaacaaaataaataacagtatcagattgtgacccaaagtttagaataaatgtacaggagtccatactgatataaataagtgattgactaaatacataaataaataaggacaaatcttccttacaggagaactccaaataatatatgtagatactcccccgtctgcgaggtggaacttagttaccctcttgttgttgggactggacttagtgacttagttccaaagaacggaaagagaaaaattgtaacttcacagtacagcaatgtagcaaacattgccttaaccaaatgatggaggctgacctctccaggacatcattatacctctgattgtatgtgatgagcagggtgcctcacctctgatactcttcctaaaaacccagaacccagtctaagggttagaaaacaccaggcaaacctaaattgagggatgtctccaaaatacctgaccagtattcttcaaaactgttaaatttttgtttggagatagagtttcactctgtcacccagactggcaggctggagttcagtggtgtgatctcagctcactgcaacctctgcctcctgggttcaagtaactctcctgcctcaatctcccaagtagctgggattacaggtgcccaccaccacacccggctaatttttgtatttttagtagagatgggtttcaccatgttggccaggctagtctcaaattcctgacctcaggtgatccaccggcctcagcctcccaaagtgctgggattacaggcgcgagccactgcgcccggcctaaaactgttaaaatcttgaaaagtaaaggaatatggagaaactgtcacagatccaaggacactaaggagacttcaaaactaaacacaatgcgggatcctgggttagatcctggaacagaaaaaggacattcatggaaaaagtgctaaaatcggtttcaagtctttaatttagttaatagctctaatataccaatactagtttcttagttttgacaaatgtgccatggttacataagataccatgttagaggaaactgagtgaggggcatatgggaactctacgatctttgcaacttatctgtaaatctaaaattactcgaaaaaatgtttaattttttaaccatgctcccatagatggggctgggcagaaggccccagtctactagctcaggcataagagagtcatattccttcaaaagattgcatgtatgggccgggcgcggtggctcacgcctgtaatcctagcactttgggaggctgaggtgggcagatcacgaagtcaggagattgagaccatcctggctaacatggtgaaactccatcaatacaaaaaattagccaggtgtggtggctcatgcctgtagtcccagctactcgggaggctgaggcaggagaatggcatgaacccaggaggcggaggttgcagtgagccgagatcgcactactgcactccagcctgggcaacagagcgagactctcaaaaaaaaaaaaaaaaaaagatcgcatgtattagtttatttcatcctcacaaacaagaagggatatgtatataaatatccccattttacagatgagaaaattgaggtgcaaagtgggaatcatttttccaaagtcacacagtgacaggattaaacctggggctcttatttctactccagtgttctttgcactgtctcagagctgcccaggctgaaactgctgcttccacaaaaaaggagcacagggagaagaggttcatgaagagaagctttgaatgaatcaggagccggacggttgctatgaaagccgtcagaatgattgagtttttgtccggggatttacatgcgcgtgcatgtctggaaggtagcgggaaggaactactgcatgaaggtgaatgtatccttcctcattccctggaacctttcaggaaaatagactgctttagagaaacacgagaggcggagacagacacctggaaagacagcccatgttgtcagctgagtaaaggacaaagtaataaagaggtcagatgcaatgggaatggtagaggagtacttgatccgttgcagacagcagtgcaggtggctgggttttaaatcgttttcgagtatcgcctggtctgagttggggtgcttgagaagaaaatgtgcacccagttattgtcaacagagctactgcggatggctctggcatggttcacatgaggtgatgcctcacatacccatgctgggtaggaatctctgcttctgtttgagcaggtggttctgggatcattcttaacaggcacttgggtggaggagagaggagtcattctttcactgtggaaacaggccagggtcttagggcagcggttcttgaaatgtggccctagaccagaagcatcagaactgcctgggaccttgttagcaatgcagcctctgggtctcactcagacccactggaccaaaactctgggaatagggcccagcagtctgtcttaagaagccctcctaaagtttgagaacctctggtctagaggaatggtcactgggatgagcagaagccgccatctagggcagcacacagcctccagccaggaacaggcgggtgggtcacacacacagactcacagcctccagccaggaacaggcgggtgggtcacacacagactcacagcacacggcctctagccgggaacaggcaggtgggtcacgcacggagagtctgccactggaagggaagctgagactcacacccagaggttctgcaccagaagtaagacatcattcagagctcactttgcctgagtctttagatccaggagttatgggacttacccagaggggttaagagttggggaacctcagcccagttgacactttattttgtatcatttgatacttccttgtctgtcaaaggatttttttttgcttttgccttttcctactctgccctgctcttccatgccctcagaaagtttatagtttcgctggggaggacatggctgatagctcagtgtagttctggatctaacattcacctatacaccccgcaggatacaaactatatgtatttatttatagcctcctatgtggccacaaaagtttggtcattgttcccacttgaaggtagggtatcattgcaactaacttttgtgaggtttgtattgatacctagaaggctctaagtaggtggctctttatactgttttttactgaagcatgtatgtgtagaaatgttatgtaaatttttattttcttgggtaaaatgcttaggatggtggtgtctgtctctgggttatgcgtctgtcatcctcatgtcttcaacaggaggccagcctgtgttactagaaacaggcctctgtgcacctcttttctgtacccttgcccagagttcactcgctgcagcaaatatagagtgcctgttctgtgatgaagcaggaacttgttcttccggtgcgacggatatagcctaatatttcaggataagaactaaaaatctcagaaccgccaggcaggaagtggagctagagcagctggctttctttgcggggacctctggagcctcctgtggccttgagccacctctgagcctcatgtgcccatggaaacttgcacttgtaactttccttctgtgcagaattttctcccgatggagtagttcagctgcttcacttggactgtcctaaggacatccacttggaagccctcaaagctcaccctgttgtctttgtttgaagcatcatgggtaagaactaggaccaaactcatcagctccctaaatctacgcattattcctactcccctttctctgccttgtattaatttttttttttttttttttgagacagagtctcgctctgtcgcctagggtggagtgcagtggcgcgatctcggctcactgcaagctccgcctcctgggttcacgccattctcctgcctcagcctcctgagtagctggaactacaggcgcccgccaccacacccggctaattttttgtatttttagtagagacggggtttcaccgtgttagccaggatggtctggatctcctgatcttgtgatccacctgcctcggtctcccaaagtgctgggattacaggcgtgagccaccgcgcccagcctctgctttgtattaatttaaaactccaggtttgttcgggctgcagaaattatctgttggtcgacaaaagagggcaaggatattttcactgctgttctaagtactccctactgcctggtgcatacatagtaggtgctccagtgaatatttgtgcatgaataagtgaatctttcaaatgtacttatttactctaatgtaatcagaaattcttctttgcttctaagtaattgtattccctatatcccgtaatcacacacagcatacagttaaagcaatgcacagctctcaatttgccaaatatttcacagtgttttaattatcctaataaagctgtaaaaccaaaacaagcgtaaaggcgttgcttttggcttgctagtgtggagatgtaaagaccatcattttatccatctaagccttacaacctcaagagctgggccctggccccgtgcagaggaaaggacatgtgaggagaaagtctctctgaacttgcatagcacagtgcaacagaccgcactccctgggtgccagctcagtcatttgcatttgagattggttttttattttaattatcactcgcttcccctttggaattgagaggctcagagatgccgttatgcatgatatgattttgttaagaggcacataattgcttctgagtattttcatgaggtgcttctcagagcagcttaatatcatgcactcatggcatagcaacagggaatgcagctggggaacaaaagctggtcacctctgtggcacacacagagtcactgtgactgttggaggggttgaccgggtgacgccgtgggcagggcctgactcagtgatgtcagggaaggtctgtttctgcagtgcccgtgcttggcggggggatgggcaggggacagctgatgcggggaccgcactgcagcacactgcagcacaaagccacctccacgggcagcaggcaggctcgctccaggctgaccacagctcagagagcacctttggtgcttttctgcccctttgtctgccaccggatgttgatcttggccactcagttgcagattggttccagagtgctctggaacaagtgaaatggatgctgaaaactcgttaaccagatgcaagatttgtagacttgcagaagaaatcacagatctgtggctatggaggtttaaaattcagtcaagtcatttcaatgggatgcataacgatctccaagtaggttccgagatcaatggttgtctggcttagcagcatcaggaataagcagaggagtttataatatcctgcaaagggcaactgccatgctgcttggaactgaactctaactgaagagtcaacttcttaggcttcacatggaagagacctgtgatctgcaagatttcagatttctaacaaagaggcatggcatctggagtaaagacaccagcgcaacctctgtagtcatcttgtgttttctgctggtggtcacaggatgagaacggccgtgtgcaggttaccccacacagtgtgtattcagagttacctccctgtgggaagttgccactgagtgagacacttagtggcaggatcctccaagtttgcctgtgtctgtccatccatagttgtgcaattggaaggaagacgttatttttcgctttaaaagaggaagtatctttcttgcattgttgttcctggaagtagtttattagaaattaatatgaggaatctttttttttcttttttttttgagacagagtctcactctgtcacccaggctggagtgcagtggtgccatctcggctcactgtaacctccacctcctgagttcaagcgattttcctgtatcagcctcctgagtagctgggactacaggcatacaccaccacacccagctagctttttttgtgtttttagtagagactgggtttcaccatgttggccaggctggtcttgaactcctgacctcaagtgatctgtctcagcctctcaaagtggtgggattacaggcgtgagccaccttgcctggccagaaaataatatcaagattcttaaaaagcaaccttcctcttgcttttgtgttttagtaaagtaaaatcagtttgatctgaagtgaggactgaactgctgactgggtattgactgtcttttgagtagagctaagctttctagagagtgagaatattgtctccttctggtaagactgcctcatgcctatgcatcttttcttcccatcacccttccttcttcttggcgtatctggttatactcccagccctggggccagacagatgggttatctccatgtgcctcagttttctcatctggaaaatgaggataataacaacacctacctcacgtgatggttgtgaagagtaaatgagttaatatctgcacagtgacgcagtggtgcctggtgtgcaggaagcattctgtgagtgctatctctgcctgttgttttctctcacatggaaccgtcgtacgctttgctcgctagtcttggaatttatagtcaggatggtaaggagtggtgataaaatatttcttctccagattatccctttgcatgattcagatgactgtattttgaaaatagttatgttctcaacagttggaggagaaatatgtggtcacagctgttcagtcagcttccacagacattgacttcatttgtctaaagatgatggtgatggcaagcatgctaacctaggatttatcatgttctgagcacttacatagattaacagccctctgaggtaggtgtaactactgtccccatttaagggttgaggaaacggaggcatgaaaggttttgttctaagttcaaagctacacagcttttatatggcagagccagggctctgcacagccattcactggtctgactcctgcacacctccagctctatcgtctcctgcgtctcctgctctccctccctctgtgctccagccacacggtcttctgctccctgaaagccctgcctcagggccttcgcatgtgctattaccaggcctcagttctggacatgtttggctctttctcatcattctgagcaaactcgaagtgtcacctttcctgacttgtctaaactctgtccccatcccatccctccttattacgttatcctgccttcttcacttaccaaggcctgcctgtgctagagtagggagagacctcccctcttcgctattgaatatctggcacagtgttccttaaaatttgtgaggtgtggccaggcacggggtttcagcctgtaatcccagcactttgggaggctgaggcgggcagatcacttgaggtcaggagttcaagaccagcctggccaacatggtgaaaccccgtctctactaaaaatacaaaaaagattagctgggcctggtggcatgtgcctgtagtcccagctacttgggtggctgagccaagataatcgcttaaactcaggaggcggaggttgcagtgagccaagatcatgccattgcactccagcctgggcaacagagtgagattccatctcaaagtctcaatctctctctctctctctctctatatatatatatatatatttaacatatatatgatatatatgtcataagcgtatatagatatacatatatgaagcgagcgtgggcatgattgattttaacatcgatttaactcctcttatgtacatggataggtgacccaattctaacatgtgtatgtttgtgtgtgcatgcacatgtgtgtgtaaatgcaggaatgtggagagacgtgttctaatcttagtaaagtggtacagaatcacaacgtgttttctctttgagtttcaatcctagctccaacagtaattcctgttgtttctctgatgtagaagtgaagtacctatttatgtttgtctccgatgagacatgggttaaaagaaatgtggggctgggcgcagtggttcatgcttgtaatcccagcagtttgggaggccgaggtgggcagatcacgaggtcaggagttcaagaccagcctggccaacgtagtgaaaccccgcctctactaaaaatacaaaaattagtgaggtgtggttgcaggcatctgtagtcccagctacttgggaggctgaggcaggagaatcactttaacccgggaggcagaggttacagtgagctgagattgcgccattgcactccagcctgggcgacaccatgacactctgtctcaaaaaaaaaaaaaaaagaaaagaaagaaatgtggctgagtacggtggttcacacctgtaatcccagcacttttgattccttgagcccaggagtttgagaccaacctgggcaacatggtgaaactccatctctacaaaacaaaaacaaaaacaaaaattagctgggcatggtggtgcacacctatggttccatctgctcgggaggctgagatgggaggatggcttgagcctgggaagtggaagttgcaaataagcctagatcacaccaatgcactccagtctgggcgacaacgtgagactgtctcaaaaaagggtgtaacagtctcaggcactgaatgatgctattcctgaaataaattataaaagctagagcttggctcaggaaataaaatttaaaacaatttttttttgtaaaaactcagtgttttggtaaaagatatactacctttttttttttttgtctaacataccttcctttcttgctgtgattgctttcttctactagtttaatttaaattgtatttatttattttacttgctctagagggctctctaccagatctcatgtcagggtttccgttggggaatttgacaaagaaactagggggcaggaacctgaacctctttttgatctttgacaaaaagagaatttctggtcttttatccgagaacttcgggctgctgaaggtgccaccatcctgtgtgaggtggtgacagattcacgatcgtgctggggaactctggctggcggagacctctctggtttggtgaagttacggacggcatttggatgctggtcccgcaaggctggcgaggccacgtgttgactgcttttcttccagaacacaacctcactcttcctcctgctctgccctagataaccagttcaggatgtccatcctggaacgactggagcagatggagaggaggatggccgagatgacggggtcccagcagcacaaacaggcgagcggaggcggcagcagtggaggcggcagcgggagcgggaatggagggagccaggcacaggtacgaggcggtgctgatgctcagctcccatttcgcttcatgtttatggattggcgaggcagtggatggatcacaggcctcttctctgctgctgatgcggtccctgtattcaggcagaaggcctgagggagtactttacggtacctgtgcttttaagcattataatctgtgcagtatggaagaagccttggaatgtggagcttctcagttgtttacccccctaatccttaagttatctctattaatctcagaattcactactaaattacagggcagtgggaattaaggacaaccaattgaaaaatagaggctggctgggcatggtggctcacgcctataatcccagcgctgtaggaggccaagacgggaggattgcttgagcccaggagttcacgaccagcctgagcaacatactgagaccctgtctctatagaaaaaaaaaattttttttaattagccaggcgtggtgggacatccctgtggtcccagctactcaggaggctgaagtgggaggatcacttgagcccgggaggttgaggctgcagtgagccatgatcactccactgcactctgacctggtcaacagaataagaccctgtctcaaaaagaagaagaagaaaaaaaaaggccagatggtgacttagacctgctagggttcagaattaatttagaatcttcctactttctattctgtattttatccctatcttaagtgtaggtataaaacataattgaattcagtaattcataagccttttataaactcaaggtcagtatgaaaagagcccagagaaagtgtttatgtaatgattcagtgtagaatgacattatacattacagcctctttcacaaactttctgtaagttccataaagaatgtatgatattgccaagtacgagtaaattaccaaacattgtttcagagtcccattggtcttgaaggctttatatacatttcatttaggaagttcatttttgggaagtctcccagggagaaattatttctcaggggaccctagagataaatttaaaggaactgatggtatttcttatctccactactcagtcgttgcaaaaaaaacctcaaataatgccccctctttctcttcaagacaaatgatgatttcctttacacagttaagtttttaggtgaatatttttggttttatgaacctcataaatatcaagtttagttatattttaaataataggttaaaagaacatcatatgccacacccaaaaggctagcctccttcctccccgtgttttcatattgctcccctgtcttcagaaatcagcaggaaagaaacaacttggcacgcagtagaatattattaaggctaagataggcttcttttttttctttttgacacgaagtcttgctctgtcgcccaggtgcagtgcagtgacacaatcttggctcactgcagcctccgcctccgaggttcaagcgattctccagcctcagcctcccaagtagctgggattacaggcatgggccaccacgcctggctaattttgtatttttagtagagacggggtttccccaccttggtcagactggtctcgaactcccaacctcaggtgatccgcctgcctcggcctcccaaagtgctgggattacagacataagccaccgtgcccggccgatagtactaagttttataaaagaagtaatcattgtttaatttacctcatggctcacataagagatctccttaaaatacttttcctttcaccaacaaaagtggcataaaaggaatggtatgtaatgtcattttaaagctcagccactacgcagctggctcaaacgctatgcaactggcctagaatctcatcccatgttaaccactactgaatatcctttcatcagtttaagttgccttcagtaaatgtccgtgtttgccatgcgggatagagacatgactgtttttgtttaatacaaaaaaaaaaaaattcccttttcgttcactctggccatttccatgtgctcatgaatgtgtcttgtgtgtgtagaatggctgtgccttggccttttgagtcaaggtcagtttgcggcatgttgggatcacctaactctgctcctgtaggtgtttttacagctttgatgaggctgagataacaatcccatcatctgccttttttattttgggaggcattttttccacatttaaaaataaaaatcagcgaggagccatagtatttctgtagtaagtaaagtttatggagtttattgccagaaaaaaaaagtactttttaagtaacaccagagatacaaattagcctagaggtgccatttatttgggggagtgttaaacataaaactgctatcacagagactcacataagctgttgaagttactaactttcattttatttttcttccattacaactggttcataggaagtaacccatgtggttaaaattagtaaacttctctttcctatagcccttattgttattaataacacttaaatttcaggatctctaaatgcttttctcagtattctttttactttacataaaggactggattattggatacttctagtcatttctttaaggaaaaaacagtccgcatctaagtgatctaattctccttcagaagaagcaagaggctgggcgcggtggctcatgccaggaacctagcacttgggaggctgaggcaggcagatcacttgagatcgggtgttcgagaccagcctggccaacatggtgaaaccctatctccgctaaaaatacaaaaattagctagaaattgcttgaacctaggaagcagaggttggaatgagccaagatcgtgccactgcactccagcctgggtgacagagcgagactctgtctcaaaaaaaaaaaaaaagaaaaaagaagaagaagaaagagagtgaaagagccgctatacccgccagtggaaacattaggaaagctactctgctccactgtctcacaacagtttactgcctacaggaaggctagaaccacttttttttgtttaaggctgtgtacactttccccaagacgaatcggcatgaagttcctaatcagagtgtcagccctaatagatagactcgtgtctgtagagctgtggacttcagagaagtgctactgagctgaagctaagcacattctagtctcaatttcatggatggttcttgggggtttgggttttttgttgttgttgttgttttttgagacaaggtcttgctctgtcacccaggctggaatgcagtggcgcgatcacagctcactgtagcctcaacctctccaggctcaggtgatcttcccacctcagcctcccgagtagctgggattacaggcacccaccaccacgcctggctaatttttgtatttttagtagagatggggttagggttagggttggccaggctggtctcgaactcctgaccacaagagatctgcccgcctcagcctcccaaagtgctgggatttcaggcatgagccactgtgcgcagcctaaattttgtactttttgtagagacagggtctcaccatgttgcccaggctggtctcaaactcccgagcaatcctcccacctcggcctcccaaagtgctaggatttcaggcatgatccagcatgcccagccaatgtttctttattttcagtgttttatgttttccgttgtgagtttctaatcgtaaagcatttgtttcccctacatcgaagcgctgatggggtcgagggcctttagtcctgaggtcgtaacgtgcgcttttttgtgacagtgtgcttctgggactggggccttggggagctgctttgagagccgtgtggtcgtggtatgcgagaagatgatgagccgagcctgctgggcgaagtccaagcacttgatccactcaaagactttccgcggaatgaccctactccacctggccgctgcccagggctatgccaccctaatccagaccctcatcaaatggcggtaaggctgtggtgcagctggctgggggtcagcctcgcacatcctcgctcacattcttcctgagcactgccacccgtggaagaaatctacccattcagtccactttatagccggcgagcaaagggctttgtccttggacagtttccaagggagttttataaacttcttcccaagaaatacccagagagataagaattaaatgttggacttgtcattttctttggacccctagccaaatggagcgtccacactgccctgggactctgtttcttcaccatggggatgttatatacccagttgggtttcatcttggtggggttttataatattctggtgtttccttttaacggtggtgaatagtgtggtaatttctggtgctctcccttatagtacaaagcacgcggatagcattgacctggaactggaagttgaccccttgaatgtggaccacttctcctgtactcctctggtaaggaatggattcctgtagcccccccttgctgttcttccagtctggcataggatttgcctggttcccaccgttgtctcttgctgacacatggcatgtttcggagatactttgggatgggaatcttcaatggccccaccgagattgccagcaaggaccagtttgtcagttggcagcaatggcaaaagtcaggtctggtcttgacctctgattgagaacgcttgctgtgtctccctgtcttctagatgtgggcgtgtgccctagggcacttggaagctgccgtcgtgctgtacaagtgggaccgtcgggccatctcgattcccgactctctaggaaggctgcctttgggaattgccaggtcacggggtcatgtgaaattagcagagtgtctggagcacctgcagagagatgagcaggctcagctgggacagaaccccagaatccactgtcctgcaagcgaagagcccagcacagagagctggatggcccagtggcacagcgaagccatcagctctccagaaatacccaagggagtcactgttattgcaagcaccaacccaggtaagaattcagaatcatgacatctcagagcttgacagagatcccgtttgctttcatgcagctgccctcagcagagtccataggatagtcacatacatttcagtttttttgttaatgtttctgatttttctttaagaatgcctagtgctgccccctcccccagtacagaagaaagtagcaaaaattctatgttcatgcaagaaatacataattttggaggaggaagatctgaatctggtgtatgctactggggatatttaaatgttagggacgtgtcttgagttccggctttgcactttgtgtctctcaggcatagagaaagtgttgattcttgaggattcctagttgtatctcctgtcctgactatcctttctactgtacttttcagagctgagaagacctcgttctgaaccctctaattactacagcagtgagagccacaaagattatccggctcccaaaaagcataaattgaaccctgagtacttccagacaaggcaggagaagctgcttcccactgcactgagtctggaagagccaaatatcaggaagcaaagccctagttctaagcagtctgtccccgagacactcagccccagtgaaggagtgagggacttcagccgggaactctcccctcccactccagagactgcagcatttcaagcctctggatctcagcctgtaggaaagtggaattccaaagatctttacattggtgtgtctacagtacaggtgactggaaatccgaaggggaccagtgtaggaaaggaggcagcaccttcacaggtgcgtccacgggaaccaatgagtgtcctgatgatggctaacagagaggtggtgaatacagagctggggtcctaccgtgatagtgcagaaaatgaagaatgcggccagcccatggatgacatacaggtaaaaagcagggacagggtaagcccgcagaggctggtgcgttccagttgctgtgatctttatggtccatttccgaaggttgtgtcattttcctccccgtgaagccttcgaagttggctttgtgcagaacatcgttggagtatcttctttccttggggccacattttcattcggtgaatcgggcaccgggagtagggcctgaataccagtgaccccggtctcagcaaagccttccctctttgtaccaacttctcagaactcactgaggaccctacagtacgtcatctgcttcctccttgcatttaggttgattgatttcactgttttaagtactagttactagttagaatatagtcaagacctaaaaatagctagaacaggaagcccgtggatagattttgaattatctgagtgaccttgatcggcatagctatcatctagccattgtaaagggcatatatggcgtgaggctctcacgagggcagcgaaatattcctgaagctgataattgattgcccttataataaatctaaaaattccagaatcttttcaggaccttaaacttgttatggactaagagaatatataccaaaataaacttgacattaggctaataagcaaattccatctattaaaatatgtaggggaggaccataagggcagcctaaaaacatgtttgaattcctctctttccaacttcccattgatgcaacctaaaacaaacgtaaaagggaaaaaaaacgactcagaattcaacagggcacccatgcctgtagaagtgatacaaggagagggaggtgtgtggaggagatcatatgtcctggtcagcatatcttgggagaggcctgatttctgagccattcctgctcattgcatcccagggaccccttcatgccagccctctgctgtttgcagaggatgagaaagaagcttgcatgctcaccaatgtgttcccatttctggggagttgccgggggcaccacttctgacctaccgtattagtccattctcacgctgctgataaggacatactccagactggggaatttataaagaaaaagaggtttaatggacttacagttccacgtggttggggaggcctcacaatcatagcagaaggcgaaagtcacatcttatatggtggcaggcaagagagaatgagagccgagtgaaaggggaaaccccttataaaaccatcagatctcaagagccttcttcactaccacgagaacagtatggaggaaaccacccccgtgattcagttatctcccactgggtccctcccacaatacgtgggcattatgggagctacagttcaagattagatttgggtagggacacagccaaaccatgtcacctactgaccaccgcagtttccctaccacaacacatgggaattatgggagctacaattcaagatgagatttcggtgaggacagccaaaccatatcacctaccgaccactgcagtttccctaccacaacacatgggaattatgggagctacagttcaacatgaaatttgggtggggacacagtcaaaccatatcacctaccgaccactgcagtttccctaccacaacacatgggaattatgggagctacagttcaacatgagattttggtggggacacagccaaaccatatcacctaccaaccactgcagtcatagggaggactgcccagaaaaatcaaataatgttttagacaagagtctggtacatttcttctataaagagccaagtagtgaatatttttaggttctgtaggccatacagactttgtcctagctacttaatcggccctaacagcaccaaagcagccttagcattaaacggaggagtgtggctgtttcctagtaaaactttatttacataaacaggcagctggctgaattcagcctgccatcatttgccaaatcctgttttacacaattcctgatggaacccacaccagacaccaaaactgagcaatctagaactatataaacataaatatctaggaataagttagattacatcgaaaatcagcagctcaaaagaggggaaccaactgagcatcgagaacagtaccatccactagaccttcccacagtggtggacgtgccttctatccataccacgcaccgtgggagacacttggtgccacatgtggaatcgggcacttgatcagcatggctgtcatctagctattgtaaagggcatatgtatgaaatatagccagtgcaactcaggaactgggtttctaattttatttaagtttaaatagccattggatagagcagctttttgaaagtggccttcactgaaacagagttcatgcaggaaatagaaaataacctttaaaaaatccacttcctattttcacagatctgttagagaataacatcttgccaaattaagagcatgtgtctatgaaaaaagcagcagtctaaagaaagttttttagccaaatgagaagataacacttaaaaataatgaaataattttagaaaaagtggcaaaaccgttcatagaggagtgaacaatcaaacagtaaaactgagcaattatcgatagtgtggtatatgtgagaggaatttgttaggaagggactctttaaatagaagacgaataatgtttaaactatctcctagaactaaaattctaaattattttaacaaaaccagggagtgtagggaaatgaagagagtaaaagtgtatgaaagctctcgggttcagggacagtaacagattttgttccactcgtgatatagatagatgtgcgctggataggctgaaatatgctagttagaaatgttggccgggcgcggtggctcacacctgtaatcccagcactttgggaggccgaggcgggcggatcacgaggtcaggagatcaagaccatcctggctaacacggtgaaaccccgtctctactaaaaatataaaaaattagccaggcatggtggcgggcacctgtagtcccagtactcgggaggctgagtcagaagaatggcgtgaacccaggaggcagagcttgcagctagccgacatcgcaccactgcactccagcctgggcgacagagcgagactctctctcaaaaaaaaaaaaatgttaagttggtaggtagcataaaaacgggctacagaaggacaggtgcggtggctcatgcctgtattcttagcattttgggaggccaaggtgggaggatcacctgagttcaggagttcgagaccagcctggccaacatggtgaaactccgtctctactaaaaatacaaaaattagccaggtgtgttggcaggtccctgtaatcccagctactcgggaggctgaggcacaagaattgcttgaaccctggaggtggaggttttgctgtgttagccaggatggtctcgatctcctgaccttgtgatctgcctgcctccacctcccaaagtgctgggattacaggtgtgagccaccatgcccggcctcgggttgtttttttttttttttttaaataaaagcaggatatactatatgctacttgtaagaaatacaatcaaaatgaaatgaaagagaaacaatgaaaatgaaatgatagataacagctataatagataaacgagtataaaaagaaagataaaaagtacaattcaaggcaaattaatgtgtgtgtgtatatatacatatatatatacatacagtttatctagaagatatgacagttataaactattgtgtacctagcaccataaccttgaaacattacagcaaatactagtaaatacaaagaaatgtggacccataatcacagtgtgctactaacacacatagctcagaatttttcagatcaagtagatatgaaaagcatatgaacaagttgaacaacaaaatcagaaggcttgatttcatatatatttactatatgatagatttaatatatgatatacttatatataactatatgtgtgtatgtagttaatacacatagcaactacgtatataattgttcttttcaggtgtccaaggcatgtttatgaaaactgctcatatactaggacacgaagaaaatttgaataaaaatccaaagctacccatttaaaggccgtcttctctgagcacaatccatgaaatttagaaatgagtgacgtgacttttcaggtccaactactgagaacgttacttaagatgtttttacattgttacatgtttataaaatggaggatttaggaaagtgattgtagagtgataaccttttaggcttcagaaattccaccttacttttaatatatttgaatactttcatggaaaaagaataaagcaagatttacttcctaccgtttgagtcacaaatcaagacggccaatagagaaggtgaaagaaagctgcaatttttttttgagacagagtcttgctatgtcacccaggctggagtgcggtggtgccatcttggctcactgcaacttccatctcctgggttcaagcaattctcctgccttggcctctctagtatctgggattacagatactgtaagaaagcactaggcctgcaccaccatatctggctaattttgggggtttttttgggtagagacagggtttcgccatattgcccaggctgggcttgaactcctgagctcaggcgatccacccgcctcggcctcacaaaagtgctgagattacaggcctgagccaccacgcctggcccaatatatttttcttaaattttttatttttattgttattacaaaaacgaattgttctttgatgaaaatttataaaattatccacaataagcatttttaacagctttattgaggtataatttacgtatgataaaaaatttataaaattatccacaataagcatttttaacagctttattgaggtataatttacgtatgataaaatttacccattttaaatgctcaggggatggcttctagtaaacatatacagctgagcaaccatcaccatagtccctttctagaacacttccatctcactgcacggtgccctgtgcccatctgcagtccgtctctgcccagccttaggcaaccactgatctgattctatccccagaggtttgctttttctagacatttcatgtaagtggaatcatgcaccatgcagcccactgcggctgtttccacttagcaggatgttgttgaggctccttcgtgttggcaggagaagcattttgtcactttgtatagttccatcgagaacattttcagttcacttaagaacccgaagtgctgtgtttcagttaccactcctaagaggtatgcaaggacatttttaagaatcagtccacatctctgattctcataaagaatatcttaatccagaccagctttgaggattctttttttcttttcttttcttttttttttctgagacggagtcttactctgtcgcccaggctggagtgcagtggcgcgatcttggcttactgcaagctccacctcccaggttcatgccattctcctgcctcagcctcccgagtagctggcactacaggcgcccgccaccacgcccagctaattttttgtattttttaatagagacggggtttcaccgtgttagccaggatggtcttaatctcctgacctcgtgatccgccagccttggcctcccaaagtgctgggattacaggcgtgagccactgcgcctggcctctttttttttttttttttttttgagttggagtctcgcgctgtcgcccaggctggagtgcagtggcgcgatcttggttcactgcaacctccacctcccaggtttaagtgattctcctgcctcagcctcccacgtagctgggattataggcaagcaccaccatacctggctaatttttgtatttttagtagggacagggtttcatcatgttggccaggatggtctggaactcctgacctcaagtgatccacccacctcggcctcccaaagtgctgggattacaggcatgagccactgttcccagcctagaccggggttctctaggccagacaaaagggggtggttagatattggttatgtaactaatagtgacacctcattaatattacaggttactctagaactgcccagtgtcattaattggttgaccctgagagtagggagtacatacaagccagaagttctccaagactggactaaaggtttggggccagactatgacttggagataatcaggtctcaggatctcagcacattttggtgtgttatgttataaccttaaaatggtatttcattgcattggattgaggtggaagtctgccctcctgcctgattatttttttctctccaaggcgaggcagggaggtagacctggataacttgtaaggttcctttctaacctgagtgttctgtgaacttctgacttcaggtgaacatgatgaccttggcagaacacattattgaagccacacctgaccgaatcaagcaggagaattttgtgcccatggagtcctcaggattggaaagaacagaccctgccaccattagcagtacaatgagctggctggccagttatctagcggatgctgactgccttcccagtgctgcccagatccggtgagtaaagttacggaggtcactacccagcatagattcccggatgtaattggaggcaggggaggctgattgtatttgatgaatgccgtgtcatagaagaccataccaaggaaggaaggaagcatgaggacaagctctgttgccactttcaaggcccagctcctattcctacctctcccattattttttttactgctatcagagcataagagatcgtgttaagctgggcgcggtggctcatgcctgtaatcccagcacttttgggaggccaaggcgggtggatcacctgaggtcaggagtttgagaccagcctggccaacatggtaaaaccccgtctctactaaaaatacaaaattagccgggcatggtgataggcgcctgtaatcccagctacttgggaggctgaggcaggagaattgcttgaacccaagaggcggaggttacaatcagctgagattgcaccactgcaccccagtctgcgcaacagagcaagattctgtctcaaaaaaaagaaaaaaaagagagataatgtagcataatgtttccccctaattcagctgaagttttctaatggcagtagagtgtactgctactaggttttagtatttagcatagtactaaagttatgataggtgttgagtataaacttactcaatcgaaggacactgggtatgtttagcaacttgcctaactgaatgaaggcatgttcctaattgcccacagtggcttctggcagataccatcttggctcattcattaatatctaatgggtggtgcaaatcaatcattaatctgtctctcctttttctcctcttgtttcagaagtgcatataacgagcctctaaccccttcttctaataccagcttgagccctgttggctctcccgtcagtgaaatcgctttcgagaaacctaaccttccctccgccgcggattggtcagaattcctgagtgcatctaccagtgagaaggtagagaatgagtttgctcagctcactctgtctgatcatgaacagagagaactctatgaggctgccaggcttgtccagacagctttccggaaatacaaggtaaactagaacagaaccttcgttttgtgacattcttaagatcagagaggacagatgaaagtcagaatcatgcgaacaaaaacatttactatttctttttttcctctgaatttgtagaatttttttggaagtctccaatttattaagattcactatataacatatctgtgtgtgtatctgctttgtaaaaatattttatggtaaaatattcataacataaagtttgccattttgtctgttttaaagtgtgcagtgtgggggcattaagtatattcacagtgctgtgcaactgtcactgctacccatttccagagctttctcattctcccaaaccatttgcttttaacaaccaatttttaaacagttaaacatgaaatttttatcaaatgtttacaaagttcctaaagcaccttcatagaagagtttcagaagcgtagtcttctcagttatctgaggcatagagaataactggctgggacaagggcccatccatggttaggccagggcgggaatggggcttttccggcacagaacaatgctgatttttctttttctttttttgaaatggagtctcattctgttgccaaggctggagaagtgcagtggtgcaatctctgctcactgcaacctccacctcccaattcaggtgattctcctgcctcagcctcccaagtagctggaattactggcgcgtgccaccacacccgcctaattcttgtatttttagtagagacaggttttcacaatgttggccaggctggtctcgaactcttaacctcaagtgatccgcctgccttggcctcccaaagtgctgggattacaggcatgagccaccgcacccagccttgattttcctattctaccttgccatcctgagtacaatgtctctttattattccttaaaacaaatttcatgagttcatagaatttttaattaaagttattaatgtcacattaaataattctcagaagctttagtaaaataatgttagccaataatgtaatggttatcaccatgtcaacatactgttggtaatgataatgcgtattattcagttaatataaagtaaggtgacccctctgctgctaggaggtcgtgacctaaagcaggggttttcaactggaggcctgggggctgactccaggcagcccctgaactcctaaaattaagcagtaaagctttttctgtgtgcatttttggtgggaaggggacccatggctttctacagattctcaaagtagtctctaaccactcccaaaaaagtgttaaaagccattaatcattgatccaaaagtaaagtagttggggttatcttaggaaagatagttgagatctggcaagacaaacagtacaatgcctaatttgttaaatactttaaaagggaatatatttttagtctgcttaacattccaatatcatagttttatttagaagcaaggatagtctaaggtttattctataaattcatttttcctcatttataattaattatcaatattttttggtaaacctgggatctcaactctgagaaggtgcattaaatgagtagtaataaaaagctgacatttctggtagttaatcattactgattttttttctccttactttacccttaagggccgacccttgcgggaacagcaagaagtagctgctgctgttattcagcgttgttacagaaaatataaacaggtaaacctcagttttgcaccacagaaggaaactgtgccccacccaaggccactgaagatcctggtttggctaaagagcactacatctagtacctcattacagagacttaatttgttttttggttgtttttttttttttattttttttttgaaacggagtctggctgtgtcgcccaggctggagtgcagtggcatgatctgggctcactgcaacctccacctcccaggttcaagcgattctcctgcctcagcctcccgagtagctgggactacaggcgtgtgctaccatgcccagctgatttttctagttttagtagagtcggggtttcaccatgttgccaggctggtcttgaactcctgacctcaagtgatctgcccgccttggcctcccaaagtgctgggattacaagcatgagccgcagcgcccggccagagacttaatttgaactgccatgataaaacaaacaaacaaacaaacaaacaaacaaacaaaaacaggggaagccacacatgatggcgtgtgcctgtaatcccagctcctcaagaggctgaggccggaggatcttcttgaacccaggtgttgatgtccagcttggacctcgtctcaaaaaaaaaccagaggaaaacaaaataaaaccatctgcaattagacttgtaccgcaaaagggtttttgtccaaatttttgatcttttagtaatattacctacctgagatactggtctgatcctaacaccagtatctttgcagtgaggatccgtggtccaatactttgataaactccctagtaattagagaactgtagggaatccagggtgtgataccgtgattggagaaagtaaatgctggctatttattacctttgagtttgaattatataaggtatttaatctttggccattttcctttcagcttcttatccattttaaaatgaagaattgttaaaatctttgaaaatcagaagaagctcagaacatcttaaactgcttttgtgcaccttagttaaaggtgcaagaagattatctaagtactctttcatgcagtatttctgtttgcaaaccaccttgtagggttatgtaactagtcagatgggaaagggaagtcatatttttggggcagctagtatgcactagattttttaggtgccccatctcatttcctttttacaattatttgaagtaagcagtatttatttccagtttacagatgaagaagctgaagctcagagaaattacatgaatattaggcctttctcattatcaaggtggttataaaatattaaaaattgcctaatggagttttgactggttcacacgataaaattcaggcctgtcagtagattcgagaaccttttatcagattgtgctttaggtagttataaatttttatttaaggaataataaattctaatatgtgtaatggtcacatagaaattagggattctatcaccttgtcataatccaggacttgcctcaatttctgatatgggttgccgtttcctcaagcttctctaggattaagccctattaatgggggtggggggacgtctttggcttcgagccagttgagttcatgatcccagaaaaggaaggtttattgtgcaaacgctgacaccacagtgcctgtagctctatagcagggagccgcactggcttctgtttggtgagcaggcttcctgggagcacaagtgatacacagaatgaaggtttcaagtctgtgattacaacaggtattgattccaaaatatgagtttggttttttaaaaaaaaaaaccctccccagaaactgtcatctacagctaggaagacagaaggcattatttttggaaagagtaacaactataaaacaaatattttggaagatggaaggcattaatatagccaggttgccttttttttttttcttggttgggagttttattgattctggtttttaatttcattatattcagcaatgtaacattaatcttgtattttctgtttttcccccaagctgacatggatagccttgaaggtaatgatacacccaagccctctcacaaaccattccaccagagtcacaaacttcacacccatcaccagctacagggagggccattaagatggcacagtcatggagtaaacatatcccccttgccaggccacctaagcacagttcctctgtcgtctggggaccacgtggttattcagctggagtgggtttcgacattaataactggacattttttggctggtgttaatccatctaagccagttcctgtgagccctgtggccactaagtaaataccctttttcccaaagcgcttcactgtggcccgatgggtctgagtgtgtagtgtgcacaggtggagacgatggaaaccacaggggctctgtagtctgcagcattcttgtcttcaaagactttcagaccagtgaaaaggtaaagcaggtcagataagaccaaagaaggttcttgcagaagggtcctggttcttggacaattctgagaagtcagtttccctccctcatttcacctcctcatacatccagagatacagttaggcagatacagggattttctggggaatatttttccttgcgacggtaagttgccgtcttataagcaaagggcttcattgcaacttctcatccccagagtcatactctgtttgattagaaatttggacgtagcattttaagaccatggagagctctgtatttttagtgcctagagactgatgttgagaattcaccctgggccttcgtccctcacttctgtagctctgcagcgggctgcgtggaggactcctggcactgcctcctgggtcgtccgcagctctgtgacagccgtccaggtttcacggcttcaccaccgtgttggtcttacgagtgttcatcttttacaggttaaaatggcttaaaggtgtcagcgtttcatgataagccttgtatttgggaccttgcaactcagtcagaaacttgtcgtgtggaatgatagttaaaaatcagaggctgaatgctaagtagatttgtgtatggtgggaattggaaggcataaaaaaattatgttagtgtttcaaaactggatagaaaatattaatccgaagcatttaaaattttactgtcgaaatctgtttttagattcataaacgtctaagggtattgctattaaaatttttctccaagaagggcaagatattttgatattttagggaaaaaatatatgtctgaaggcaacccttaaagtaatattttacattttggaaaggtaggtgtaaagattcctcatttgcctcttttgtgattaaaccccggacagagaatgtgataatagaggggaaaagcattttctcttcttcccttcccggtaagctcgaaggacgctgagcccgtgcagcccctgttgttactgtgtcgcttgttcttgtttcccctgcagtacgcactttataaaaagatgacacaggctgccatccttatccagagcaaattccgaagttactatgaacaaaaaaaattccagcagagccgacgggctgctgtgctcatccaaaagtactaccgaagttataagaaatgtggcaaaagacggcaggctcgccggacggctgtgattgtacaacagaaactcaggtgggtggagaagagctcatggaggtaaagctccctagggaagagaactctgacttctttgaaagacttgtcctgggctgacattggagtctggggtgggcctaaagcattggcagtcactgtgttccagaacgttttaggcatggtggctgataagtacacctgtgctgagtctggttttgaatatttagctctttctctccacctcccacccaattattttgatattgccacccaattttaccttatatcagaatttggcagcaccagtttctactcagaaagttaccactcaattatagtagtttaacccatttcctgtttaggaaaaaaaaaaaaaagtacagcccgctgccagcactcatgtaattttacataaacatgctctttgaggctgaaggaaatctgattttcaatgtgaaaataaaatatgaaaactattcttggagttatttctaaacagaacttgttcctaatcctaatgtaactgaaacgtatatgatgctacattccgattagagacaaggctattcttgacacaaatgggaaatgagtgaaattgtagaattactgcatgtgagaccttgggagagtaattagggttaagctgttccattttagagactgtaataaaaatgttgagccaagtaaaatatattgatcagtacatttacaaaatagcccaaagagtgtatcaactccggtgaatcaccttgtaaactaagaaagcctctctaatgccagaatgccttttgtggcaaaatgagcttataatgaattgtggaagaatatttaagtgacattttattttcagtctttgtatagtctgtcttgaagctgagagcgcctatacacaccctcctttctcctctagtgatgcccggactcgatactatgggaacagcatacgcactcatcccccttcagattgtatacatctttaacatatgctgttggctttgctacacgaactgcttaattcagagtcctctgtcactgctgaccagttttccatattgggctttactgtaaccttcttgtgacaataatattctgactttttcaggagcagtttgctaaccaaaaagcaggatcaagctgctcgaaaaataatgaggtttcttcgccgctgtcgccacaggtacactagtccttgtttatacattctgctcagggagaatgatgaagcaaccctgaccttcttaaccctcactaactcctatgtaaagctaatccccctgcagataatcagggcagacgtcccaaattacaatagggcggtagagctctttaactagggatcaggttgctacccttggagtgctggtaaccatgtcagacgatgctgtttgaacaatggagattcatgcccgtgtttttctgttttaatttgggtgtgaggtcaacttagtcggactagcttttaattctaagtttctctttaacctgtgattgatatgccacattgcagtatgttctttgctctaatcctttactatgctagcgcgtgtccaaacagaaaacagtttctagtctcaaggaagggaaagaaaaccacgaattccaaacaagttttctgatgtagaatttccaccagatagctggtgccctctgctggtcatgtaatcgccaacatgctctattattaaactatcaattaaagccggtccgtgatgaggaacaggagagatcactggaatgcagctgttcaggaaaagaaagacatctgagactctgggcacatcttcaattagtaggaaatggggtcctgtgaccccagcattctgtgggatgcagcatcttctcatggagctaagccagaggaatttctctttgttcctcaaatttgagatttctttatgaagactagcgtctctacttagatttcagagggctggtgaaagtggtttgtgttctttatccaggtgaatattccagtctgacgtctgtaactgcggccatccgagctgggtgtagaccaccttctgtgtggttgggttgttgctctgtgtgtcaggagctgtgcagtttataataccaaacattaaagcagactctctaatgtcttacttcctcttcctatttaattataccaaaagtcctagtattcatatttaattggattccttggatgtttcattttgctttagtttttcttactcctataccatatgattgccggctttgaaaatatcttgcctttaagacttaataggtttaatgggttatttgtacttttacttaaattaacagaagaatttatttttgtgaccatagaaggaaacatgcacagccactgcattaacatcataaaaacttaaaaaacggcattcactaagatagatggttttccccagctatgatgccatgcagaagctaatgttcactcgccctgtgcctcagcaacatttactttccaccatgcaaggatgggagatttttcaccatgatagctaatgagtaacataccagtgtcagtactctgaaacaggaagtcctgttaggaaatgcatccccaaaacgggtatggctctaagatcatgaaattaattctgcaagccttaccaaaggcagcctctttcctttattattcaatcataccttttacttagcagggacttaggaccaaagagagtagctgattttctttatatggtgaacagatcaaggactcacctgggcccttttccttacattctccaatacgttcatagttccttcctcccttttcctcttcgacctgcaaaatgaaaaacctgagcaagatcctatccagcactgaaaccaatagactttggccactttgagcagaatcacatcttctttcatgacactgtggttaatactttccagatagattttgttttcaagaaaattaccttaacaccactcttctttaggccacttcagacaaaccagaatgtctgcaagttaagtcgtgctagactttttcctcctttcttctagtctgatcctcaaactttgaatgaatgtgtgggtaacgtgggagcaaaattgcataaagtcctacactcatctcccttttgtttttgccaaagctgtgtcccgtgtttactttgggagagttaagagaatgagatatttaaacaaaacataaattcatgaaaggttgcccccacaaagtaagctgaacaaaggagtcctttcacttttgtttttagagttctctttctgtaaactggtagaggaaaatttcatgaagatttttgccttaagtataaattttaactgttaataaccttataagatggataacaagaaggttcattatgaagagaacatcagatacgggctctggattcctgtgcattaattggaatgaaataaaaaatgttattggctctttacttgaccatttacagtttagatgttagaaaaataggcaaattttaatagcctctgtaataagatcagtattcacttcccatttctatatattcaattaatatgttcaatcttgaagaaatcctaaaaatctatcctggaagtttgttttaaactgatattttctttaggatgtgtgtaatcctattttcattctgggttgagttatttaatgttattttaaaagaaactattcatgtctgttgtccttagaagcattaaaatcttattaagatagaaaaccttggccaggtgcggtggctcacgcctgtaatctcagtactttgggaggccgaggcaggcagatcacttgaggtcaggagtttgagaccagcctggccgacatggtgaaaccctgtctctactaaagatacaaaaaattagctgggcgtggtggtacgcacctgtaatcccagctacttgggaggctggggcaggagaatctcttgaacctgggaagcggaggctgcagtgagccaagattgcaccattgctctccagcctgggcgacagggagagactccgtctcaaaaaaaaaaaaaaaaaaaaaaaaaaggaaaacctcatatgacaccctctcaaaaaggtaggtagatagtagcttcaggaatcagtcagaagtatcccatttctaagtcatatgaccccaattttttaagacttaaattgatgaatttttttacctactcatttcacgtaccccaccatcactctccttttctttctttccaaaaaagaaaccatgttatattcttttttgttgaaataaagctatttgtaagatttctgttgtgaccctcatgtgctaatagctctctggtgttgttttactgtctaaagccccctggtggaccataggctgtacaaaagggtgagtttagctgcctgctagccagtttctcttctcttccattttcagtattttgctttttgcttgcttgcatgaggctgcagcctaggtatgccagtaagtttcacatccattttgaatgaattaaaatcaagtaaaaactaaccctaattactaacactgctattttatatgacaggagaacagtcacatacattagatgtacaaatgcatgagtgagtagaagggagggccgttccaaaccactgcagggcatgccgaggatgcggtggaggaagcctcaggacgaaaacagggctggcaggccacgtacacggccaaataacgctgcgttatacgaaaacattcagccagtggctttttgtgattaagataatttgccacatgaaattttctcaacgattgctttgtcaaaatttctaaagcaaggaggctcactaggaggtcgtactagggttttttttttttaatgaatctatttcttactgagaatgactgtttccctataccctgctcctgtgcctgcattttctaaatctctccctccctggtgctgtgaggtaagtcactgtacaaggctgccctttcagaacaaacccaggacgttcattataaaatagcgaactggccttccagcacttgatgggaatgctgaataatgaaaatgtggtgtgaaatgtctcgaatatttatattttacataacaagagcagggattccaataggctttgaattttagagaaattacaatgagtaattttagttcctgagattttagaatatgatgctagtttgtaagcagggcaaaaggcaacagtctcccagaagcaactataatgtgtttgaattataataaaagatttagtgtccgaaaaccattttttcaaagccaggaataggccaggtacgatggctcatgcctataatcccagtgctttgggaggctgaggtgggaggagtgcttgagcccaggagttcagtgccagcctgggcaacatagggagactccatctctacaaaagataaaaaattaaccaggcgtggtagggcatgcctgtggtcccagctactccggagactgaggtgggaggatcatgtaagcctgggaggttgaggctgcagtgagctgtgaacatgccactgcactccagcctgagcaacagagcgagaccctgtctcaaacaaaacaaaacaaaacaaaacaaaaaacgccaggaatagaattcatcaaaatttaattaatttaaatgaatttagattaatttgacaacctgtttcttatatataatcttaagagaaaaaatgagttgaaattataacatgggaattttctctatcaactcaactatattcaatgccccctcttcttaaccttacactaatactttatttagtcatctttaagatttctgagaaaaggtcatagttcaaaaaatcttaaaactgctaatgtttctggagatattatttcccatctaactagacttatgttggtgctaatctttatttattatattttaacccagaagttggcaaatgtttttctgaaaggccagatagtaaataccttaagctttgtgggctgtatggtctgtcccaactactcagttcttttaatgtagcaggaaagcagccacagacaacacataaatgaatggctatggctgtgttctaatacaactttatttatacaaatagatactggactagattttggcccacaggttgtagtatgccaacttgatgatagaagaatttagtttttataagttcttcttaataatgaccttaaccctagatttaaaagctttaaaagggccggccatggtggctcatgcctgtaatcccaacactttgggaggccgaggcagccggatcacttgaggtcaggagttcgagaccagcctggccaacgtggtcaaaccgtgtctctactaaaaatacaaaaattagctggccatggtggcgtgtgcaggagaatctgttgaacccgggaggcagaggttgcagtgagccaagattgtgccactgcactccagcctgggcgacagagcaagactctgtctcaaaagaaaaaaaagagaaaagcctaaaaagccttaaaattttaaagatttaaaggctcatttatttaaaactataaataattgctaaaggaaaaatttgttttttgggggaaaaaagcagctatactcttacgtaaacttaactaattaatcctctctagacttaaggaattgttctcaattaaaatatttcaggtcccttgtgatagagctggctcggagacgttttttttgaaatgtaagaaaaaaagaggacaaaaatctccatttctccctctattccctctcaccctctgcatatatatagataatctttctttccattttaaaaaacctccaagagaatagatgcatgccctagtgttcagttcaactacaacttgtagtatcatgcatgttatatgcaattaatatcacctgctgcaaggacaacatttttacgggaggtggttgcttatgcgtttttgaaacttgttagtttctggtatgttaatgaccgtttttaagagcacattttcagaaggtgcttttcaatgcaaaccagaatcccaacctcaatttctttaatgcctgctgcattctattgtgaactcctaaaactcctactcatgcatggaaagttggaatctcatgacaccccttatgcctcacgacatctatgcaagtttgagagataggggctgagaaggttccttctatcctggtgatatttagctaactctgtgaaccaaggaatagcgtatatatggctttgtatgattgccaataagatcttctctccctcgttcttccatcggagaagtcacagtggcactccctctaacaatccccaagttgaaattagtcttgggaggcagagcattctctgaggaagatttatagtcgtggaaattatgttaagataaaatacttatttttgggccgggcgcggtggcttacgcctgtaatcccagcactttgggaggccgaggcgggcggatcacgaggtcaggagatcgagaccatcctggctaacatggtgaaaccccgtctctactgaaaatacaaaaaattagccggttgcggtggcgggcgcctgtagtcccagctactcgggaggctgaggcaggagaatggtgtgaatccgggaggcggagcttgcagtgagccgagatagcgccactgcagtccggcctgggcaaaagagcgagactctgtctcaaaaaaaaaaaaaaaaaaaaagataatatacttattttgttaatttgtaaagtattccatatttaaaacatggtttatacattgaaaaataatattttcccagctactggaggctgaggtgggaggattgcttgagcccagaaggtcgaggctacagtgtgtcatgatagtgccactgtactccagcctgcacaacagagtgagaccctgtcccagaaaagaaaagaaaagaaaagaaaaataatatctggaaacttacagaattaaattttatgggacagtatttgttaaacactaatactgacccaaactcctacgtcagtggagcagggggagatctaaaaaggcagaattaagacacgacagacaaattccagcagcagagcaatcagaaaataccacttgtgtcttgaaatgtttagtctttgcttggggaaggctaagaaaaagcaccaaatatttttcactgagtacagctcacttttatccccctttccttcaggcctacctcttaatttatccagtaacttaaagtgaaattaacaaactctcgatactgtcatcagggtttttggttgttttgttttttgtttttctgttttttgtcttggacacaatagctgtgtttaggagagaacttttgttctacacaaagagattatttaaattaacaaaagtgatttctcagcaaatgactgaaggatttttaaggtttaagaaacttttaaagtacatatgctgaaaagatactttcatttggattttgagtatatctaacaggatattattcagttgcatagagaaaaaccaagatacctcatatgttagcaggtagttcagttacataacagatttatcctcaaggtattgagacttgcttgacctaaaaaaataaaaactaaaatgcctgtttttctagacagaaaatgtctttccacttctctaagacatttatttttcgtggatagtagaaagtgttctcatagatgagtgacaccgctctttgaaaagcaatttctagacaaattcctcctttcccgatacgagacactatttctgtgagaaggctttataaactgtaacaatcactatgggtgttattaaaagcagtgggaatgctagtatttaattaacctatttcttataaactgctggcctagtcacctgtgttcagtaaaggcaggtgcagttattttactggaacaaaaccttaattggaggaagaagaaataacactttttagtcacatattttcaaacaacatattttctttttatttgagaaccgggtttccaaacactttgccagaagctggtaagtaggggtctcaacagagcagctctgctgtgtgcttctgagaacagccccgggtcatagctgcactgggtcattaccaagttctgaaaattacgcttacacttttggctgttttatgtacacttttatccaagggacagttctctaacaatgcggggaagtgtactgagaagtaaacagtgctctagggtcaacaaatgtgttctcacacttccgtagctcaatttggcatgaggcatagtttctaagtggcccgatgtgttcatgagaagtaagacgtgaatgtgggatgtgtcatcatggatgtattttaaatcttcaaagtaattttgtctcacttgcctcttttaggaaatgaatatttttggaacacagtggtgtgtgttaaattgcagacaacatgctctgtgtcattcttattgggcctctctgtcttttttgttttgcaatccaaatgagatttctggaaaatggcaagatctctcttttcctaaattccccacaagctattgcagctctcaaagcaacaggtaataatcagaaagccgcatccgctgccctgtctatttttgacgtccagcattgcgagaatattcccgctgaactccactgactcatgagacatttctctggctgagcatcactgagtagatgtaatgaagcagctttgccttacgctttacccatggagccattgtttgctacaagtttctgaagcaggcctacttcattgattcataaatgatcattggacgtctgatggaagtaaaccctgtgggcttttgctggctttcagtgctgttgcttacgacatcacttcagtacattacgatgcaactttttgggaagggggaattgagactacaatggtatcccagagtggtgattattctcagcctagaatgcttggggaaatactgggattgtctttaatgttaatagctgaatggtaacaggtcagtcttgctattctaattactgtgagtctgagccaataagagttctactttgcaagttactgataggagtcagaaatgtggccgcacagctctcctgagggcagcactggcgctgtgggaactgtagcttctgtcctgcattgcctctatgagctcagggaagactgctttgcctgtcttctgtgtaagtgaatttagaagtaagtgcagttataattttttttttttagatagcctggacatttttagattcagttctttcttagccctgaatgagtcgaacagttgtaattccttaagagaactgagcactcagtaacccttagctaagtgtgtgtaacataacaaaagtttatcatgcacctgtgttccaagttctatagatatggtgaccacaggtcctggattttcaagtctaattccaatttcaaaaattcttgtctatatttaccaagtttgtatactgaaaaatttgcttacaacataggtaatgttaatgaaaccagttcagtccattgattttggtttcagtctacaaaattgaatttttttccttccaatgaatttttcagttgtttttatataatatgaacacagcatttgtaagacagattagtaacagacagatagaaaacgatctaattcactttttttttttaagactaacaagcagctcatgcctgtaatcccagcacttttgggggctgaggcaggagaattgcttgaggccaggagttcaagaccagcttgggcaatatatttagatcccctgtctagacaaaaaaattttaaaattagccaggtatggtgatgtgtacctgtagtctagctactcaggaggctaaggctaaggattgcttgagcccagaaattccaggccacagtgagctatgactgttccactgcactccagtctggtcaaccctctctctaaataagtggagaaaataaaagctaacaagcaggaataattattattacaaaagcagcacatactaattgtagtgaattctggaaatacaaataaccaaggagaatcacccagagataataatggttaaacttctattttgtatccttctcattggtaaagatttatttttaacatctgcctgaataatcattcatgtccttaactaataacaaggtgatcataaatttagccatttgaaacactctgatttgaaacatctatttcttaaaatttgttttaaaattctagtatatgttattctaaatcactttggtgatataattgttttctgtttctttggaggcaatataacattcaaacattattttatccagttgacatttgatttaaaacaaaacaaaaattaagccccactgtctcatcctaataatctactctcaagtaacataaaacttcatttatgatttcactagggcagatagtaagcctctcaatttcatgttaactttcagaggtaagttaacatctatatggtccataaattgcaaattggagaataaagctaaaaatctcccttgattcttacacacattcttttcacacattttaggattctaaataattgtgttgtaaaatcaataagtacattttatgtgagggtcttcccccaccaagaatgttttttattaataaaatcaatatagtgtcttataaaagatgacaccttagaattgagaaaatgtaattgttgttaatttcatctcataccatggaaattttccaaatgcatgtttcttataaagtcttttagaaaaaacaataaaatatgatttttaaaatacttctgtgttatcctgggagatatttttagagacagtgaaatgttgaaactataggtttggaagtcagacaaacctggactcaattccctgttctgccatttattaactgtgtgaattggggcagattgcttaattcctataaatctcagattctgcatttacaaattggagctaatggcagtgttgtgaggactacataaagtaacagatattaagtaacctgtatagctattggaatttaatactttttctctctcattttccccttttttttctaattcctccttgaacgactttctgtaaaaaatgtttgtgccatttaagtcattttgatgtcatgtataatgctagcatactatgataactttatcatgaagctaagaactaaattctccactttaactcaggagttgtggaagcctggaaaatatatctgaaaattgcattgttctcatttttcctgcgtagacattgtacgtggacatgcacctctccttaacctcgtggtctgtgaggccatcactaatttcatagagtatttacttgacaactttaaaaccttatgaaaacttaactttttaattagttctgaaagaaactgaaaaaactgcaaaaacaaatgtgaccattttaactaaaagaaaaatgtttagggtatacctcccctgaccagctgattatagattctttggtatgaaaccacataaaacatttctggcttataattcactctcctttttatttcatctcaatgatgaacttaatatttctaaagcattcctgttcattcgagaaaaattgtgaatgtataacatcgtcgtgtttatgctatcagattttgagttcagaattcctcaaattatagacatctcatcagtgatggagtcactgtcgcatatttgtgaatgaggtctgtgctagtgcagaaagaaaatgtagcatttgaagtggcatgcacacgctgcagaaattcagcagataggtctgcacaagtacagatattgcatgtccagaagcgaagttggcatcagtgcatgccttgcatttccagccaaagggatgttagtatagatattgcatgtttaaaaattgaacagactatagcatgtttcaatttttaaaaagccatttatttatcaagtatgcatgtccaaaattagggacctatagtgatgtacaattctatactgtaatatgacccaaattaatccatggtatatttaattataaaatttaaaactaaatgatatttggatctactcatgaacatagcaatgtattctaactgtgcctgttaacaaaaaaagattcaacagttttagagatacactgtttgtcactgtcatttataaaaatcacactaggaccaagctagggcttggtatatgtagtaagtaaatcagacaagtaagcaagttttcaaagattataattctttttagtattactgataacatcataaagcttttcttctaaaagagagcatcttctctatgaagagattgtatcaactttgcagaatactcagaaatgattctgcttggaagtggtaaatataaatgttttcttaaattgctattataccatatgtgccattccagactctcaacctatacaatatagcaataactgattactggttttttcacactattttctttctgcctgagtattatcaggttttacttgaggctgggcctggtaggctcatgcctgtaattcaagcactttgggaggctgaggtgggcagatcacttgagctcaggagttcaagaccagcctggccaacatggcgaaacatcatctctactaaaaatacaaaaattagctaggcgtggtggtgcgtgcctgtaatcccagctactcgggaggctgaggcaggagaatcacttgaacccaggaggcagaagttgcagtgagccgagatcgcaccactgcactccagcctgggcaacagagttagactccgtctcaaaaaaaaaaaaaagttttactttactggtataacttaagataataggagagcctcttagagaatcagaaaaatatatttgagattatagccctctgtatagcaccacgacaaatccaccttttcctgatcatgctgttgcagtagagtatggtgtcctaagaaactgttgctcctatttggctaaatcagcctctcacatccatttttgggaaacaaatgttattatatggtatgcagtaccacaaactgtgacttacaccacatgcattgccttacatttgatcattctgctattaaggcaggttcgtaattgtcagtgtagagaaatactcttacagcagacagcagcttccccagcaccccatctacatcaggtggccatatccaaaaaaactgagactgatttttatattaaaaattacagattggcagtgataattaataagtaatttgctgatgtgaactttccatgactcagtctataacaatgttatttaaatttgtttactacagtatgtttgatgaatagaacgaagtaccttatcagtatcgcaccctatggctgtccatctgggatcactgggaggaggaacctaaatgtctttttaagttataatgtggaatgggaggaaagtaaggaattataaaaatcaaagtctccacaaaacctgtgtgaaggagtagagttgtacagatgtatgattaggttcaagaaagctaacaatcttgagtctatgaacaaagcagtagtagcttaatccctagatatattaaaagctaaataggccgggcgcggtggctcacgcctgtaatcccagcactttgggaggctgggtgggcggatcacgaggtcaggagatcgaaaccatcctggctaacatggtgaaaccctgtctctactaaaaaatacagaaaattagccgggtgtggtggcgggcgcctgtagtcccagctactcgggaggctaaggcaggagaattgcgtgaacccgggaggcggaggttgcagtgagccgagatggtgccactgcactccagcctgggtaacacagcgagattctgtctcaaaaaaaaaaaaaaaaaaactaaataaatgcatgtacagtttccctaatttacatcatacagagtgataggacattaatggtggtccacgagactaaaaagaaagttatttgaatagttaaatttttattaagataaacatgtgattgtcacacttgatttaatacattagactttgattttgctctattcttagagcgctcgatgtagagcaaagctttagaatgatttttttttcaccttaagtagggtcacgtctttcctttgaatattttccccaacaatttcacaggagtttcttttgccgtcaatcctcaaaacggttttagtcttggcttttcagttcagagggagtggtaatacccctttcctttacttggtcacaattcactatagagttatcgcctgctgttttgttttgtttctcttccagagtgaaagaattgaaaaaggccaaggaacttgaagacatacagcagcatcccttagcaatgtgacattgcttttcagactgttttcatttctgtttttagcagagacatgcaacaacaacacacacgcacacacgcacacacacacacgtacacacacatacaaaatccctctgcagttttggggagatcagctgcaggattttaacaggaatgttttggtcattgcatttgcactttcatggacaacttttaatttgatcagcaagacatcttggaactcaatcttctgttggatcacgggaaatcaagacacccaggaggaattgaaagaggcttcctcttctcaggaagaagccatttccttctcatatagggctgtattcaaacatcgtgtggaactgtacaaatatttataccaaaaatatagataagaaaaggtggggctatactagcaacaaaaaaagaatgctgttcctgcacctgccggttatttccaagaagctgaatctttgggactgattctcagtggagggcttagatcatacaaaaatctttattgggtccgtgtgttctcatttccttcactgtttatttttgtttgtttgtttgtttgttttaatctctacagcacatttaatgcaacttttgaaatctgcaggtttttaatgtcttgtggaaatttgcagaggggcaggtgtgtggtaaacgggtaatgcatgggaaataatgagaagcagctcacagagtttaaactattttcttgtccccaccaccttccaagaacctgcgagggtagtaatcatcttgtcccctttttcatgttcagcactttaatttttttgccttactttcatgtgcaatgagaattacttaagaattggtaacgcatgtagccttttttagtaaccttggaagctgtagtaattctaaggaatcatgaaccttgcctggacatttgccacctaaacgatcagtgtggtgctgcgttctggccagtaaattccatgtttttggctatatctcatccaaactgagcagtttctgtgtatatatagaaggtagaaatgaaaagtgagaaaatatttgaaagggattatattaattgctaaatattttattcacaaaggtcaataacatggcaagataaaattatttgtatagttttgtctgaatgagcgagaaaaatgtggatgtactgtttgtatatattgtatatattaaaacagagatatgtgcatgaaatcaagaaaaaagaaatgaacaaaagcaaagcattagtggctatggtctgtaaaatgaaacaaaaaaactttatttcactataagagtactttattttaaatgttctttaggagaacattttgctaaagcatgactaaactgcaaaaaaaaaaaaagagctactgtatttagacttaggaaaaaaggcagagtaacattacttaaaaaaaaaaggatatgtttacatttaattttggctaccaggagtttagtttattttatttaaaatttttttgccaatggtgccaagtaatgtgaatgctaatactgcttaagaaaattaagttacttttgcaaaacagataatcataagatgaatcagtatgtagcttaacaccatccactcactccaacaaagaacacttagaatgataaaaaaaaaaaaaaaaaacctgacaaaagaaatagtatgaaaagtagaaaaatgtcacgtttccatatctcctgctggaaatcagaaaatataataaaattgcacaaaaaaaaaaatgaaaaagatgcagactggtcttttagagacggcatggtatattactatttccacataatgaggagccaaagaaatctgatgtttttaacaattaaactgctaatgttaaattgagagaataaagttcgtatttgctgatgccagtttaaaattcccaggttacgtctgaggatcagttggtgtaaagctgagatgttttttcttggttctggctgccaactgtgagttaaaactcaaggcttgttgtgaagcctaaaaatattcacaaataagcttttaaactggtgtctttggaaggaaggtagatacaaaaagattgtggtaaaaactggggtcagtgctcttggtgccttttctataattgtacttgttttttaattacttcctttcactgccaacctcgaattactgtacagtatatgtctttctgcttgtgatcagctttgacaacagtgacagccccacaactagtagccacctgtacatttgtaaactgacctgactccattttgtttttaaatgtgtgggttatgttgcagctgttgcagtcccccagatacctattattttacacaatttgacctataggaggacactgagtaatttacaaacacaactgcattcataaatgggaatagaacgtgaaagccagctctttcagaatatcctctattaatactgaatttagatatctttattccatttattatggtacaaataactgatgttttaaccagagtaatgacctcagtggatttgctttaaccctcacattttttttttaatgtttcacatgttacattattagctgaatacgttagaaaatgacagatggtagagacttccatagaattaagagggttctcatggaggggataggaagtaggtttaaagcctaccagtgtaacctaccagtacaactgtgaatcctaggcaaggcaaaaatgcacttccactgaaacgaagcatttctgaccgctttttcttggttatgaatcttaatttcgaatataagatgataggtaagcgcagctttcttggataatctgaattcccaagtgccaggagtaggatttcattataaaattaatagctaatcttattctatctcctgaagatttaattgctattgttacccattcgaaatcagctgtactgtgtgaacgaaataaagacaataatacgaacccctctctggctgcacggtcgcttatggcagttccacacagtagttggcgcccaatggggggtccctgagacttgcatgtaaaactagtctagatgtcttctttttttgtaagttttatttttgtaattgtgcatgtaaagcatcattgaatcaatggatctgttgaagaactcagctgctggaaaccatgcaaaatgttttgaattgcccttaaaatatggaaaatgttttctgaatgctttatattctttctgctgtaaattaaaaatgaagaaaatttccccatactacgtgtgtgttttgctttaatatgaccgggtagtgaaatctaaggtgatgggcacatgtttcaaaacatatgtaataatgtcaaggatttccttctgatccagatgtaatgttttgacattgaatgttacattgtttcagctaggtccatgaaagaaaaaatgtcttccagccaccattcagagagcttttcccctatctttccaggcacctctcaacatgtcaatcatttgtgtaaggcagtgcaattatttgaaagataaagacattaatttaattcaccttttcagttacaatcctctaaagtcttctaaaaggcattttccagcagattacgaacgtcgtcctttctgagtattgtgtcatcgccgctcccttcccgttcactgcagagcctctccttatctccctagtgctccctcttccatctaatccatctggccactactgccagagaaattttgcatcatggatctcccacgtccgtaagtcaatggtttccagggcccactacaattaaatgacatttttcttgtttgtttatcctctttattcagtcttcttttcacttgtacccaacctgcaccctctaggtggtctgtgcacactgcgtccattttcactgctgtctttgttcatggtgtttgcccaacccttacttggaaagttcttttccactagtacccagctcaaatcccaccgcctttgtgacactcgtttattcgatatatactaacgtttcccttttcaaagtattctatttagagttggaaaaaacagcatagtatttaagtactgtatttttcacttctcatctaagagacccaccaatgacctattagtgttttattttttggtgtaggtaactatgttggtaggaatatttcagtaacaaatatatacaaggtaactcactgcgttcagatttgtgcttccctcccttcgaccaaaacctgaggacctattctgtgctagggcctgaaaatacagaaataaaggaactacagccttgatgccaaggctctcgtaagcagattataatatgatctgcagtgacaaatatttgtgtcaccgatgaaaacatgagcgggaacctcacccaacaccatgtgacaaatacccgaaatggacttcctatttcaactactttagagaaacatggtgccctcaggatcactaggttactctggaacactcagcagaagccagtcatctgtctctaatactgttagaaatggtcccgagcccagaataacatgaattgcccccaccctcacttatccacgcagtccctcgccagtggctaatgcaccacgtttacagaccacgtccccaagcgccagcgcggacggcggtgcggacagggagctgtattgacctgcgttctgcgtttcagagcccggaccgccctgggacccctgtggccctcaagttcccaagtgacctcgtccggggaggggacgtctcgctctgaccccgccctggacgcacccacccac

SEQ ID NO: 85 - DNA, 22326 bp, Homo sapiens
  source 1..22326: mol_type = genomic DNA
tggtctcaaaccccagagcttaaggagtccgcctgcctctgcctcccaaaatgctgggattataggcatgagccaccgtgcccagccacaaaaatcttaatctgtgtatatttatagggaaaggggctaggcctttcataggagacttaaaatactccccgtctctacaaaggttgtcagaaccactaatgtagtgcaacctttattctctcccctttaaaaaaccatccctggcacctgctctttgtgtaggctgtcaagtagggctaagaagtctatggagaagacatggaggcagatccacagaggagctcatttcttttttatttttattttttgagtcggagtctctgtcacccaggctggagtgcagtggtgcaatctcggctcactgcaacctctacctcccgggtttaagcgattctcctgcctcagcctcccaagtagctgagattacaggcatgcgcaaccatgcccggctaattttttgtatttttagtagagaaagggtttccatgttggccagactggtctcaaactcctgatcacaaatgatccgcccgtcttgccctcccaaagtgctggggttataggcgtgaaccaccgcacccggctggggtatctatggtatggttcttggcacaaatcagcaagttcaacttgccaattgatcagaatttttgttttgggatgaaagaatccaatttctggagctcagaagccacatagtccagaggacctgggggtgaggatgagtcagggtggttgcagccttgccaggcctcacggcctctggtccaagctgacacaggctcactcacaccctgctcttggcccctgggcatgccttctcagatgggacctcttcttggctactgcattctccctgctatttagctctctagcctctgacatcccaccaccacttcattacccaagagaatgaactaaggtctagcaaaggaaagtaacttgcctaggatcacagaggcagggtaagaaccagactgaagactgtccatgctagcctggtgcttttcgcacagccctgcagtggccctgggctcaccagccaaacatgctgggcaatgtgcctacgaagtaataagccaggcttggtacaattgtgaaaggctgtcctctcttgctcagtgggcatatgtcacttgaagctgcctggcagtgctttattagggcatccgaagaaatactgccttaaatggaactgcatcccaagcccattgccacaaccttctccctgttgggaatgtgagactgaactgaacacccggatgcaactgatcctgaggcctggcactgtgccacctccctattgggttcatggcagtccctgcaagcctggctgggactcctctgtcatgcaaagcagctctggcccctccaaggctgtccaattgtcatctgtgtgctactccacccccagcatggggatgaacccaggtgaataggtgggtgacagtgagaatcagcccagggcaggtggtgcaggaaaagagctgggaaagcacttgtctcctttattgaacatctgcagggggcacctctgcactgaccaggcagccagagaagcaagcaggcaggtggtggggggcaggggagcatggggcaggaagacgcccaccctcatttccagtccttgaaaaattgcttgaagatgggactctcatggccctgaggcagaatctccacctgcagggacagcgggggagaagtctggttcacaaagttgccacctctgcctctgcccaggaggacaggagggggccagagccagggaggagggtgtgggcgcctggcctgaatccatgtgcagtccaggctgggaaagctcccctggatgagccatgagatgagaaccaagatttcagggacacagacagaggcaacagactgcttcaagggcgtgggtgcacagtttaataaatgccaccaacggtagctgagccctgtcagctccccacgggatgacttgtggacactgtgctgcggcaggaggggtggcaccagccagggacaacggcccagaggaggagtacccagttctctgggcacccaggagagtgctgcccaacatcctctttgaaaataataagtattttgacattttgaaggattgagatgggctttcccactggatgggtctaagagggaggcctggttgttcctgacagtgcccaaggctctcctgcccttcctggccaatttgaggggtcaggggccacaggaagagccctaggaagagggctgtggttgtgcgcatctcctcacctgagtgttcggggcgtactgcatgcgcgagatgaagccctcggccacctgcagggctgcctgccgctccttctcattcgcttttcgccctagatcataggaaggagatttttaaaaagagcagggaccctctttagctgccatcccatttttcttgaggaaatttaagggagtccacagaagagccagcaatttttacaataaatggaccaggggtcccaagaatgccgaggggctctttggagatgtggagtcagtcccttaagaattttcccaaaccggcagcaccaaggtagatgaaaacccctcgtctgcccgggtctgatcatgcaaaactctgctctgacctgggcccctggaatatttcagggaggggaacaggtgttcaccctagcatcagactgtgaggccgcaggtctccttttcctctaggacccctcacctcttgaattcatcaagccttttctgaaaaactaaataagacaaagggtacaatttattatagaggtgatttactcccataatgccagcagggctacactggcctaacagttatgctaactaagcacttacaaaaatgaagaccccacgtaatccagtcatttctgctagcagtcctgagaactcaaactgctcattccaggcttttttatttttattttttctgagacgcagtctcgttctgtcgcccgggctggagtgcagcggcaccaacacggctcactacagcctcaacctcccaggctcaagcaatctgcccacctcagcctctcgtgtagctgggaccacaggtgcacgccaccacactcagctaattttggggggttttttttttgtagagaagtgatatttcgccatgttgcccaggctgccagacatttttccaaggaaatgataccgaaacgatgccgtgatgtggttggctctctaggcaggctataaaatgccatgaactacaatgtatctgaaattaatatgctggattccttcctctgtcaactgaccagctgcccccctacccatgagatccttctcttcctggcctcccaagtttcctgtttttcctctgatttctctttccatagttgttgggttccttgctccggtttatacatgcttctgtgggcctctgtgaacccccctctgcttggcattggttccatgggatatgtgccctctggcaggagagaaaaggcagccctgcagcacacgcctctcgctttccactcttttgctgctcccagctcctccctttcacttctatccctgctgagtttcagaagcaatactatgaaatgcctggtagcagctatctgtagatacccacctacttgtctgccttcctgaccaggctaggggctggcattttctccaccttggttgaccccacaactgggtgttgagcaaatgctattgctgaaaattctcagaccccaggcagagactgagaacaagtttgtttcattttcagtcaaaccaagcagaacaggctctgcccaacagtgtttctatttccagaagatagaatcttttggaaaaacaagttctacaggttcaccactcactgcataaaatgatgtttaatttgtctaaaattcatttctgtcaaaccttgagacagaatcccaggatcaggggtcccagaagccccaaaggtctagagctgggctagggcagtggttctcaaagtgtgatccctggaaccagcagcacagacataacccataaccttgttagagatgcatgttctgccccactccagacctagtgaatcagaatctatgggggtggagcccagccatctaaacaggccgtggggtgattctgaggcttgctgtagtttcagagccattgtctagaatttaggaggtgggaacagcaaagagaaaatggcgaggcagtggctcacatctgtaatcccagcactttgggaggccgaggccggtgcatcacttgaggtcagaagttcgagaccagcctggtagtgaaaccccatctctactaaaaatacaaaaattagccaggtgtggtggcacgcacctgtactcccagctactcgggaggctaaggcaggagaattgcttgaacccaggaggcagaggttgcagtgagccaagatcgtgccactgcactccagcctgggtaacagagcaagattccttctcaaaaagaaagaaagaaagaaagaaagaaaatagcaaggcctatgccatggctcacgcctgtaatcccagcactttgggaggccaaggtgaagatcactggaggctgagagtttgataccatcctgggcaacatagaaagaacccatctctatcttttaaaaaaaatttttaaagagagaaaatggtcagccagaagcatgcaggcttcctgaggctgtcttttacaagcagctagacaggctgagtcctgcaaagggaagcctgcccgggtcagagcagctacaggcatctcaggctgttacagaggagccacgtacccttccagatatagatcttgccacagagcccgttgtccagcacaaagcagtcatcagatatcagcagttcaagggcaaatgggctggagtcagccaccttggtcaggttcatctgtccagtggcatcagagacctggggaggagggacagtgcctgatctcaccccccacacaccagccctcacctcagcctgaggagggggaggctggtcctccctaggtccctcccactgtgcctcgctgcccactgcccaggtcccaggagcagacaagagagtgaagacctgaaaagcaaattccaggcagccccactccctctcatcaccccaatccctgcagcacaggggccccgaacccatttggaaattaggtggattccaaattacaaagaaatgcacagaattcaagaaagaaaagctcagcattggcttcaagccttcaccaagcataggctggaagtgaggtgcactcatctcctcaggagggcctgccttccgcccactccccatccttgtctcactcccagccctgtataactccccacctcccacctcggttccagccccaccttccccctgccttctcccctccaccctgcttgcatgcagctgtgctgtgcaggctcccaccctccctgctgccgggtcccagggcaggcttggggggcccaccttatacagagctgcggcctgggcatttgccttgtcagctgtgaggtcttcctcagggttgccctccttcagagcaggcttggggcccaggacctgcaggggccagggcaggccaggtttatagggacccctgccctggaacttcccagcccatcatgcccagggccactgcttctggtggggcaaactgcgccctgcactagggcacccagcagaggtgaggtgagtgagggctgagtccagcccaccccaccagccaggctgctcagcctcgaggacgagcatctacccagaggggcaccctgtgagctggccacagccctaggcagtacaccagatggcccctgccaccctccaccggccactctcagccctcagctcatcaccacctctcttggccactttcaagcagaggctcccagccacccactccaatgtcccccaacctggatcatctcagcaggctcctccccatcagtgacaatctccacctgggccttgccctgtcgctcactgtcccggatggccagggccaggtccctcgccttgttgcgttccaggatgttggactttccaccacaccaggcgaagatgttctgcaaggaagcaggaaagtccgggtcagagccagatgcctgtgtcctgctccccagctcagagaagggcgcacagctctccctctctcctctctgaactgtccctgaggcaggacaaccaggaaggcagagcacagcacagagggctctctgaaaatgcccacgaccacccactgcaactgtttctctgcccacctgccatctgtcttcctttctttttttcgagacagggtctcactctgtcatccaggctggagtgcaaagacgtgatcatggctcactgcagccttgacgtcatgggctcaagcaatcgttgcaccttagcttctaagcagctgagactataagcacttgccaccatgcctggctaatttcttaattttttgtagaaatggggtcccactatgttgcccaggctggttacaaaccgctgggctcaagcctctttctttttcttttttttttttttttttgagatggagtttcgctcttgttgcccaggctggagtgcaatggtacaatctcagctcaccgcaacctccacctcctgggttcaagagatcctcctgcatcagcctgccgagtagctgggattacaggcatgtgccaccaggcccggctaattttatatttttagtagagatggggtttctccatgttggtcaggctggtctcgaactcccgacctcaggtgatctgcccacctcggcctcccaaagtgctgggattacaggcgtgagcagccacgcccagcacctctttatttttcttcccatcacatatctcctatgtttaaacgtctcttaaccacctatctccacctactagaaagtgagcttcattaggacatgaaggttttgtttggctttgctcaccactgtgggcccactgctaaaacagagcccggcatggatttaggcgcaaaataaatattgactgactgagtgaaggactggatgggtgaatggctgaatggctccttgagcgcagcatctcacacttctacccaccgccctgccaggcagagcccctgtcacctctccttttctggtaatggcgaggtctgttcacctgtccccttccttgtctcagcacgtgtagtcctcaccaagagctcctggattgatctccctgccccaaatcttcagcgccacaagacgcagcccatactcctcagccagccaatctcctcatgacctagggctcaccttccaccttgcttaggaatttccctccccctgctcctgtcccccagcccgggtcccagtctcactagacccctggtgtgtgcatgtctgcacccttccccaccttggtggctcagctcaccttctccctttgcctggagtggcatctcccctcctataggtctagtccaatgtcaccttcctgggacaactggcttcggctcaggctagagggcccctccctgccccaagacccccccagcacatggcagctgtcccccttaaagccctcatcacatcctgcctcaggttatggcaagtgactggcccatcttggctgcctccccagagcgagcttttatggtccctgtgctggctcagagagagcatcatagattcactgaacgaagagataaatgactgaattaatgaatggtctggcaggcagtgaactcagaggcttccaagaggagggaaaaagctccagagcatcagaggcaatgtctagatggcagaaggaggctggcatcagtccttacaaatatagggacattctccaatggtcagagtgatctcacttggaatgggtttacggcttctcagcttctctccctctttcctggcctcctgcccctccgtccttataaaggatggtgccaatacggagtgctcagtctggccagcctacccacctggcccaggtccaggatgaagcagtccccagtgttgaagctgtcccagttcagtgcccgctcggtggcacggatgttcttcttccccttcacctggtagagtttcttgatggcagctggggctcctgtggaggtcttgtgaaatgctgactccacaccaccttcctgcagcccagacggcccatctgagtggactgacaggagacccagagccctctgcaccccatcccactggaagacgggcagaaaggtggggacccggctccaaaggcacccgggtcttctgcagggtgagaaccagccagaagcagggctggctctgagggaagctgcagggtgggggtgcctagaggtgggctctgacctggtacttgaggccccgtgggaagtagctcatgaagaggtcagactcattgccctgcacctcgcggtgctgcacaggccgctctcccagcagcgtgttgaggtgcacagccagcacggcacaggccccctgctcatcccgggatgactgctggcctgggacaagtgggagagggcagggcaaggcccttgtgatccataccagccccctccctccccttcctgggcccaaccttcccccatccagatccccttacctatccacaggtgcagatgggaaacctcttctgggccattgtgcagcactaggtaggagtcccccgagaagaagacgccctggttctcttgcgccacaggcaccggcttcagcttctccacccgccacacatgcaggcctggatcctgcactgagcctgggaatggagagccactgcgagaagagagagggttgacagcagcctggacccacttgcccaagcacagccctgggcaggcctggcgactgcagtctggggatgaggagagcagtggggaggggcagcccttggaggtaaagaaggggaagttgtgaaaggagatggggcatgcagcttacctctggggaatggctgtgtacatgctgtcttcagatctggaaagaaagaagaagccattattattacaaatgccacaaaaaggacctctcacgtggggctggagaggccctttccagtggccaagtactttcatattcatcaactactccacctctaggagccctagttccattatgcagacaaagaaaatgagtctcagaaatgagtccaaggccacacagctagtgagtggttcatggaaataaggtctctgacccctgggccagggtcttccgtctgctgagatctcacagaaattaaaataaaagcagaaattaacagaaaacagaaacaagagagaagagcaatgaattttttttttgagactgagtctcactctgttgcccaggctggagtgcagtggtgcgatctcgcctcactgcaacctccgcctcccgggttcaagtaatcctccggtctcagccacccaagcagctgggattacaggcaacaccatcacacctggctaatttttgtatttttagtagagatggggttttgccatgttgcccaggctggtgttgaactcctaacctcaagtgatttgcccatctcagcctcccaaagtgccgagagtataggcatgagccaccatgcctggcctcaagttggcttttttttttttggagacagagtctcactctgtcactcaggctggagtgcagtggcgtgatctcagctcactgcgacctctgcctcatgagttcaagtgattcttgtgcctcagcttcccaagtagctgggattacaggcccacaccaccacgcctggctaatttttgtatttttagtagagacagggtttcaccatgttggccaggctggtcttaaactcctgacctcaggtgattcacgcgcctcagcctcccaaagtgttggtattacaggcgtgagccaccgtgcctggcaagttgtttttttaaaccgataaaattgataaatctttagacaaactgattaacagaaagagaaaacacaaatatcaatacagaaatgagagatgtgagatcaccatagattttacagatattaaaaggataaagggaatattataaaaactttatgccaatatattcaaccacttatataaaatgggcaaattccttcaaagacacaaattatgaaagctcattcaagaagacacagattatctgaacagtggccatatctattaaagaaaataaatttgtagtaaaaaactcgttcccccgccaaaaaacccaagcccagatggcttccctggtaatttctaccaaaaatttaaaaaggacataataccaattgtacacaaaatcttcaaaaaaagagatgacagaacacttctcaattcatcctatgctgccaacattctcctgataacaaaaccagataaatatattatgcaaaaagaaaattacagatcagtatctctcatgaacatacacatacaaaaattaacacaatttggctggacacggtggctcacgcctgtaatcccagcactttgggaggccaaggtgggtggatcatgaggtcaggagttcgagaccagcctggccaacatggtgaaaccctatctctactaaaaatacaaaaatttgctgggtgtggtggcacgtgcctatagtcccagctactcaggaggctgaggcgggaaaattgcttgaacccaagaggcagaggctgcagtgagctaagcccatgccattgtactccagcctgggtgacagagtgagactccatctcaaaaaaaaaaaaaaaaaaaaaaaattaacaaaattttagcaaatgaaatcaaataatatataaaaaataaaccatgatgaccaaatgaggtttatcccaggaatgcaaggttggtttaatatctgaaaatcagggtgatgatagctaataataatgcagtgtatatttcaagatagccagaagagaggatttgaatgttatcatcacaaagaaatgataaatgtttaaagtgatggatatgctaattaccttgatttgatcattatacaatatatacacatacattgcatatgtacaatgaaacatcacactgctcctgctaagtatgtgcaattattatctgtcaattataaatttaaaataaataaataaagccgctcacaacgcaaaaaaaaaaaaaacaggccaaaatttgaaaatcaatgctatacaccctattaacaaacatgtatgtgtaatcacctcaatagatgcagaaacagcatttagcaaaattctacattcattcctagtttaaaattttttcaagcctgggcaatataaggagaccacaaccctacaaaaattttaaaaatcagccaaggccaggtgcagtggctcacacctgtaattccagcactttgggaggccgaggtgggtggatcacgaggtcaggagttcgagaccagcctggccaacatggtgaaaccctgtctctactaaaatacaaaaattagctgggcatggtggcatgcgtctgtaatcccagctacttgggaggctgaggcaggagaattgcttgaacccaggaggcagaggttgcagtgagctgagattgtgccactgcactccagcctgggtgacagagcaagactctgtctcaaaaaaataaaataaaataaaataaataaaaatcagccaaatgtggtagtgcaagcctgtaattccagatcccagctactcaggaggctgaggagtgagtatcgcttgagcccaggagatagaggctgcagtaagccaagatcatgccactgaactgcaacctggatgacagagtaaaaccccctctcaaaaaaaaaaaaaaaattttttttttacccacaaactaggaatagaaagaaatttccttaacctgttaaaaaggcatctattaaaatacaacaaacaaacaaaaacccttcacctaacattatatttaatggctgctctaattctaaactccctccctgagaaatttcacccactcccaggcatcagctatcaattctgtatgcccagcttccctcaaatgccagaatgatgaacactttttctggacaaaagtcattcaagggaaaaaatgctaaacgcaagtattttttaaaaagatattatctttttaaaaaattcagaaaatgcaacagctacggctccactcactgtcgctttcataggttcccatcactagaggatttctttttttggctcaaaatgcagagatcacagagccagcatgcacttcgtacataatacaattcatgctgtgcatccatttggacagagtttgtgtaagatgagccccagtggcacagggtaagggcttggggaattggagggtaaaaatgcaagctggcaccattaggagattcttgggggctggggcagcaggatcaggaagtgcaatatttcgcaggggccagggaagtcaggggtagggggaaggcagatgacagagcagaaggtattaagtctgagtaggaaacaaagagggacaggtcaagggcagtgataatggatgtgaaatgctgtgtgaattatgactttccttttcctttcccaacctacaaaatagtggaaggcatattttggcaccacgattccggaagaggacatgcagagagcagaggtttgcggagggaaactttaacgtttctccatcccacagaggatcacatgctgtgcccacatcccctgcaacaggcagcccagcctgtgactcaggcctgagctggtgaagtggctgccccaagctcaagccatcagggagcgctcaagaatgagacacggagtgcgccaattgtcacctttactatttttcattctgtgtttaactcaaaatcaggcagcctacatgccagagagccacatcagggtttggatgaaaggggtttggcaggccgggtgcggtggctcacgcctgtaatcctagcactttgggaggccgtggtgagcagttcacttgaggtcaggagttcgaaaccagcctggccaacatggtgaaaccccgtctctactaaaagcacaaaaattatccggaaatcacttgaacctgggaggcggaggttgcagtgagccaagatccatgccactgcactccagcctgggcaatggagtgagactcggtttcaaaaaaaaaaaaagaaaagaaaggagtttggctgctcattagaatgaccttgggaccttattaaaatgtcggtactgacaaagattctttgcttggccaaactttaactaggcttctgaaccaccccgtaggcccatctgtgtgcttgtaaaatccggttttagcaaaagaaccctgctaaggccatttacctagaaccccctacccttgatatctggtcgatctgataatcgtggatatctgattgggttcctcaacaccctgcccccgccgccccagtgatgtctgatcactctggcctgtattcagcaagaatcctgttaggggccgggcacagtggctcatgcctgtaatcccagcactttgggaggccaaggcgggcagatcacctgaggtcgggagttcgagaccagcctgaccaacatggagaaaccccatctctactaaaaatacaaaattagctgggcttcgtggctcatgcctgtaatcccagctattcgggaggctgaggcaggagaatcacttgaacccggaaggcagaggttgcagtgagctgagatcatgccattgcactccaacctgggcaacaagagcgaaactccgtctcaaaaaaaaaaaggaatcctgttagctcagtctagccagaatctctttacccttgatgtttcctcttagtaattttcttttttttttttttgagacagagtttcactctgctgcccaggctggagcgcagtggcacagtctcagctcattgcaacctctgcctcctgagttgaagcaattctcctgcctcagcctcctgtgtagtgggattagaggcgtgcaccaccacatctggctaattttttgtacttttagtagaggtgaggtttcaccatgtcagtcaggctggtcttgaactcctgacctccagtgattgcccaccttggcttcccaaagtgctaggattacaggcgtgaggcactgcgcctgggccatattttttttctttaacagtgcccaagcccctggtctggggattctgattccacaggtctggaatggggcttgatcacccatattttgaacatatgttcaaagtgatggtagtagtgccagtgaattctgtccagaacagtgtcaaatgctcacctgcacattagaatcatttgggggcttttgaaaaaccccagtgccagccaggcatggtggctcatgcctgtaatcccagcacactgggagactgaggtaggtggaatgcttgagcttaggagttcaagaccagcctgggcaacatggtgaaatcctgtctctacaaaatatacaaaaattagctgggcgtggtggcgcacacctgtcatcctagctacttgggaggctgcagcacaagaattgcttgaacctgggaggtggaggttgcagtaagccgagatcacaccactgcactccagcctgggtgacagagtgagactctgtctcaaaaaaaaaaaaaaaaaaaagtaatttacagaaaaataagaaagaaaaaccccagtgactagcttccatattggactcattaaaaccagactctctaggtggagcctggatgtcagtgtttgagaagctccagatgactctaatgcttggtcagggttgaaactcctgctgcctcattagatctctgtcccgagaccttttgttccagtctctcctggggaagggtccaccctgacctctggcctttcattctttcccctatcccagccctctgtccaagcccacagctccttgagcttcctcagtgtccatgttcacccttacatccattaaagccccctcatcctaggctgggcacagtggctcatgcctgtaatcccagaactttggaaggctgaggcgggtggatcacttgagattaggagttcaagaccagcctggccaacatggtgaaactccatctctgctaaaaatacaaaattagccaggcatggtggtgcgtgcctgtagtcccagctacttaggaggctgaggcaggagaattgctggaacccgggaggcagaggttgcagtgagccgagatggcactactgcactctagcctgggcaacagaggaagaatctgtcacacacacacacacacacacacacacacacacacacacacaagcccccttatccttccaggcccgtatcaagccccagctgtccaaggaaacttccaggacattaagtggcctccgccttctctgggagttctcccagccctctcccctgggagcacatactttagcctgttttatagcataaactggctgcttcacatctcaactggagcaaggacacacctgatgcctctgttcctcaagcagcccagcaaagagtctattccattccactcaacgtctgtgctgggggcttggcactgggggtgacatgcacagagacaaagaatagcccatgttttatggtttagctgcagggtgcagtgaacaagggagccaccatacccagtgaaaccgcagacgaacttcctctaagtggggaatgtcacagaatcacagatgtcagcattagaaagtgctaaagttgaagaggggagctggggccgggggggaggaataaaacaaaaaaaagaaagcgctaaagttcttatctagtcctgctctgcctgcaccgccctacacatacccatacacgcatagtgcagaaatctcttctatagcatcccttaccatcctcttcttgaaggcttccagtgatgggaaactcaccaccttaccaaacagcctcttctacacctcttaaagcctttacttttccccactctgccatagtgtggtgagttatggacccgcctacctccactactacactgtagggtcctttagggcaggaagtgtattttgcctctggatctagctggaacctcatgcaggtgctcaaagaatgcatttgattaactggacctgctgggctctgattattagactggggtggcacctaagggatagcccaggatttcaaaaggctgggacaggctggagcagccccaggaggcagagagcaggggctaggggtcccagactgccatggggctgggggaggggaggacgcaagtcctgctggctgtcccatggtcctgacttaggctgtctttgaggacacactgggggacctcggagaggaggtcaccgttacacacacctttaaggaaagacttgacagccatcagagggacaaaaatcctgccggggtccagtggtacctttgccttcctcagaccctgattccactgacccccaataggtctcttcccttcacagtccctgcttgcccctaggtgtgaaatgaaacagcacctccacttctcctggtggaggtaggtgcccaccctcgaaaccaaactgaatctcccagcctgggacatggcattctcagaatctaggtccagaggcctcatttggggattccaaatggtttttcccctgataccaaataggtctcctacccttccccagggtcaaccacttcctccctccccacctcctacctcagacagtccacctagaccctcagccaaggtcttccagagtttgcaaaataatcaaatgtgccacttgcatttgaattcaaatggctaggactgccctgccccctccccaagccactcccacccaaatagcatcacaccacagtcctgtcttggggacaggcagcttctaatctgatttcacctccagtctggctgagggccttcaggagcagtgtggtggcctccgtcaggaggtctggcacagctgggacaagccctgacccaagagttcctccatgtgcagcatgggcacagcccacccatcctcccgggcagcttcacagctgccatcagatcaggtgcctggagcctggcataaggctggcaggacagcaggctgggggaactccaccctggcacaatgtggtatccagaaatgtgggtctctgttcccaggccaccacagccagccctcgcctgcccacccaggagggtaccagccagccgcgctggcagccaccctgccaccttcacctttcaacactcctactttcctttcttcctcctacctctgcttcgtaggttcgtcttccttccagcctgccccacccggcttctcacttccctcttacttctctggctgccccaaccaccagccccacccaccagccccacccctgggctccttccccagccggtgtggaggcgatgtcccccgacagggaggggcaggcagtgctgggaggccagcaggcctgaagcagaagagcagtcactggggtgggcagtgggtatgccaggccgtctcctcagaggggcacacagggaggctggaggtccacacagccccaccacagtggcctcagcccgctgcaggtcacagccaaggcaaatcagggagggcatctctgagtctgagaccagcaaggaaagccatgttctccattcagggcctggggcaggcgcggcacagcccccaccgctgctgggttagtcacattttctgggcagggtcactggcttcacattactttttcctcctccctcagtttgtctttctccttgccctgaatgcaagtatttgattttttttaagatcagttttttggttttttttgtttttttttttttcctgagacagggttcactgtcacgcaagctggagtgccgtggcattatcaccgctaaccgcagccttgaactcctgggctcaagcgatcctcctgcctcagcctcctgagcagctgacaccacaggcctgcaccaacatgcccgactaatttttttattttttctggagacagagtcttgctactcaggctggtctagaactcctgaactgaagcaatcctcccactttggcctcccaaagtgctgggattacaggcgtgggctactgcacctggctaagctcagttctcagggaatggctgaggccataaaacattcttcaccatcttccgcatgccatgctgatgcctctcaggtctctaccctttggtctgcttctcattcaccagatgtttatcatcatgacttctgggccctgggccctctgagagacagcccatcctgggttgacccagggcaactatcctgcctacatcacagtcactagaccctagagcttgtctcctccaactcgctggctttctggaggacaccgaggtcctgagagcacaagagactgcccacaaacacacagggagtggaagcccctgcaagggaggctcccattcccttctgaatccctgggggaaggatgagcggactcagtatgaggctccaggagaaagtgagcacccagttatgcagccacacaagcgtagttcctctgcccagaacctagccggcctgtcctggaaaggtattggtcagcaggctggcttgagacaaggctccaggttcagggtcaaggcctggggaccctggagcaaaatctggaacaaatcttcctaattagcagaccttcaaacaaaacctcattatttgactgcgtgggaaaagtctggagaaaatacagtactggataggctgggcatggtggctgtctccggtaatcccagcactttgggagactgaggcaggcagattacctgaggtcaggagttcaagaccagcctggccaacatggtgaaaccctgtctctactaaaaatacaaaaattagccgggcatggtcatgggtgcctgtaatcctagctactggagcgactgaggcagaagaatcacttgaacccaggaggcggaggctgcagagagccgagatggcgccactgcactccagcctgggagacaaagcaagactccatctcaaaaaaaaaaaaagcaatactggatgaatgtttctcattgaaacgaaattgataaaatttcactagagcaagacgggaagttaaatcttctccccaaagaacatggcctgtagctagcatccaagtgtctccatggccaaactgccaggcttaaaaatagggtaatatgggccgggcgcggtggctcacgcctgtaatcccagcactttgggaggccaaggcgggtggatcatgaggtcaggagttcgagaccagcctggccagcatggttaaaccgccatctctactaaagacacaaaaaattagccgggggtggtggcgcatgcctgtaatctcagctattcaggaggctgaggcaggagaatcgcttgaacccgggaggcagaggttgcagtgagccgagattgcgccattgcactccagcctgggtgactgggcaagactcagtctcaaaaaataataataataacaataataatagggtagtttggtggagggtgggaggagggagagattcaggaaaataactaatgggtactaggcttaataccggggagacaaaataatctgtacaacaaagccccatgacacgagtttacctatataacaaacatgcacatgtacccctgaacttaaaagtttaaaaaagaaaaaaaaggatagtctgggtgagaatcccagtagggcctagtccccacaaaaccacaggctgggcggttaacctggtagagtgataagagctagacaatttggctccttactagctgtgcaagtgacttaacctcctggagcctccctgtgccccaatctgtaacacgtgcatacagttaaatgtgaagatgaaatgagatcctatgattaatgagcaaataatacatgctcgataaacccagacttctttctcttccctttagtttgcaatgtgccatcagcacctgaggtagaaatgtgcctggccactcccctagctcccggtttctccacaggaggaaagaaagttaaaccacagagcactctcctatttccatccccagccccagcgctggaaagcttcatagattttggtcacaacagcgcataccttgggtggctcttaagttctggactctgtgacccacggagggaacaaggatcaatgggaatcactgttcctcacactcagctgtctaggctaaagcctctcctatcaccacaggaaaaaaggggagaggtttacacattaacagcgaaacaactggctgggcgcagtggctcacgcctgtaatcccaacactctgggaggccgtggcgggcggatcacctgaggtcagaagttcgagaccagcctgaccaacgtggcgaaaccccatctctactaataatacaaaaattagctgggcgtggtggcgggcgcctataatctcagctactcgggaggctaaggcaggagaatcgcttgaacccgggaggcggaggttgcggtgagccgagatctcgccactgcactccagcctgggcaataaaaacaaaactccgtctcaaaaaacaaacaacaacaacagcgaaacaaaagggccggtcgctcagcctaggactctcgggagcggctaggaactcaatgcacatgctaatgagttatctggtaacgacgctctagaactagtttttttaccagacgcacagtgttcctacccttgtggtctcccctgagcactactgcttagtttgtcccaaatgaagtaaaataaagtatttctttagcacggacccaccctctcccgccttttcttacaggaagccaggagacggcgcgcccctaagagaggaccccggctgtgggagaagaggagggagcggggcgcccccgaaccggctaagcccgttcgacccctacatggggagcccaggtccccggcgaccggaccccgaagcgcactacttgcctgccaacgccttgctccgaggccctgggcgctgtctcagccgccccccgccccctggaggtgcgcggccaggagccgcccccggtgagtcagagggaggggcccggccggtctgagctggcggggagcccctatgggaggctggggcgcccgaaagggtcctagaattgggcgtgggaaggagggtataggggaagctaaggacaagcttactgtgctgtaaactttgcgagagaattgcagtgttcacttccattcaatcgttaggcccccggcctcaatcaccctgtgaacagctactgttctgtgagagcctactatgtgcttggtgcgtcctcacatctactatcattattcctgctggaaacatgaagtctttgggaggctcagagagggtaactaacttgtccagagtgtcacattgctagttcagtagcagaactaagatttttttttttttttttgagacagggtctcactctgtcgcggcacctggagtgcggtgctgtgatcacagctcactacagcctcaacctcccaggctcaagcaatcctccagcctcagcctcctgagtagctgggactgcaggcatatgccaccacgcccagctaaacttttttttttttttggagagactgtgtctcactctattgcccaggttggtctcaaactcctgggctcaagtgatcctcctgctttggcctcccaaagtgctggcattataggcatgagccaccgcacccaactgctgaaccaggattctaacccaggctgatctgacctgcaacacctgacccttctcttctttattcagaggaaaacaggccagcaagcatctgcaccaggaggccaggccttctggaaatgtgttggacagcgatgggtccacacttccgccttggctcctgaatgtggcatagccaacccatgagagatgtcagttgacaaagagcatgaggatcaggccatggccttgtgacacagtggtaagatccttttgtgggaggcagcttcgaaaatcccaaccagaatgagtttctctgaagtccatgggtggggcctggggtaaggaaacaatctttctatctgggtgacctcagacaagcacactccagcaaggagtcctcggaaaccacctcccgctgcctactatctgccttcctttgaccaactctgctcactctgcagactcagcttaaatatccctcctctgaaactccctctgcagtgctccccaggtattctggacatcaagccactgggccacctgcatctacacgcccatgggaacacttctcaggcacacccgatagcaaaagtggatttggatccatgggcaacctggcctgcttccagacaactaggcctctccaaggttgtgcccaggcatagtccttccagagcattcagtttttgttttgttttgcttaggtcaaatttatagtgaaatgcacaaatcatgtgtacatttaaatcagttttgacagatgcaacacccatgtaacccacatccctaccaagatataaaacacttctatcacaccagaaagttccctccccaccatgtgcttcctccaccataatgttagc

SEQ ID NO: 86 - DNA, 552731 bp, Homo sapiens
  source 1..552731: mol_type = genomic DNA
aacacctatctttgattggttgagggctgctctgagaggaattaactgcctggctcctctgccctgcccctctgcactggcaaagtggggtctggcagccacaggaagcccttgaatggggaagcagagagggaagagtaagatgccattggcctgccagtaggaagcccatgacatactggtggagccccagccctgttagtacagaaaagatacctggctgatatgctctgctatatccatctttgagcctagatgatgttaattaactctttaaaaatatattaaagctgtggtggcatctgagaaaagatggtatgcttttaaaaggtaggagtgaacagctcatacattgtcccaggagtgggctttattacagagatgggggagctctgacctgttgaagaccaagattccaggaagaaatgtttgttcacaagcaggttgggaaagggagatacttcaaacagctctgagagcaatatttcataaagacaggcagcaggaagaaagccttcttaaggccatattgacttttgcacctagcaaatgacccttactcttcattcccataaaaaagagagaaacaaacagtaaacattttcaaaggatcggtaatgttttaatagctctgattagtaagcggagtattgggtgttatttcgaagtcaaaaattctatcttggttgatttaccctataacctggagcattttcgagaggcaacagaatggaattgtctcaaagtactgacttttcattattttccacgcagatccctgaggataacagaaggaaaggttttgtctgggggagggtaggcttctcccaaaaagagaattctggaagtcaacataattaaacaaagaggaaaatgtgccagacaggagtgggtgggggctgttttctctttgtggttggttgtggtgcgttcaagattcctcgcctaagatgaggttcctgagcttccagtaggcgactgactgcccaagagacccagggctccgcaaggagacggcgcaggtgtcggggctccccgcaggtgaggaggccgacgttccaggaggtccgcccgggcggtccctgagtcctgcctcgcggctgctcgctgggatccgagggcggaacgggacgcgcaggaacccggcccgacgggcgcggctcacacccgtgctcttcctgcgctctcggcctcactttgcggccagagccgcggccctgcgcgtggccggcggccgcttctttatctccgaccccactgcccagtactgtacgcgtccagactaaagaaacatcattcgcttaaggggctgggaaaagcgcgtgctccgctcgccctggcaccgcgggtcgcccagctcgcagactgggacgggcggtgcaagaggtggtgctccctgtccaggaggggacgcggaagagggcatctctggtcccgggatgcgattgtcccggtttctccttctggcccactcgccgcgcgcacgaactctaggggaagttggttgtaaagtttccgagagcggcgtgggctggtgcgagtgaagcgcggggcgggggaggcgaggacagaagctctcctcgcggcgtctttgttctgctctggaggagagaccttggcaaggagtcgccgggcgggtgcagggacctaccgccaccacattccggacccagcgggagccctcctcttaatgcccctccccccgcaagccaacccaggacatagcccccaggtccccaaggttccgtctacctcatccttctacccccaaacttcaccaacccgaaaggattccaagtctgggatggggagaaaggaaagagggtggaggcaaaggtgcgcgacgggctggataccaactggagggtgggtgttcgcattgaaatgtttttttcttttgccctagaaattgcttccccatgcgggcccctactctctcccatttcccccacctccctgctttctttttcttcaattctagtggatctagaaggaaaacgagtgctgctctgagtcactcagcgagctaatgctatggcccgaagttgggatcagggtcgaggggtgggggaccatgtggatggggtcccaattctggaggttgagaatgactggaagggacctggggaagggtcgggagctgttcctggtccgagacacctgatttgtcccggacaaggcagtgggggaggggaaggaaagaggggatgctcggctgggacgtgtcgcggcagggggtggaggatgaggaggcggcctgggaccccgagtcagatctttggggtgagcacgaggacgtggtgtagggaagaggacgagtgagcagcgcctggctgtagggtcagagggcgcctggtcatcctgagagccttgccttcgcagtttgagattaggggaagttcggggcctgagaaggtgggcgcgatgctggagctgggaattcttcctcggagcccctggaccgagttgcgctgcgcctgcagcaacaggtagccccgagggatgggcggaggccccggccgaacccggagctggcctttgtcctgccaattagagggctctccagagggacagcgtgggtgggggtaggtggggaagggcgggagaggagtttcctaacacttggagcccctttgagttgttctgtgtattgggtggaggagggtgaatccgagaggagggaggagggtgaatccgagaggaggaaggaggatgaagagcctagcctgcgccccacctctgattgtgtaagcgcctttatctagggttgaccccctaccctttgcattttgtctcttgggatgacgaaaaatggacagaaactcgacgcccaagtgaatgtttcacattgattggcagggaaagtgcaaacaaagaggtgcatctccgggaaacaatgattttggagatcccctgcccaccaccccagacttgtgcgcggtgcggagggggccagggctggcatctcccggggaaagtttcgagcctggcagtgggaggagaccgtctgggcagagttgtgatgaactggggaccgagcagccccagctcgcctcggaggttcccgagccgggcgggagatgcggggagagggagggggcggggagggaggggagggagagaggaagaaggggtgagagggagaaacctgccgccgctcgccgcctctttgtctgctccgggacttggaacaaaagggggaactctgatgaactctctttcctcccctctcccccggacgccggggtatctccctctcgcaactttgccgccccgactttctctgctgtcaggccgggaaaaagtgtccgaacgcctcgtggactgcagcgggggaaatgtcccttaaaagtgcgacgaagtggggaagaaggtgagtggggactgttgtcttgtttacctctctcccctcaactcgccccgctccccgcccttcggagggcagaggagtagcccagtggcaaagtttggctggtaaattgtacctcctttccccgttcccttctcttttgttctttaaagaactcgcgcaattgtttcatttgtttatttttaataggcaaaagccaagtaggcatttatcttatgtgcttctttatatgaggggctggggggatggggaggagggtttcaaaagggtggggtgagggggtattgcttcgcgttcttccagctgcactcatgtagggatgaatatgcagaaattgagagggtcaagtccagcctcgcccccaccctagccctgaccctggtcatgcaaaagaaagcgatatggatatgggggtcgtttgtataacttagctgtctgcagagcgctctgtagataccacgcacaatataaaaacgctgcaacaatggaaggaagaaaggtttgggttggaggggattggtcccttgtgttagcggtcaaggagaggtttacaacaaacagctaagagttcagaaagttttcttcggggctgagatggggtggaggaagccacaggttacagactgtcagagatgcagggatggaggggatggggcctggaccactagttagagccatcccgtccgcccctttcagtttcacgatccacccggaataacccaggcaatccttggtatccgtcctcacctctctcactttccatcaccccccgcccccaaccccacttcagtgtgtttgaatagaaagcagaacgtgagccccagaagctcctctgacccagccttccgccccgccttttgtgttttaaccttttgtttctatctgccacgcccgtccaaaagagggatggctgtttctgctgctgcggggtgaagaggcagcgcagtccactccgtttttataggctaaggaagacgccctaactttgtttcctaagtagcttaacttaggaatgtttctaggttgggtcatgcgcgaatgaggggaacactcaacacccagtaaacgttgccactttaggtacaatttctcccagcgcttttccactttatacaggagttgtttatcccatactgtcatttggtttgtagaaaaagcattttgggggccgggcgcggtggctcactgtaatcccagcactttgggaggccgagacatgtggatcgcttgaggtcaggagttcgagaccagcctggccaacatggcgaaaccccgtctctactaacaatacaaaaattagctgggcgtagcggtgcgtgcctgtagtcccagctacttgggaggctgaggcaggagaatcgcttgaacacaggaggctgaggttgcagtgagctgagatcgtgccattacactacagcctgggtgacagagccagactttgtctcaaaaaaaaaaaaaaaaaaaggaaaagcattttggagactgaagttgggggtttattgaaagtgggcaaatgtatgccttatctgaggtgatatctaaatattaggaatatgcagaataggctttttgaattctacatgcagaataacctaaaggttattatcttcaggtatgttttgtgagatcatttctgatgccaggatagtttattaccttctccactttcttctctcatatattcccaagtgctagaggctttcctcacttccttggacttacttttgacaagacaaatgaaacatcaaagcgcatgcactgtcaataacttgaggaaacgcccaaacattgtcttttaacttcttcaacttttgattctgtatagtagtagttactattgaagtagttactattgtacctagaaatgattcaactgctagaactatgtagttttgagttttcatatcaaagactgaaatatattattgcaacaattactttcttttacaaagtgaggaggcagaatgacctggaagctaactttaattaatttcaattgtataggtgtaattactattatcagcatctagaaagcatcatgaatttgctggagtacttcctagcactgacctccttcattctgcgttgttcttactggatctttccatcagccaacaatatggaagtaccaatacaaggtcaaatcattcctggattcatctggagttgcttaaaagttaaatcattggaatttttgatgataccttttctatatggattacaatttgatcgctgggaattctccaccttaaagaaggtatgttgctttttagatactctacgaggacttcatttttggtctggggcttatacccagagatttgactagttattttgagcggctgtgttatcagagtgatttatgactttggacttccttgttttaaactgttttctgtagatcctttcttatttaggatgatgatttgggtatttgtgatggaattttattaattttaccatctgttcttcaacattagcacacataatgaatgcagattatatggtcactaaggaaattttgtaatgatgatgcatccagcagggaaatatcctactttatttgtgattgatttgcttcttaaatattgcagtagatatttctaagttctgtgttagcagaacttatgttgtttgcattactattatttttcttcattttgacacttcattttggtaaacaaaatccaaaaatggcccaaaataaatgtctaatgactgggagtctatataaaatacagtaagttctctcagagtgaaaaccttgagtttgtaataacagagcccgtacatttgtttaacctttatggcatacatcaagtttttatagtggtcataagagtcttctattccttcttttaagtcttacaattagtttttgttcacctctgtgagaaagtagttaaaaattcacataactactgttggtaatataaaaagttaattttgatatatttacaatccttgtttaagtgattgtttgccatggaaagtaagaactttctttctgtggtctggtcaaataaattaactgggaattggaaacatttttatcttgttatgaggaaaaaaggaacattacaacttgcttctttctagctgtataaacataaacaagctacttaaccttcctgggcttctgtttgttaccaataaaatgaaggttaagttaaataacttaaaacatttttgaaatcttttaacattaagattctatgatttgttacttgcttctataaataagatacatcctctcttgtaaagtttgtttttacatcattgaacaatagagttaacagcatcatcaagttttttttttttttttttttttttgtgtgacggagtcttgcccttgttgcccaggctggagtgctgtggcgcgatcttggctcactgcaacctctgcctcccagattcaagcaattctcccacctcagcctcctgagtagctgggattataggtgcctgccaccatgcctggctaatttttgtacttttagtagagaccgggtttccccatgttggccaggctggtctcaactcctgacctcaggtgatctgcctgcctcgtcctcccaaagtgctaggattacaggtgtgagccaccgtgccccgccttggcatgataaacttaatgtgatttaattacaattattttgtttgaatgcttagctcaggtagcattagttcaggaaatatgctttaaattttctgtaaagtatactctcaactaagtgttctgtatggaaatttcagatttccttaaatgttctcaataaaagtttgtctgctggaattttttttttggaggtggaaagtacagtattatttctcgacaaacgttttacctacaaatatctgaagtcaatatgtttgaatttgttataatggccactcagagttgatatcagagatttagaaagagactttggagtaaaacagacctgagttcgaatcacagcctaggcaattactatgatacctcctccacgttactggattttcatggctccgaatttcctcatttgcaatgtgtatatcctaacacttatctcatatggttgttgtaatatttttttatgtaggaaaaaacagagggctaggcatctgtaaacataataaaaagtactgttacttgctttcacaatgacttaatgatgttttgttacttcaaactttctttgttgtctcccttacaagtttcaggccccattaaccaaatattcactgaaatattcaaagtcaatttggacagaagtttgtatccgtttaaatgtttttctgtaaaactatatttaattcaaatcttatatccagttgattgcagattaatttacttcaacgagcatttattaaatcgtactatgcatgagtatatttctgaaggtcatggccttaccttggagtatgtggcctttccattttcttactgaaatatctgtaggttgagataatagtgactttctataattgacttactgaaattctctattttcaatgctatcaatgatttagatatggtttaaaaactcgtgtttattcacttttcagctaaaatataaagtgatggctcagtggtttcttgatgaggaaatcaagaactgtagcacattttctattactaattttatagaatgatctttagttaaataaaaaacttacagttaatataaatagcacttagaagaatagcatttcattttgaaacgaagtctcaagtcatggattttcattttctaggtctgtaatatagcaatatgcattgccttctgagtgattatttagttcaaggaagagtatattcattttatctttaggaagtttcagataggaatgttaaggtattatttctcatttgtaatttactagcagatatttgcctagatatgataatgttaggaataaaaatatggaattaatcaatattaaaataggaaaatatctttttttaatatgtttccaaaactttgttgaaagcattcattttaattagcagattatatatcaatatagcaactactaatataatactttgtaattacagagtttaaaataatacattcatttaaaaatgtctatatgttgttaatgtttgaagtgataaccaaatatacttaaaaactttactatagatatcaaattttatagtcttggttatttaaaactgcccgttgacttggatcagtttgaattactgaacgtagaacaacccaccatggtgttcacaataaacttacacagaaagaaaacctaaatatttagctatgccttctaaaaataatgaatataatgcatgctaaacatctcataagtaaatcaaaagcatttatttaactttgtttcttttttttttttttttgagacggagttttgctttgttgcccaggctggagtgcagtggcgcgatctcggctcactgcaacctccgcctcccgggttcaagcgattctcctgcctcagcctcccaagtagctgggcttacaagcatgcgccaccaggcccagctaatttttttatttttagtagagaccaggtttctccatgttggtcaggctggtctcaaaccccctacctcaggtgatccacccgcctcggcctcccaaactgctgggattacaggcgtgagccactgtgcccggctttaactttggcctttatattaagtaaaggaagtgattacctgcatatttagttgtattctgagtaccatttctactcatttatttgctataagtttcttttggtacttatttgtgttcccaaatttactttgatttcttctttgtggctcaaatttgctgattttttttttttttttttttttttttgagatggatcctcgctctgtcacccaggctggagtgcagcggtgcaatctcagctcactgcaacctctgcctcccaggctcaagcgattctcctgcctcagcctcccgagtaggagtagctaggactacaggcgcccgccaccaggcccggctaatttttttttgtatttttagtagagatagggtttcaccatattggccagctggtctcgaactcctgaccttgtgatcaacccaccttggcctcccaatgtgctgggattacaggcatgagccactgtgcccagccaaatttgctgatttttagatttcgtgcatgtctaagaactttgattatagttcttcccattattgttaaagatacaggtatttagaagtacgttttttgtgaatctagaaagcctacttggttcattttttctcattcattcttttacataatacttatttagtactttctgtgtgcatgtgccaggcattgttttaaccatcaaggacacagaaatgaactaaagtccctgcatgcttagagctttcactagtgacagtaaaatatatgttaaaagggagcaactattaatactatcgtgaagaataaagcagaaaggaggaatagagagtagaaggggagagagttgcaaacttcatttggatggtgggggatgacctcatggagaaggtgacatgtgaggatggatttgaaggaagtgaaggaatgggctacatgatgctggggagaaaagcatgcaggcagaggaaatgacaagtgtctgatgtttcagagaaagcaaggagggtgcagaggctggagtggagtgagccatggggacagtggtaggagaggaaagaggaatatggcgggtaggtgccaaggagcttcaaaggccatggtaaaggcttaggattttataccgagggaggtgggatgttactgaaaggttttaaaggatgaaagctctgctgtaacaggataactctggctgttgggttgagaccaggtgaaaggggtgggcaggggcagaaacagggacaccatttaggaagctgtttcagttatcccaatgagaggtgatattgacttggtaacagggtaaaagtaacatggaggtagtgaaaaggagttgaagtctgaatatattttggtattaaagtttttctggtgggttggatgggaagtacgagacagagaggagtggagtatgagtccgagatttttgtcctgagctcccagaaggaccaaatagctaataactgagatgagaatcaggcttggggcataggataccagtagctcagttcagatgcattaaaattaagatgctttttttttttttttgagatggagtctctcggtctgtagcccaggctggagtgcagaggcgccatctcggctcactgcaagctccgcctcccgggttccagtgattctcctttctcagcctcccgtgtagcttggattacaggcacccgctaccaagcccggctcatttttctttattattagagacggggtttcaccatgttgaacaggctggtcttgaacttctgacctcaggcaatccgcctgccttggcctcccaaagtgttgggattacaggcgtgagccaccacgcctggccaaaattaagatactttttaagcatttaggcatttgataaacaagtctggttttcagagaagtgtagagacacagatttgttagttgtaagaaattaaatgctatttaaagccaggagactggttgggattacccgggagtgagtatagaaagacaagaggtctagatactgagctttaaggccttccagatttagaagtgggcaggaagtagtaataatgaaaagggagtgccgctggggtgaaagcccagggaaggaagtgtttccaggaggaaggcaagacaatctgtgtcaagtgttgctgaaggatgaagatgagaactgagaataaatctgtgggtttaggcattttggaggtcagcgctcactgggagtcttcactagagcagttttaacagaatggagagatcacatctttttcctaaatcgtgtggtccattaaatacctttaaaaaattccatctatttggctgggcgcggtggctcacgcctgtaatcccagcactttgggaggccaaggcgggtggatcacaagttcaggagattgtgaccatcctggctaacacggtgaaaccctgtctctactaaaaatacaaaaaaaaaaaaattagccgggcgtggcggcttgcgcctgtagtcccagctgtttggaaggctgaggcaggagaatggcgtgaacctgggaggcggagcttgcagtgagccgagatcgcaccactgtactccagcctgggcgacagagcgagactccgtctcaaaaaaaaaaacaaaactcatctattcaaactaaaatttgtcagtacttcataattgataaaaatgctttcacatatattatcttagttaagcctcattagtagtctaagagagatgggataatatctgtgtttaccttaaagaagaagaaatcgagagtcagaagtaacgtgacttatccagagtcgcacacatataagatagaactgcgttttaacttgaaaccctttgcttttcacagtaggggagatggcaataatgaaatcaattccaatattgtttgctagaggtgataatggtggtacatacaaagtatagagttaaagcagaggagggagtgattgtttatttggtcagggaagactttcttgagttgggatttaaaagatacgtagcattttgagagacaaagaaaggaacatcttaggcttggaaactgatatgcagaaacatggagggatgaaacaagatggagtctggaatgtgtttgggatgttccaggcatttcattcctactgaccctgcaggggagtaggtgggagctaggctgagtgacaagtgctagttcatattaaaattgaaagagggttttctttctttttcttttctttttttttttttgagacgaagtctcactctgttgcccaagctggagtgcagtggcgtgatctcagctcactgcaacctccacctccctggttcaagcgattctcttgcctcagcctcctaagtagctgggattacaagtgctcaccaccatgcccagctaatttttgtatttttagtagagacaaagtttcactatgttggccaggctggtcttgaactcctgaccttgtgatccacccacctcggcctcccaaagtgctgggattataggcttgagccaccgtgcccggccagttgttttttttttttttttttttttttttttttgagacggagtctcactctgtcgcccaggctggagtgcaatggtgtgatctcggctcactgcaacctcagcctcctgggttcaaacaattctgcctcagcctcccgaatagctgggactacagatgcccgccaccacgcccggctaatttttttttttttgtatttttattagagatggggtttcactgtgttagccaggatggtctccatctcctgacctcatgatccgcctgtctcggcctcccaaagtgctgggattacaggcgtgagccaccacactcagctggtctcgatctcttgaccttgtgatccgcccgccttggcctcccaaagtcctgggattataggcatgagccaccacacctggccacacctggctaatttttgtatttttagtaaagacaaggttttgccatgttggccaggctggtctcgaacccctgacctcaggtgttctgcccgcttgggcctctccaagtgctaggattacaggcctgagccaccacgcccagcctaaaatggagttttaacagcacaacttctacgtgtcattttaatgtacctcacagcccaaaagttgtaaacctaattagaaatgtttgaacatacgtacattaccacaaatgcattttttttttttgagacagagtctcacccaggctgtaatgcagtggcacgaatctcggctcactgcaacctccatttcctgggctcaagagattctcctgcctcagcctcctgagtaagctgggattacaggtgtgtgtcaccacgcccagctagttttttttttcttttgtgtttttagtagagatggggtttcaccatgttggccaggctaatctcgaactcctgacctcaggtaatcagcccgccttggcctcccaaagtgctgggattacgggagtgagccaccgctcccagccacaaatacatattttcaaaactcgatttttcctccaaaattaaatgtgtgtctggatcatataccactgaatagggtgacaccatgtctagtttatatcaatcaggatgtatttgtcctcacgtaagaaaatagtcaactaacagtggcttaaaaagtaaggatttttctttttcttttctctctttctttttcttttttttccttctttccttccttccttccttccttccttccttccctccttccttcctcccttcccttccttccttccttccttcctcccttccctcccttcccttccttcccttccttcccttcccttcctttcccttcccttccttccttccttccctctttctttgtttcgttcatttcaccttgaaggaattcagagtatagctgttccaggactggctaattcagcagatcagtaacatcatggttcctggtcagctggtaacctggacctaggaaagaaacggtgaatatttgtctttttttttgagatggagtctcactctctctctcgcccaggctggagtgcggtggcgtgatcttggctcactgaagcctctgcctcctgggttcaagtaattctctgcctcagcctcctgaatagctgggattacaagtgcccgccaccacacccagctaatttttgtatttttagtagagacagggtttcaccatcttggccaggctgatcttgaactcctgacctcatggtccacccgcctcggcctctcaaagtgctgggattacaggcgtgagccaccttgcccggccgaatatttgtctgaatacaaacacacgcgcacacatgcacacgtttaagtatactatttgatgatttttggagtggggagacttatagaattgtactactttcaccatttccagaactttatttttattttatttatttatttatttttgagactgagtctcgctctgtcacccaggctggagtgcagtggcgtgatcttggcttactgcaagctccacctcccaggtccacgccattcttctgcctcagcctcccgagtagctgggactacaggtgcctgccaccatgcctggctaattttttgtatttttagtagagacggggtttcaccgtgttagccagaatggtcttgatctcctgacctcgtgatccacccgccttggcctcccaaagtgctgggattacaggcgtgagccactgcgcccggccccatttccagaactttctatcattccctaaagatcccttgtgtccactgtggtcaatttctattcccatccaccagtcacaggtaactactagtttctatctctatatatgtctacattttcagaacagtttatggaggtggaatcttacaattagtgtggcctttttgcctggcttcttttgctcaccataaagtttatgagatcagtctgtgtcatagcatgtatcagtagtttgatccttttcattggtgtgtagtggtgcatcgtgtggacataccatgttttgtctgtctagtcaccaggtgatggatatgttagttgtttccgtttttgcagctaccacgaataatactgctatgagcatatgtgcataactctttgtattggctgggcatggtggctcatgcctgtaatcctagcactttgggaggctgagactggtggattgcttgagcccaggagttcaagaccagcctgggcaacgtggtgaaacctcatctctaccaaaaatacaataaattaggtgggtgtggttgcacatgcccgtagtcccagctatccaggaagctgcagtgggagggtcaccagagcccgggaggtcgaggctgcagtgagctgtgatgatgccactgccctccagcctgggcaacagaacgagactctgtctcaaaaaaaaaaaaagtctttgtatagacacccgtttttatttctcttgggtgtagatacccaggagttgaattgtggattgtatggtaatttatattcaactatttttttcctttcttttttttttttttttttttgggacggagtttcgctcttgttgcccaggctggagtgcaatggtgtcatctcagctcactgcaacctctgtctcccgggttcaagccattcccctgcctcagccttctgagtagctggggattacaggcatccgccaccacgcccagctaattttttgtatttttagtagagacaagattgcactattttggccaggctggtcttgaactcctgacctcaggtaatccacccacctcggccccccaaagtgctgggattataggcatgagccactgcacccggctatattcaactttttaagacactgccaaactgttttccaaagtgacaataccatgttacaggttggaggtttccgtcagcaatatatgagggtttcagtgtctccaaatcctggccttttatgagtcagaggaaaaactttcgcagaagtctacaagaggacttcccagggtaactacagtagcccatgacaaacactagtcactgataagcagacacatctgagaggcttagactggtcaactaacaccccaggcccgggaaggggctcataatgcttatcagtgcccagtgtcagaacacagttgaagggggatggctattggatacgaacccagcaaaggcattcatatgtccatgcgtcagggtaagcttggattattgatttaaacatacagattggagccagatgctgtgtgtatgtcacaatcatgattttattttatttatttatttatttagacagagtctcactctgtcacccaggctggagtgcaatggcttgatcttgactcacagcaacctctgcctccctggttcaagcgattctcctgcctcagcctcccgagtagctgggattacaggcacccgccatcatgaccggctaatttttgtatttttagtagagacggggtttcaccatgttgaccaggctggtcttgaactcctgacctcaggtgatcctctctcctcaacctcccaaagtactgggattacaggcgtgagccaccgcgcccagccacaatcatgattttagaagttacaaactctaatggaaacaatccactctgttggaatttaggttattaaggtattctatgactaacatagtaggagtttctgaggccaggcatggtggctcatgtgtgtaatcccagcattttgcgaagctgaggtgggaggatcacttgaggccaggagttccagagcagcctgggcaacatagtggtaccccatctctacaaaataaataaataaaaattaaaagagtttctgaaaagtaacctgtccaaacgaagagcaaaacaagcacagctttggtaagtgactccatgggcagttgctaagccccagcattccttttctatgaggcaacatgtaacttttccagcatcccagcaacagtttttcataatcttggttaagtgtaagttaacagccaccaaatccttggcttaggatgtagaaaggtatttagacaaggttaagtattgggcaacttggcagcaacttgagaaaaattatttgagcttggatggaataaaaaaagactgtattttcatagtcttaccttattcttatgtaaatgtcttttattgtgaggtatgcatgcgtaaggataggtaaatctaccatgtagggggatattgatactctgttgtaccctctgttggaaaatccagaacatgcgggtcaacatgtttatgatcagtagagtgatatggtctcaagcaattcatgcttagaagtccctgaatatctgaagccaaaatttttataattggaatgcatgcatagataattttgataatttatgcatagcttcagatcattgtgggggaaataatgtttgaaatggatttctgtgacacttgtcttaaattaatgggatgactttccattttttcttcaaatttgagttggtaccattacagactgtgatagaattttgaaactgtggttttaatcctagtattttggattacgtagtgtcttttttttttttttttttttttgtcttgagacaaagtcactgtggcccaggctggaatgcagtggtgtgattacggttcactgcagcctctacctccccggctcaggtattatccaatctcagcctcccagaatagctggggctacaggcatacaccaccatgctcagctaatttttgtattttttgtacagacgcaatttcaccatgttacccaggctggtctggcactccttggctcaagcaatagcagtctgcctgctgcagctctccaagtgctgggattacaggtatgagctaccaagccaggccatgactttttttttttaacccaaacaactccagtagttctctcattgtagactatttcattttagaaataaggaaaaccaagagaaatttaaaggtttttttttttttttttttgagacagagtttcactcttgtcacccaggctggagtgcagtggcacaatctcggctcaccgcaacctcctcctcctgggttccagcgattctcctgcctcagcctcctgagtagctgggattacaggtgcccactaccatggctggctaatttttgtaattttagtagagatagggtttcgccatgttggccaggctagtcttgaactcctgacctcagatgatccacccaccttggcctcccaaagtgctgggattacagtgtgtgccaccatatctggccaaggttcttaattattggtgttagtgaatatgaagtatacatcttaaaatttatagttcagtattctatttttctcagagaagtggtagagaagcattacagaagtacttgtgcagcagtatcttatgcatcatcttatttgattctcactggaattccatataatagctgttagtaacattctcattttataggcgaagaaactggggttcagcaaaatgtccagttcaagttatcaaactagtaaattgcacaatgcagctcttttgactttgcactagatattagggatcagtaatgtaaaccaggaagagagaatgtttccttgagagctcccactcaccctgataatttttctagtttcaccttgagacttactcttattctgcaaatactgtgactgtatcttgagacccaaacatttaatgaggcttaaaaagaggatggtctactttgctggtggttttttttttttttttttttttttttttttttgagacagagtctggctctgtcgcccaggctggagtgcagtggcacaatctcagcccactgcaacctccaccacccaggttcaagcgattctcttgcctcagcctcccaagtagctgggactacaggtgcctgccaccacgcccagctaattttttgtatttttagtagagatggggtttcaccgtgttagccaggatggtcttgatctcctgacctcgtgatctgcccgcctcggcctcccaaagtgctgggattacaggggtgagccaccgcacccggccctctgctggtgtttttagatttcagagggagagattgtgttgcaagcagcagttgagaagccggcatgacggtgaaatccgtctgtgttcaagagttttacttgtcagattttaatggatggcgtcattatctctaaggaactcccaaaagatgatacatagcaatactcatagagtccctattctgcagcaaaagaaaaatgattttcagatcatcctttcatctcctctcttcttcaagtcagatatccaagaaagtttgggcagactcacaattcctaaattgaaaaccctgaatccctgaattgaagatttccctgtggctttcaccttgctttgtctctgcatttaggcctctccctttctataggtatgagagaaaagaaactctatgcaatgacatgctctttattcatagctctagctcttattctgctctgtctactttggactgtgatgaccctctagggactctacttgctcttttctttgttcttgttgtttttctagagacacagtcttgctctgtcacccagactgcactctgtcatgacttcagtggtgcaatcacaactcactgcagccttggactcctggattcaagcgatcttcccacctcagtctcctgagtagctgggactgcaggtgcatgccaccatgcctggctaattattttttattttttgtagagacaaggtcttgctgtttcactcaggctggtctggaactcctgagctcaagcaatcctcccgtcttggcctcccaaagtgttgggattataggcgtgagccaccacacccagcctcttcttgttattattattatttttttaagacggagtctcactctgtcgcccaggctggagtgcggtggcgcaatctcagctcactgcaagctccgcctcccatgttcgcgccattctcctgcctcagccatccgagtaactgggactacaggcgcctcccaccgtgcccggctaatttttttgtatttttagtagagacagggtttcaccgtgttagccaggatggacttgatctcctgacctcgtgatctgcccacctcggcctcccaaagtgctgggattacaggcgtgagccactgcgcccagcgtcttcttgttatttttgacgggcctatgccaggccagaggtaggcctaagtgacctggttcatgccttccttcccacatcccaggattgggtcctactagctttctggatctcaccactctaatagagggaacaagaccctcttttctaaaagcctagagcggggtgcagtggctcatgcctgtaattctagcactttgggaggccaaggcggggggatcacctgaggtcaggagttcaagaccagcctggccaacatggtgaaaccccgtttctaccaaaaatacaaaaattagccgggcgtggtggtgcacacctgtaatcccagctacttgggaggctaaggcaggaaaattacttgaatccaggagacggaggttgcagtgagctgagatcatgccgttgcgctccagcctgggcaacaaaagcgaaaatccatcccccccaaattaaatagataaataaattaaaacataaaataaaaaataattttaaaacaagtctagagcagagctgggccaaactgcatgtgcttttcttctttgccttgggtttgaactcagcctgccttcctgtgatgtgggtttctttcattgggagatttcttgagcccctgattttcagtactggcctggaaggacgaagagaactcaagctttctttaatattccacaccagaagtttcatagcctatgcaaggcctggacctacacctgcacaacaactttttggtgtaaagagtgaatcccggatattacagtgggtgagctgagctattagaatgtgtaatgggaggacaggcacggtggctcactcctgtaatcccagcactttgggaggccgaggcaggcagatcacgaggtcaggagttcgagatcagcctgaccaacatgatgaaaccctgtctctactaaaaatacacaaattagccgggtgtggtgatgcgcacctgtaatcccaagctactcaggaggctgaggcaggagaatcgcttgaaccacggaggcggaggttgcagtgagccgagatcgcgctactgcactccagcctgggcgacagagtgagacgctgtctcataaaaaaaaaaaaaaaaaaaaaaagaatgtgtaatggggaccctttcacattgctttcattggaaggtaaatacaatttaaaggaaagaagtctaaaaactcagaacacccaaaggtgggcagttatttgaactcaggctttgtttggtgacccccatgagtcctgacctcattatctttagccctcaccacaaattgatattctagaaagctatctcttcctgcctgccccgcctcctagaaatacatcacactgcgttagcacagtcaggatgctagtccctgatggctgatcattgtagtgcccattggaggttggcatgattagttatgtgacaaccctgctgaaatgccacctactatatttggtctcagcgattaaacgaaaagagatggtaaggcaacaaaaattatcagcatatattttcagcttctttgagttttgcagattagtatagttcaaaggatagacaaattcacttgttttcattttgtctttaagataaataaattttggtactttcttaataagtgttcagcatttatcccagtgtgggaattttggtgaaagttcatggaatgtttttcttcaaaaatttccatcaggaggtctgactcctcagccaaattcaaaattctcactttactgtaatgatggagctgctatacctaaatatattgcataggtttctagacaaatggctgtaagataaataagcaaagaagaggaagaagtatcatgatatcctaatgccaagttctcgctctgcggtatgacctctggagttcctagagtttgtgtgatctgaggcttcagaagccaggaatgggagtttggctaacccgcatttttagatctcctttggaacatgggagtcaatccaggtgcctggaaaatgggctcgaacatccgaggtccccagcagatgacagcttcatcttattttctgcctcctttctctgcatcaacttaggttactatttacctattgattctgactttatgcaaattttatgacgtggtccacagattcaaatagtctgtcttttcacatcccagccttcagtgttcctcggcctcaactctgcctgctcttaccctgatactgcttctcgtctttggttcttgccttctttagaccttgattctcatggctggccaatttcagtggatcttggccagcctcagtggtctcaggttctgcctcctgttcttacagaataatcttggatcctaacacgttgctaaacatccaaaggcagccagtagatttccaaaaccggaactctccgtttgctatcacctctgcccttctccagggtattgcattgattcaaatgctataaatcaggggtccctaaccccaggccatggaccggtaccttcacttgcttacccaccactcacttcctgttctgtggcctgttaggaatcgggccacacagcagagggtgagcagcaagcaggcaagccagccaagcttcatctgtgtttacagccgctccccatcactcacattactgtctgagctccatcttctgtcagatcggcagtggcattagattctcataggagcatgaacctggtgagctgcacatgagagggacctaggttgcatgctctttatgagaatctaatgcttgatgatctgtcactgtctctcatcaccccaaatgggaccatctagttgtaggaaaacaagctcagggctcccactgattctacattatggtgagttgcataattatttcactatgtattacaacgtaatagtagaaataaagaacacaataaatgtaatgcacttggatcatcctcaaacgatccccccacctcccactgttcgtggaaaaatggtcttccacaaaaccggtccatgctgccaaaaaggttggggactgctgctataaatgacatcctgaaagtatgggagtagaccctctcaattatctaaaaagtattaagctattctgagtaccctttttttttttttttttttttgagatggactctcgctctgttggccaggctggagacaaaaaaaaaaaaagaaaaagaaaaaaaaaaagaaaaaaaaattagcccggcatagtggcatgcacctgtagtcccagctattcaggaggcggaggcaggagcatcacttgaacccgggaggatgaggttgcagtgagccgagatggcaccactgcactccagcccgggtgacagagtgaaactctgtctcaaaaaaaaaaaaaaaaaaagaagaagaagaaaagagccttctgtgtgtgcatgagtttggggaactctgcagactgtatgcataccccttttggaggttcaccaggccctctaggccaggctgtgagatgtctggtggttaaagtttaacttaaaaaaaaaaaaactcattgaatatggactcatttattatatttgttttggtttttaaagattcacaggacactcattgacaaaactcaacagaactaatcttttgacaagtgtatatttcatgtatccgaagacacagtaactgtgatttaatgtgcaatccactacaaaataatatttgagttttaacagtgggcttttgtccaaggaggaaatgtgaggaattttaggcactgtgacgtgtcctgtagagtgataatttggggcagcagaaacctttctatgtctctttggtcttataaagtcattgctcactacagccgtgaaaagactggccccaagccaaacaacaacaacaaaaaaatagcaacaaaaacccctgccggccgggtgtggtggctcacgcctgtaatcccagcactttaggaggctgaggcaagcagatcatgaggtcacgagattgagaccatcctggccaacatggtgaaatcccgtctccactaaaaatacaaaaaaattagccgggcgtggtggcccgcgcctgtagtcctagctgctcaggtggctgaggcaggagaattgcttgtacctgggaggcggaggttgcagtgaggtgagattgcaccactgcactccagcccggtgacagagtgagactccgcctcaaaacaaaaaacaaaaccctgccaagatcataatgaggtggaacagaaatggaacggagcttcagtgaaataaagatgatataagcaggaggccattcaaagcagctgcaatgataaatactatagggcttacagaagcccttcagaggctcacacaatcgtttgagaacatctgggagacagtaagcctcatcaggtcccaggaggaccattcccatttaggcagcatggatcgtattccctgaacgcaggcggaaggagttttgataccatatagtttagtacctatttatcctgtgctgctttgcttggttttcagtttcatggctgggatcccccactccccatagaagctcgggaactgtgagctggataaaggcctcctcccaaaagaccaggttctaatatctggaacttttgaacgttgccataaaggaacatggtctttgcagatgtgattaaattaagaatcttgatgtagagaggttatcctgggtgacctgggatatccaatcacaagtatccttataagagacaggcaggagatcatcttcacagagcacatgtaagacagaggcacagattggagtgatgtggccacaagccaaggaatgccagagaatgccagcagccaccacaagctagaagaggcaaggaacagattccacaaacagattctacccctgagccttcaaggggaacgtggccctgcagagagcatgagggagtaagtttatgttgttttaagccacagagtttgtgataatttgtcctagcagccctaagaaattaatacaggctgtaaattttctgagaggtggggtgatgtgttccctgttcctgtcttctgcacagtatgcatgtttctgcacagaacaggcactcaaatacccgagtgcttgaactgacttgacttcttcactggttcagaaattcagagcctaaagatttggatataaaattttattggaagaacagtgagaccagtaagatctgagcattcatttgcaaaagaagaaattaatgcccctgaggttagtcccttagagtttattgcctcttgaagctgagatttataccacgttttaatgtagcaattttttttttgccttgctggaatattaataataccatgaagaaaacttcatctaggccgggcgtggtggctcacacctgtaatcccagcactttgggaggccgaggcgggcagatcacgaggtcaggagatcgagaccatcctggctaacacggtgaaaccccgtctctactaaaaatacaaaaaattagccaggcgtggtggcgggcgcctgtagtcccagctacttgggaggctgaggcaggagaatggcgtgaacccgggaagcggagcttgcagtgagccgagatagcaccactgcactccaacctgggcgacagagcgagactccgtctcaaaaaaaaaaaaaaaaagaaagaaaacttcatctagcagggaccagaaaagcaagtcattcaaggcggtggcttggtgtcttaattagatactaccttggtgcttgctttctcttcgtttgcactgacggtatctaaatgacagtgttctgggatttctggatcagacacaaaatgtcttctgctcaaatcttccatgaaatgtaattttgaaaccatgagcttggttcttactcaagcagaactcttagcgtatttactgggacttcagctgaattggaatggaattgtgagatcacattcctttggaaatataaacagtttgtttttacgtataaggaagccacataaaagtatctagaattttagctcagtagactggttggtgatttggtgatgaacattattcttttcaatattatggccattttatttatttttttaacaggcattttgtttttctttggtagggaaataagttctcttctagaccatctttcatctaggaagctcagttcattgtaaagccaagtaggagtaacaataaactgctagaacattttaccaatattgttaaactaatggcaaaggaaagggaagctacatgcaagattgtggttagtgtgttgataattttgtgtttgttgtgatctggagcataggtaagggtttctttacagatttactgtgaatttttttttttttttttacggagcagagagtttaataggcaagaaaaaagggggaagaaagaaagaagaagctcccctgtacagagacggggcagggggctccaaagccgagagagggaaccccgtgaaatttattttttaaagcacttatattattacctgatgccacatagaaatgttaatatgctagtagacttcgcaagatttagtcactttcattgtttttagtaagaaactgtagcagacatttacgatagtatggctaaagtaaaatcagttaatctccaccttggctttgcaggagagtgagggttagatttgaaagagacttttccctcattgaattgaacttgtatttgaccttatattctgatgaaggttgaaattgacattaggcagttttgctttaagtcaacccacctcacatgttgaaataatgaggtctttgccttgatgttaactccatccccttcactctctgccatatttaaaatgtgctccaatgccatttagtttttactattaatagttatacagccttattaccgaagtattaagtggtatgattgggtcatcatctaaaagattccttacaaaattctctaaagacaggcccatgtgccagacattgtattattttgcctggaacatagcagttgctcaataaataattatttgttgcctgaatgaattcatgatttaatcactgaaatcaacaagttttgatgtcagtgaagccttaaccagcaatttggatgtcctgggctgtcatatcaatctagtaactcatcttctggtgcgcagaaaagtgttcatcaacagtttattcggtgctgtccaagagaaatagaatgtgggccacaaatgtgagccacagatgtcattttaagttttctagtagctacgtttaaaacaaaaagaaacaggtgaaattatttttagtaaaatattttaactcaatatattgaaaatataatttcaacataaaatgaaaataaatgtattttatatatgtactatgcatatttcatatttaacaatatatctcaatttggcccagcctcatttcaaatgctcaaaatccacatatggctgccagtggctaccatattgggcagcctacatttacaccatctggaggctccaattctaagtaattatttttgctaactagatggaaaactcagattttataagctattgagtgtgatatgtgttatcctatcagtgtgcaactaaaacaaaaattacacaattaaaaaaattgttctttagagattgtgtaaaaagtgtaatgccccctaaattttaggggccatggcaaaacttccattgttctaagattcagattttctcttgtgttattgtggggcaagttacttatcctttcttgagcctcagctccctcttctgtaaaatggggttactgtttgtctcaggatgtagagataacatttgcaaaggttcttttttgttttgttttgttttttgtgacagagtcttgctctgtcgcccaggctggagtgcagtagcgtgacctcagctcactgcaaccttcatctcctgggttcaagtgattctcctgcctcagcctcccgagtagctggcattacaggcatgcaccaccacacccagctaacttttgtatttttagtagagacggggtttcaccatgttggccagactgggctcgaactcctgacctcaagtgatccgcctgcctcggcctcccaaagtgctaggattaccggcatgagccaccgtgcccagcccacaaaggtcttaactcagaaacattagctactcattgttagccgtaattagttcttatttagtattttcttctgcatgcaaaacttcagagaaaaaaatgggttctttcctatagatgctcgtcttcttttcctaatagttgttccacaggcaactcctcattatggcaagaatttcctgtgattctttgatgaaaatgagataattgaattttgtttaaattagttcaacatgggcgactccaggtagttcctgcacagggggcccatgaaggatgccaagaaaactgaagaagggttaacttgggttaacttgtgaggtattgaactgaatttggagactctgttaatgcatttctattaaacttatatcaacattacgccaagatcagtaatctagcagggaaaggtgatcatggtagagaaatgcttttagatatagctagacttcattctgcttaaggcctatccaactcttttccgatgtaataaactttgagaatatgaaattagtgacaggaaaatgtttttagccattgtttatcttgctttggttaagtgagacaaataatgagaaatcactggagctaaaatttcttatagtatgttatttaccaaagctcacctaggcagggtcaaatacttgtttttttgtttttagatgatgttaatatgtttggagtataggatttccgccagcagttcctaagaatttttgcataacttaaagactttttttttttttggcaaatagttgttgattttaattctaagtaagataatcttcatgataaagagtggtgagcaaaggcttgtcctcggagacctactgtcgcttggctattactttcacctctttcattgcttgtggaaaaacccttatccagggaagaattaataacttcaacaatactatcaaaggagggcctaaaattaaaaaaaaaaaagaaacaaaaaagttgtgaaacaacaacaacaacaatacttggcaaactcctgacagacttagggagaatattatgatattgaggctgctgttgactaaggctctcctattgttaatataaaaaaatcttttgtctagtagtattaaaccttgacccccacacagcggaactttggaaaagaattgttaactcctttgctgaaaacagagttctagaatgttttagcaaaagcaacatatcttttactaaatattatattttccaataaaatgaataaagagaatgctttttttttgcttttcatatttacataaattgaaaaaattcccccaaaatacgaaaaactggcccttgcattttttacgttgctcaatgtgggtaactgtttagtggaagtagacattcacttaaatggggaaaatggagaatggacaattcattaaatggaggaaaataaagccttattttttaaatgttgctgataaaatatttgggtacttaatgatgctgaatcaagaccactctgaatacaagtggtttcccttttctctgaatgcctggttgtacaaatcataggttttgcttgtttttgggtaggggaaggttggcaagcctaatgtggtttctttgagagcaatctgtctgaggggtcccctttgctgtgggggtgagggcatttgacttctctaatcttttcttggtcatagctcctcttaatggcaatgtttttaaactcttctttgagagagaatatattccgagtctgattttgcagtgcactttctcctgtgtagaatgctcatgagaagggaaccatctctgcagaacttctagaacaagtttttcttcctgtggtattgaaaaggatggattggatgggtgcatattttcccttctatggaaacaagaactctgtagggttcctgtgaatcaggaagccgttacaaagctacaagtatgacggccagtttttaaaaaatgaagtacgtatagtttatttaggggaaaaagaaggaaaagaaaagagctggaaatagtaatatttgctttcaaaatagaaatatgagcctgaaaatagaaatatttgcttttctgtatttacatacacatctggtttttcatttattttgtgtgtaaagaaacctaataggtgtgactcgcttcttcatcttgtgattgtgcttttttttttgagacggagtcttgctctgtcaccaggctggagtacagtggcatgatcatgactcactgcaacctccacctcccgggttcaagtgattgtcctgcctcagtctccggagtagctgggactacaggtgcgcgccacaaagcccagctaatttttgtatttttagtagagacagggttttatcatgttggccaggatgatcttgatctcctgacctcgtaatccacctgcctcggcctcccaaagtgctgggattacaggcgtgagccaccgtgcccagccgattgcgctttttaaaccttggtttcagctttgatgtgacagtgcttgggaatagaataattttcctccttgggcttgagctctgttaatcatttggtaaagatctttcattgtcaaaaaagccaagaggcaggcctagttaatatttgcaaaccgaggaaatatttattacatgaaatattgttccactgatgggttagtggaaaattctgggataagatcatttctttcatgactaatgaagaactgtatcttaattacttttctagagggtttttttttggttttctgatcatggatttgagattcaatttttatactaaatgatgacgatggttaatatcaacttttttttagcttagagatacctggtttatttaataagttaacagggtttcattctcaataatagtgtgactatagaccgctgggcagcagactttattgaaccaataaaactttatttgcttgctcttaaaagctccgttggaaagacctgggggtaggctggacacagttatttaacacagaatttctaatacctttctttgtaatgaaaaagggccaatttacttactggctgtgagctgtaaaagcatttccattgatgttaatgtgggcttgactccctcagagttggttcattccagaaatggttcttggatcttgagagtggggagggtggttcttcccagcaaagctgagtgacttgcccaagggcttgtgatagagccttgtagacagtgcccttacttgcctttgtgatttgaatgatcatccaagggaaagtagaatcagttttaaggaatatttcaaattagcaaaattggaatatccccggaaggctgggttctacgttttatcatgaagaattggtcagacaccaacatttttgagtgccagagacttgcaataggatgtcttacaaatgttatgtgtattttgataggctaaggtttttgtagccaccactgcatgcagtgtaaacactccatgaattattaggttttcctatgttaccagaaaagggtcccattctagaccccaagagggggttgttggatctctcacaagaaagaatttgaggtgaatccatagagtaaagtgaaagcaagtttattaagaaagtaaaggaaccgggccggtggctcacacctgtaatcccaacactttgggaggctgaggctggcaaatcacctgaggtcaggagttcaagaccagcctggccaacatggtgaaactccgtctctactaaaaatacaaaattagctgggcatggtggctcacgcctgtaatcctagcactttgggaggccgaggcaggcggatcacctgaggtcaggagttcgagaccagcctggcaaacatgatgaaatcccgtgtctactaaaaataagaaaaattagccaagtgtggtggcgcacgcctgtaatcccagctattcaggaggctgaggcaggagaatcacttgaacccagggggcagaggttgcagtgagccaagatcttgtcactgccctccagcctgggcaacaagagtgaaactctgtctcaaaaaaaaaaaagaaaaaaaaaggtaaaggaatacagctgggtgtggtggttcatttctgtaatcccagcactttgggaggccgaagtgggcagatcacttgaggtcaggagttcgagaccagcctggccaacatggtgaaaccccgtccctactaaaaatacaaaaatcagccgggcgtggtggcacatgcctgtaatcccacctacttgggaggctgaggcacgagaattgcttgaagccaagaggcagaggttgcaatgagctgagaccatgtcactgcactccaacctggatgacagagcagactctgtctcaaaaaaacaaaaaaaaaaccaagcaaaggaataacgaatggctactctataggcagagcagccccgagggctgctggttgcccatttttattgttacttcttgattatatgctaaatgaggggtagattatccatgagttttccagggaaggggtaggcaatttctggaactgagggtccctctttttttttgttttttttgagatggagtctcgccctgctgcccaggctggagtgcagtggcaccatctcagctcactgcaacctctgactcccgggttcaagcaattctcctgcctcaggcttctgagtagctgagattacaggcgtgcgccaccatgcctggctaattttttgtattttgtatttttaaaaattaaaaattatttttacattttttgtatttttagtagagatagggattcaccatgctggccaggctggtctcgaactcctgacctcgtgatccacccacctcgacctcccaaagtgttgggattatgggcgtgagccaccgcgccaagcctttttttttttttttttttgagatggagtctcgctcttttcgcccacactagagtgcggtggcacaatctcggctcactgcaacctccgcctcctgggttcaagtgattctcctgcctcagcctcccgagtagctggaattacaggcacccgctgccatgcctgactaaatttttttgtacttttagtagagataaggtttcaccatgttggccaggctgttttcgaactcctggcctcaagtgatctgcccacctcagccttagaaagtcctgggattataggtgtgaaccactgtgcccgtcctgtctataaacattttaaaatgctgcaacacagactcctcatttgtcactataatactgagtactgagtgtgtggacctgtaagggtctctttttctctttttagttacagggcttgacgtttctaggactaaccaaggaagatgcagttggttgtgaatcacttcttcccatgctgaaatggcaagtttatgacactaaagatgcagtccaacagagtagtcactgtgctcagcatcagtatttttttttgcctccatcatcttgctgaaacagcattggtgtaataaaaatgaacctctacacctctttaaagtgctttggatttggacaaatttatgttttatcaaaggttaatcctgacaaattatagtcaatgatttctggaaggtctgctacaggtgcagttgaattaattgtatactgtgcatagccggatgtatactttaggaaagatttactgcattttttgtggcaaaagtagaactagaaaactggggatgcccagtaaaaccacagtgggaccaggagcttgaccctactgtgcagataaatgatgttcatgaaaggttaagttagagctctaatgttcctcattgcagcactctactgctacctctgcctaaaagacaaaatgaaaaggggaaaagtcacaaaggcagggaaaaaacaggtaacactagagttgtgacttttacccgctttttcattttctgtttttggtgggaaggtgaaacctctattcatttatctgctggaaagaagtcttctttgtgttttcaagacaggcgcttctacccattgtttctagaagcaggagaaactttatttctctagttcggggatcgcccagatgcaaaagaggacgaaatgagaagtgagccttgagagaggaatataaatcagtgttacaaacaaacaaacaagagtattgagcacatagctgctcaagatggcttgacaaatgaataaattatgtaggtgcagccctgtgttaaataaaggagtttatactctgagacacacacatgacagacacaacagcaaatcttgaacatgtgcatagaagtttctgaactttccacagagaatggtttattagtgtgctagggctgccataagaaagaatcacagactgggtggcttaaacaacagaaatttattttctcaggctgggtgtggtggctcacacctgtaatcctagcacattgggaggccaaggcccagcagatcacttgaggtcaggagttcgaagccagcctggccaacatggtgaaaccccgtctctactaaaaatacacaaaataagcctggcatggtggtgggtgcctgtaatcccagctacttgggaagctgatgcaggagaatctcttgaactcgggaggcggaggttgcagtgagccgagatcatgccactgcactctagcctgggcaacagagcgaaactccatctcaaaacagttctggagacaggaagtccgagatgaagatgtcagtagggccatgaggcaaggatctctctcaggcctctctctctctggcttgtaaatgtctattttcctctctatgtgtctgtgtccaaatttcctcttcttttaaagatccctgtcatattgggttagtgcccaccctgaaggcctcattttaacttaattacctctttacagtctctccaaatacagtttcattctaaggtactgggagttaagacttcaacatatggacttggggcgatgtgattcagcccataaaaaatggttacacttaccctttgatactaacactcatacctttttctcatttccctcaactatttttgtaagtatctaagaagccagaattttcaatgttttgatatttctcttatagttttctgttaatttgcaaatttggcgacatcacttcttgttttctggtagtctttattggtctgatattgaacagaacagtgagtagaaataggaaaaagaaaccttctgaagtaggaagtgcggggtcaattcttataaagagcatcatcaccatcaaacatttactgaatatctgccctgtcaaccctttcagatggttctgaggtcaacggagtgtctgctgagtaaataactcttgggtgaaaaagaaagcataagaatatcatctcttgggtatatatttttttcataaacttttttttttcggtggtgtctcactctgtcagctaggctggagtacagcggcacgatcttggctcactgcaactgctgcctcctgggttcaagcgattctcctgcctcagctccccaagtagctgggattatagacctgcgccaccatgcccagctaatttttgtatttttagtagagatggggtttcaccgtgttggccaggctgatctcgaattcctgacctcaggtgatctgcccgccttggcctcccaaagtgctgggattacaggtgtgagccaccgagtctggcctttataaacttttaattatgtataatatacataaagataagtacactagtcttaagtgtaccattcaatgaattaccataaagtcaaccttttaggttaagaagttggtagctccccttctgccctctcccaagggtaactcctatcaagacttttatcattatagatagaagtttgatactattttccatttatgtaaatgaagttgttcgcagtgttcctcattgtatttggcctctttgctcaacattttcagccatgctcaacagattcagccatgttgccgagtatagcaatagtttctttattctcgttgctgtacagtactcaattgtttgaagaggccacattgtattcgttctactgttggtggacatttggattatgcctagtttttgactgttaggaatagtgctgctgtgaacattcttttttttaatttaaaaatatttaattgacaaatacaattgcatatatttaaggggttcagtgtgatctgttgatatatggacacattatgtaatgattatgaacattcttatacatatcttttgttgaacatatgtatgcatttctattatggagtggggctgttgggtcgcaggtcatatgttcaactttagtagatacttacagtatttcaaaagcacctgtagcaatttacacatttttttttcttttttttggagatggagtcttgttgtgtcacccaggctggagtgcagtggcgcaatctcggcttactgcaagctccgcctccctggttcacgccattctcctgcctcagcctcccgagtagctgagactacaggcgcccgccaccatgccaggctaattttttttttttgtatttttagtagagacggggtttcaccctgttagccaggatggtctcgatctcctgacctcgtgatctgcccgcctcgccctcccaaactgctgggattacaggtgtgagccactgttcccggccgcaatttacacttttatcagtagtgtatgagagttctgattgtgaacagttttgctaatacttgatagcatcaatgtttaaatttagccattctcttaggcaagtagtggaatctcattgtgattgcattttaaatttctctgaggacaaatgaatttgagtatcttatttcttttgatcactcaagtgccctcattcatgaagcagtttaaagtaatcacgggctgtgggcggtggctcacacctgaaatcctagcactttgggagtccaaggccgtcggatcacttaagccctgggaggtcaaggctgcagtgagctgtgatggcgccactgcactccagcctgggtgacagagcaagatcctgtttaaaaaaaaaaaatatatatatatatatatatataaattatatatatatataatttatatatatataaatatatatatataaattatatatataaatatatataaatatatatataaatatatataatatgtatatatataataataataaaataaagtaatcacggccaccaatccatcactggtgtcctcaaaaactcttccaagtcttaagcaaataaataatgaattgatctttctgcagcttaaggctaaggtgaagagttggtttgttttggatattttaagtttatgcttattaagagaatcctcactctcagaagtgttccagtttagatgattaatttatagtcaccctatttatatccatcatctcttctgcattatttaaagcttttctatctgaaatcactcattcatttgttctatcattgctgaggtcttactctatgccaggtagtgggataagtactggggatgtaaagatgtatacgatatccctccccctaaaaatcttaagtgttgtggaagaaacagagtctagaactattttttttttttttgagacggagttccgctcttgttgcccaggctggagtgcagtggtgcgatcttggctcaccacaagctccgtctcctgggttcaagcagttctcctgcctcagcctcctgggtagctgggattacaggcatgcaccaccacgcctggctaattttgtatttttagtagagatggggtttctccatgttggtcaggctggtcttgaactcccgacctcgggtgatccacccgtctcagcctcccaaagtgctgggatcataggcatgagtcaccaagcacggtctttttttttttttttttttttttttgatggagtcttgctctgtcccccaggctggagtgcagtggcccgatctcggcttcccgggttcatgccattctcctgcctcagcctcccgagtagctgggactacgggtgcccaccaccacgcccggctaattttttgtatttttagtagagacggggtttcaccgtgttagccaggatggtctcaatctcctgacctcatgatctgcccgcctcggccttccaaagtgctgggattacaggcgtgagccactgcacccaacctctggaactatttttacctgatctaatcatagccatataatcataactctgagttctagcagagctgaatttctgcattaagaacatctatgctaataaaatgatttgttacacccaatagcttatgttgatgatttatgatatgttgtgaacacaatcgtttaaaacatatattttttggcactctatttgtctcaagtccttaatgtgtgagaattcaatcttcagtaggttcataaaactcatgttttgggcaggagccttaatcccttgaatcacggtaagggaaacttgtgttgagttgaactgaatgtcttataaaaatccttctggtttctatgtcctcattcatttggatccagctgtgttaaaatggccatctgatactgtcttttacccggaagagaatactgctttaatttaaatgtgccctgttgtcacatctgcccaggtgttcaggtattactctttggtaccctgtatgatggaacaataagcactgttttggaattgtctgtttacttgtctatcttctagattagattgttaccaactcaaaatccctagcacctgacatgatgcccaacagaagctagatgttctggtcagtaaatgccttttgaatgaacgagaataagcaaatgttggcccgggcacggtggctcacgcctgtaatctcagcactttgggaggccgaggcaggtggatcacctgaggtcaggagttcaagaccagcctggccaacctggtgaaaccccgtctctactaaaaaatacaaaaattagccaggtgtgcagggcgcagtggctcacccctgtaatcccagcactttgggagggcagatcacgaggtcaggagatcgagaccatcctggctaacacggtgaagccctgtctctactaaaaacacaaaaaattagccgggcgtggtagcgggcgcctgtagtcccagctactctggaggctgaggcaggagaatggcgtgaacccgggaggcggagcttgcagtgagtcaagatcgcgccacggcactccagcctgggtgacagagtgaaactttgtctcaaaaaaaaaaaaaaaattagccaggtgtggtgcctcatgcctgtaatcccagctgcttgggaggctgaggcaagagaatggcgtgaacccgggaggcagaggttgcagtgagtggagatcgcatcgttgcactccagcctgggtgacagagtgagactccatctcaaaaaaaaaaaaaaaataagcaaatgttagaatacaaacacacaccactcataattacgaagaaatgataatgcacctggcatagagctaggttctggctccaggtcattgtggcccagaacagacatgccaactgctccaataggctttcatttggggagtgaggaacagacaataatgaaggcttcacacaaagtagtgttcagttacaagttgagataagtgctttgaagcaaagggacatatggcaaataagactgacctagactttgggagttgaaaaggcttcccagagaaagtggcatttaagataaaacctgcaggatgaagaggaattaatgataggcagtaggtagggaagacaggaaagcatctcaggctgagggaacagttgtgcaaatggtctgtggtgggcaggaacatggtggggatcaaagaggttttcagaagacaaacctgggagacaggtcagggtcagactattcatggcttaggagatctcattgaagatgccctgctttgtcttaggagcaatggtttcccttttaaaagttgtatgggaaggtacaggagtgctaggatcagatttgcactttataaggattaccctatgctaggaactagcctgatattttgcaaacgtaaataaagagaaagaatcaaatatttattcttggttgccacataacttgtacctcaaaataaccaaatagtatatgaagataaatttctctatagatgtgttccaggtaatacatgaaaaggagtgataggataccatcattccgcaatccatagtgaattatatgtttaggcaataattatcgatagatgttaactttacaaaagagacaagcagacaagattcctggaaataaataataccaccgtttgatagacttgtcaaaaaaaaaaatcaaacctgaatctgcccaagcttctagacctgactagcatatttttaggaaatgtgggaccaagggaatgtgctacccatagcatggagacgaattcaatacagtccaaatcctgggaaattctacaggatgaaccacttggattatttcaacaaagaaattataagagggacagaagagagatggaggggaacctatagattaaaagagatttacataaatgtgtggaccttatttggattctgatttggacatactaactgtaaaacaaaacaaaacatttatgagacacttggggtaatttgaacactggctggatatttgatgatattaagggattacgtattattcttaagtgtgataatgttattttgattatgtttaaacaacaacaaatagctttcctatcttttagagatactcactgaaatatttatgaatagaatgatgtgatgtctgggattttcttccaagttggtgaatgttgaagctgagggatgggtcaatgggagttcactttctcttcttttctgcttttgtttatgattgacatcttccattataaagagttttgaaaagttatgggaaaaaggaaaaaagagatcacctttggtttgacttttcccctcacccctcaaatcctcagtatgtttcagttgaaatttatcagctggtcacactttaatgtattactatattaaagaattttaattttaatatctttatatattaacatgttttaatgcttattagactgattgctttttaaaacattttaatacgtgttaattgtggaaaatttggatatgtaagaaaagcccaatgaagacaattaatagcaccgataatcccactactttggagagagctatagttaatatttttgagtgttcgatctcatcaggaatatatacatattaaaacataattttaattattaagcaacaaattttctgcttctattttttagcagctcattgtgaccattttcccaaggcattaggggttctgttataaacaaattttagtggctgtttagtgttaacatccatagacatctatggcaaaatttacttaattctctctcgttaaacactaaattaaaaaaaaaagtctgttgtggaaatgatgctctaataaatagacttataaatatatcttttatacattctgattatttcctttgcgtacattcctatagttaaattgctgggtcagtgagcatgtgtttttgtagcaatttttattttttttaaattttttttgagacggagtcttgctctgtcgcccaggctggagtgcagtggtgcgatctcggctcattgcaagctctgcctcccacgttcacgccattctcctgcctcagcctcccgagtagctgggagtacaggcacccgccaccacgcccggctaatttttttgtatttttagtagagacggggtttcaccgtgttagccaggatggtctcaatctcctgaccttgtgatctgcccgcctcggcctcccaaagtgctgggattacaggtgtgagccaccgcgcccagccttttgtagcaattttataagcctttgaaatgttgacactgatttgcactcctgtaagctatatatgagcatgcttatttattctgtgctctatcaactctgaatattatgaataaaattttttggccagtttgttgatgaaaaatagtgttaaatagttttagttggcatttttctgattatgactgcctttgaacattttttcctgtttattactcactagtttttcagttaccagacatatcctttgtacatttttatatttgtacattctttttatgcttaattgtacatagtctttatataatagggattgtatcactttgttagtcatgttgcaagaatttaccctgcatgttttaaaattcagtgtgtggaattaaaaaatttctaatatacgctgggcgttgtggcttgcgcctgtaatcccaccactttgagaggccaaggtgggcggatcacttgaggtcaggagttcaagaccagcctggccaacatggtgaaaccccatctctactaaaaatacaaaaattagctgggcatgatggcggatgcctgtaatcccagctacttgggaggctgaggcaggagaatcgcttgaacctgggaggcagagattgcagtgagccaagctcgtgccactgtactccagcctgggtgacagcatgagactctgtcacacacacacacacacacacaccaattttaatatatagatttttcaaatttttatatagtgagtgattaattttgttcatgcattctctctttggtattacaaagtccttttccatttggaaattattgtgtttgcctattttaaaaaaattgtttcatttattttacattggactctttaattcacataggtcttatattgccatattgcttagagtagagagctaacattatttttctagcagtgaccaattattcaagaagttgaacacttctttgttctctgagtcaaattgctagttcccctcatatattcagatattttatatgtaggctttctgtactctttcaatgaatgccctgcttcctaatcgtgcgcaagtagtggtattttaagccctgcaaattcatggattgttttaatatatagtatcagtacttaaaaaaaaaaaaaactttgattccattaaaaaaaatcttggatatttttcccctttccatcttccaaatagcttttttagtcttgttaatctcattcttgttaaggttcaacaagaattttcttataattttgaaggagatgacattagacccatttgggagatttgatatttttacataattattctcatccagtaacaaataatgtgccaccctttagtggtgttctttcatgttcttcagataaagttttgtatagaccctgtgtcagtcttgttaattactagatattttatatatggtgatgtttttgtgaatgggatcacaaaaatgcagcatttttattgagatataatttatgtaccatgttttgtgcttaatttcaaagctaatgtaactactaggcacagagcatacatactaccttaataccatttatggttttctatttcttcttttcaagggtgattctgaccacctattgatgcgttttttttttcaagacaggaagcaggattatctaatgtggagatctctgaattaggcacacagaaacataagttctaacttcgtcctgctttgtcatagctgggtgtttgatcttaggcaaatcacttaacctctctggacttttggactttgtttttctctaaagttctttctagctccgtatttctttttcttttttgttttttttgagatggagttttgctcttgttgcccaggctggagtgcagtggctcgatctctcctcactgtaacctccaccttccggtttcaagtgattcttcttcctcggcctcccaagtagctgggattacaggtgcgcaccaccacacccagctactttttgtatttttagtagagatggggtttcactgtgttggccaagcttgctcgaactcctgaccttgtgatccgcccacctcagcctcccaaagtgctgggattacaggcgtaagccactgttcctggcctagctctatatttctaagtatataatggccctcaaaatatttgagccttagagtttgtattctagaaagagggaaatcagaatttacatggtatcatagccaggcacagtggctcacatttgtaatcctagtactttgggaggactgcttgagctcaggagtttaagaccagcctaggcaacatagtgagatcctgcctctacaaaaaatttaaaaattagccagatgtggtggcatgcacctgtggtcccagttacttgggagattgaggcaggaggatagccagagcctgggaggtcgaggctgcagtgagctatgatcgtgccactgtgccccagcctgggtgatagagtgagattctgtctcaaatataaataaataaatgaataaatggtagcatagcaaatgaaatatcatagcagtgaaattttgaaatatattttgtgttttatcctctgttagctggtatagactcagtttggcattttaattgttcagaatattgactttgtttcctgagtctatcaagcatgattcagaataaagcatgacttcactctgtaaggatgtgtcacccctctattttagatgtcattttaacacttctgaggggaagaacacgtttttattttaaggtttatttttataacaaatgacccaactgtagtatttttgaacctggtggcattttaatattagctgtttccttcctattgatgcaagaaaagcattcacttaaatctgaagtgaaatctgcagtgtaatttgaaacctgaaatgcttattgattatggtaaagaatggaaaattaatgactttgggaatctatgccacagtcaaattgagcagagaatgttctcctggtagggtgctttggatgctaacttctattagctgctgctcatttctaccactaaatatctaacaacactgttctcagaagtaactgaacttgcagaaatagctcatgaagtcattttctatttaaatagtctgcactttttagaataaatactctttaactaggatgatattaacgtatgtcttcgacagcaactgcattgagaagacagcctttgcaaaacactcttgtcccccatccaagtatgggtcttttatgacagattgttgtgtatctgaggaagctattgtgtcaacaatgagcatcataatgagtctaaaaatctgactcaatggaacaaatgcattttaatggcatgcattttactttaaaaggatgtaccaaaatagagcaagagtctgaaagcagggcattattttataatgaaagactaatatatgggtagttcaaactaaaggaagagtgtgactgggaatgaaaattgacttagggtggataagatcactcccatcagcaaaccacaaatgctgggggagagttagctgaagtggtacaggagcgaaaattaaagtggttaccaacacccaggaatgtcctttactgagatgctgacctaagtgggcagatggcttcctatggcactcttcacaggctggcattgcaatatcacatttactcactttaccaaaatgccatgaagttaatgctggaataacctgtttcttttcatgtttaaattctacttattaagtgtggtgtaatattgaggggaaaggagtaagtttagagactgagataaatttctaacatgtttagaatagcgcttaagggccgggcgcggtgactcacacctgtaatcccagcactttgggaggccaaggcgggaggatcacgagttcaggagatcgagaccgtcctggctaatacggtgaaatcccgtctctactaaaaatacaaaaaaaaaattagctgggcgcaatggcaggcgcctgtagtcccagctactcgggaggctggggcaggagaatggtgtgaacccgggaggcagagcttgcagtgagccgagatcacaccaccgcactccagcctgggcaacagagcgggactgtgtctcaaaaaaaaaaaaaaaaaaaaaaaaagaatagtgcttaagtgtgtatctttggaattagggtcccaactttgcaatattgaggtggaagttatgtaataatattttgtttggtattgacatcaccatacttctgtaattgatttttaaagactgtgcattatttgtttttttgttgttgttgtttttttttttttttttttgtgagacggagtctctctctgtcgcctaggctggagtgcagtggtgtgatcttggctcattgaagtctctgcctcccaggttcaagcgagtctcctgcctcagcctactaagtagctgggattataggcactcaccaccacacccagctaatttttgcatttttggtagacggagtttcaccatgttggccaggctggtctccaactcctgacttcgggtgatccacccgccttgtctgggattacaggtctgagctaccatgcctggcctatttgtattttttgaaagagaacttgcaatttgtggaaatataccatagtacattttctgcatttatattattctgtttattatattggaaactctgcacatgtgcacttacatactaaaaaaattaggcatgaggccgggtgtggtggctcacgcctgtaatcccagctctttgggaggccgaggagggtggatcacaaggtcaggagttcgagaccatcctggctaacacggtgaaaccccatctctactaaaaatacaaaaaattagccgggcatggtggcatgtgcctgtaatcccagctacttgggaagctgaggcaggagaacctcttgaacctgggaggtggaggttgcagtgagccgagatcacgccattgcactccagcctgggcgacagagcgagactccatctcaaaaaaaaaaaaaaaaaaagtgatgtcaacctgggtttttaaaaaaattactgtctgtgatgatccatatgttttttgtattacatctgctgactaaaaagagcaacaactctattctatcagaggcctcttaggccaaacccgtttggccagatggaatagagaaaactgtaagaagaatgtgagtattccattgtcgcataagacattttattttctgggcaggatttcctgttgaccccaattcaccatttatgtctcttaccatctcctctttcctgctttttctgcctgcaatgttgtttcagatttcttttgcaaattgccaacttcatgcatgcatggtgcagttcttttttccttccctcagatgcctccttttggctattggcagccttgcatagggcaaggatgccttttcagaaatactgtgtgattcacaacttcttggggtggaagtctgtgaagagataaataactgtaagaatgagaataagtactactaattgaacatggctgtggtgggtaggtggatttgtatgcatagtggcctcctgaggaaggtgccttaccctgacatgcaatcctaggtgccctttggcatgaagcatccgtgtggtttacaagtttaacgcagaacaggagctccaaggatctgaagggcggtaaagctaaatgcacatttcctagtcttctaggctgaggagagtatgatcttctttgagaaagtcatagggtgggtaaaatgctactttgcaagaggtacatgctcttagagcactgttgtatgctatcagtccaaccatgttataaactatttaggaaaatggactgtatcctatctacctctgcattatctgtgaaacagtgccttccgttgaagcacagatagctgtggctgaatgaattgagcagacattcaaatgcttgttggatgtgagggaaaaattaaggaaacattccctctccattccaagttcccaaacttttcattcgtctgtgttctgttattttctcccactgaaaaaaagcctggaagggacagatgatacaaagaagacattcttgtccattggcatgtgagaaagaagggcagaggttaaagagggaacagggagtcaagctttggggctaaagaggcgtcctcaggctagtaaggtggatggggagcttgtggggagggaccatcagtgtgggggctgccctgggaggtcatgtctagttccacgtaaagccccagaagtgaccttctgggtctttacccatggaattccagactatactgcagtgagaagaaagacgtcttttgttctttggctaactgtgcattccagactctaatttggaaaggccagatctgtgagtgataacagggtccatttaaggaaaaggcatctttgttgaaaatggaatagggcaagggtgaaaaggtggggcgaggcagatgtcagttttgtgtattgcagtattccattatctaaaacagtgcaggcagatagtaagtgcttaatacctagttgttgaatgaatgcttgatgacgatctttgaggtattatttgctataggagtttcagtacaggagtattttaaggagatttcagagtgcccttggaagctgctggtaaagaggaactctctagcaaggtgaccaggttagacacagaaaaaaatgcttctggtcatggtcaccccttcccaggctaaaagtactcattggcaccaggaacccttccctatattttaaaaaatattatagcccataattttgcacactaaatttggctttgttgacattggcatcaggtaactcaatctcttttcctttattttattttattttattttatttttttttgagacagagtctcactctgtcgcccaggctggagtgcaatggtgcgatctcggctcactgcaacctcctcctaccaggttcaaacaattctcctgcctcaacctcctgagtagctggggttacaggcatgtgccaccatgcctggctaattttgtatttttagtagagacggggtttcaccatgttggtcagcgtggtctcaatctcctgaccttgtgatccgcctgccttggcactctcaaattgctgggattataggtgtgagccactgcacccggcttgaagctgggaggcagaggctgcagtgagctgagatcaatctctttttctaaggcattgcacacctacacatgtgtaacccaggagggtggcacgggaaatatttccaacctggagacatcgtagagagaggaagtgctccttcaggaggacaaatggaaacatctgctgcagcttcttagcactctcctggcttaccttttcagttgctcaaccctaaataaatttgctcaaccatagacatcagggcacactacgggaacattatgggcatggcatttggcaagcatttattcacagttcacaaatatggattgaaccccgactgtgtgttagatagtctcctggatttgtgggctgtgggtatgaataaggcagccaccctccctccttagggcacaaacagaattaacttattcttctccaggagaagtaagctcatgataagaaaccaaatttatgaattacttatttttttgctaggctccgtgcaaagacactttgcataccttaattcacttaatactcaggaaaaccctgtgagaaaaattttagagctgtggaaactctcagcctttgaggatttggataacctgcccaaggccactttgaatctaataaatgctccttggtccaatcgaagttgcttctcactattacacaccctacactcctataagatgctaatggaattgatcctgccatgctctaggtgaggggaagagctgaaatagcagagtttaaaaatctctacaccaaagtccatctctgctactgtttcccactgcttccttgaatggttgggtacatacttgtctgggccacattgctttctctttatgtggggcttgtttggaaagatctttgttttcttgagtccctggttaccatcagtcatttttcatagaaatacaaatgaattagcctgatgtaaaggaaggattcttattttattctcggaagaaaaccttggaacttaaattcaaattttctttaaatcattaaaaatgaatgagatcgttttcatacctcctaaaatatattgtttttctttttaagaatttaaagttgatcttatctcaccttattgcatttctctaaagtaggttctggcacgaatagctataagtgcaataaattgaatgttttgaccaactaataaaatggcaaaaatcactagcagaaaacatataccaagagagtattttctgtcttcactactctacagatacctctttctaaaaaaatttattttacagtggtaagaacactttacatgaaatctatctttaacaaatttttaagtggacaatatggtattgttgactatatgtacagtgtcgtctagcagatccctagaacttacttatcttgttgaactgaaactttatacctactgattagtaactcctcattctcccttcctcccagtcctaccattctagtctttgattctatgaatttgaatatttttggatacctcatataagtgcatttatgcaatatttgtctttgcgtaactgggtatttcattgatgttggctcatattgcagaatttccttctttttaaaggctgaataatcctgtatgtgtgtgtgtacaccacattttaaaaatctattgatcttttgatacacatttaagttgtttccatatcttagctattgtgaataattttgcagtgaaaatgggagttctggtatctctttgagaccttgatttcaattcttctggataaatacccaaaagtaaagctgggtatggtggcttatgcctgtgattacagcactttgggaggccaagacaggagtatggcttgagaccagggattttagaccaatctaggtaatgtagtaagaccctccctctacccgcccccccagaaataaaaattagctgagagtggtgatgtgtacctgtagtcctagctactccggaggctaaggcaggaggatcactggagcccaggaaatcaagggatggtgccgctgccctccagctagagtgacagagcaagaacctatcttaaaaagcacaaaaaacaagcagcaaaaaatacccaaaagtggcattactgaatcatatggtagttgtatttttaattttttcaggaacttactgttttctatagtggctgtaccattttgcgttcccaccaacagcgggttccaatttctctacatcctcgccaacacttgtgttttgtatttttgataatagccatcctcacatgtataaggtgatatctcattgtgattttgatttgtgtttccttgatgattagtgatgtcaaactaaaaagcttctgtcctgtaaaggaaacaatcaacagtgttaaaaggcaacccatggaatttggagaaaatatttgcaaaccatatgtctgataagatgtgaatcccaaaaacatataaagaacccttacaatgaaatagcaaaaagactaataacctgattaaaaaatgggctaaggacttgtataggtatgtctctagagaagacatacaggctgggtgtggtagctcacacctgtaatcccagcacattgggaggctgaggcaggcggatcacgaggtcaggagttcaaagaaaagcctggccaatatggtgaaaccccatttctactaaaaatacaaaaattagccaggtgtggtggtgcacacctgttgtcccagctactgggaggctgaggcaggagaatcacttgaacctgggaggcggaggttgcagtgagccgagatcacaccactgcacttccagcctgggtgacagagcgagactctgtctcagaaaaaaaaaaaaagaaaaaaatctttattcctattctttaggtgcaaagtcacagatacagtggtgcttcattcaaactcaagttacacctgagtgccttcctcttgagggcgtgacatgccacacttaatatacctctccaaaaacatatggcttgatttaggtattgttaaaatagctccactgtatactttgtttcactggaattaaaaaggaaattgtcttgctcacacaaaagtgcaagacaaacagttgagtgtctgtgtattattgtcaaatagaatggatgtaggatgtaagttttagctgcgacgcactctagaatgcggaattccccttgcaattgaaaggatatggagcgtcctttcgaggactgcctcacatattaaatatatatcttgttttgtctggggactgctactcaggactctgccatctgtagtgggtggcaaccaaatctcagtcttgaagaattcatctgttaattttctttcttcctctgacttgatgataccattgtggttacttctcctccctctccaatcaataacatctcattttccattattacatcttaagtatattgcaattgttgcaagctgttacattttcattttggaaatgtgatggttggaaaaaatcacccatctgatgataaagaaaaaggagtaggagtcaagtcctccaaatactgactgtcttttggatgacttagttcttaaatggaagagcaactctacctgcatacatttcgcagtgttagctcacccagccatacccttttatagatgaagaccctggagcttggggatgaagtcacctgcccatgtggggtgaatgtagctcccagagcccggagtcctcattccactccacctacttcttttaagctttacatttgaaagaatatcaggattttagaagcagtgtcttatttctctttgaatataaggaaagatgtgtttgacaattaaaatcacccagaattttcttttcttttcttttttttttttttgagacagacttttgcttttgttgcccaggctggggtgcaatggtacgatcttggctcactgcaacctctgcctcccgggttcaagcgattctcctgcctcagcctcctgggtagctgggattacaggcatgcaccaacatgcccggctaattttgtatatttagtagagacggggtttctccatgttggtcaggctggtctctaactcccgatctcaggtgttccgcctgcctcggcccctcaaaatgctggaattatagacgtgagacactgcgcctggcctgaaatcacccagaattctgcactgcttttctttacccaaatgttggagtggcaggcctcacacaatgtctggagttgggtgacaaattagttttaacaaatggaagaaatctcccgaaaggtaatttcctgcaagtctctttgtgttagtgtttttaatgctttggttgttctttaatggaaaacactttttttgtgtgtgtggggtagggtgagggatggttctagctttttaccaatgcatttcaaatttagaaaaaatagaatagttcatgtgtgaaaagttgtgtgggaacctttcttggaaagaaatttaaatgtttaggaaatgtgttctaaattgcaagaagagtgtggtttaagactgcatggcctggtgggattgtgcaatgttgggaccagggtacagctcaatctagtctgggattacccatgggtgagcctgccatggggctaccctctccataacggcatgggctcaggggtgttggtgggaggatggggatgggtgtgctgaacttccccttcctcccatccccactggcttgtgccctgcggccagtggcaggcagtggtggttctggctggtgaacacattggaggaagagcagaaattcagtactcgggacacattttttttagggaagcgtgtctttgcaatttgagttataaatgcaaaatgagaggccaggtgtggtggctcatgcctgtaaagccaacactttgggaggctgaggcaggcagatcacctgaggtcgggagttcgagaccagcctgaccaacatggagaaaccccgtctctactaaaaatacaaaattagctggatgtggtggtacatgcctgtaattgcagctactcggtaggctgaggcaggagaattgcttgaactcgggaggtggagtttgcggtgagcggagatcacgccattgcactccagcctgggcaataagagcaaaactccgtctaaaaaaaaaaaaggcaaaatgaggggccgggtgcgatagctcacacctgtaatcccacacttggggaggctgaggtgggcggatcatttgaggtcaggagtttgagaccagcctgaccaacatggtgaaaccccatctctactaaaaaattgggccaggcacggtggctcacgcctgtaatcccagcactatgggaagtggaggcgggtggatcaggagatcaggagttcaagaccagcctctggccaagatggtgaaaccctgtctctactaaaaatacaaatattagctgggcgtggtggcaggcgcctgtaatcccagctactcgggaggctgaggcagagaattgcttgaacccaggaggcggagcttgcagtgagctgagattgcaccactgcactccagcctgggcgacagagcgagaatctgtctcaaaaaaaaaaaaaaaaaaaaaaaaaagctgggtgtggtgggggggtggcacctgtaatcccagctactaggggaggctgaggcaggagaatcacttgaacccaggtggtggaggttgcagtgagctgagattgtgccactgcactccagcctgggcaacagactgacacttcatctcataaaaaaaaaaaaagattggaaatgagggttatttccctttgcaaggcacaatactatactcttttcacaacaaaatgacgaggaaaagagtcaaactctataaaatatttaaagaggtttattctgagccacgtatgagtgaccgtggccccaggcacaatctcaggaggccttgaaaacatgtacccaaggtggttgagttacagtttggttttgttttagggagacataagatatcaatcaccacatgtggagtatacattggttctgtctggaaaggcagcataactcaacgtggggacttacaggtcataggtgaattcaaatattttctgattagcagttggttgaaagagttaagtaattatctaaagacctgaaggagtgtttgggttaagataaggggtggtggagaccaaggttcttattatgaagtctcataggtggctgccatcagagacaatagatggcaagtgtttcctattcagaccttgaaagatgctagacttagttaatctcttcaccgttgagagggtctggaaaggggaaggacccagtaatgttagtagaggttctttacagatgcagtttctctctctctctctctctcacacacacacacacacacacacacacactcacacacacacacacacacccacgcgcacacacacacacacacaccggctttgtaggagcatttcaaaatatggcaaggaaacattttttggttataaaatattttgatttccttccatatctgtcatgtgattttatgccagagtcaggttggaaagtaagccaagttatatagggttaagtaaaacccatgggatgagattttatggtttgtagggtgtgactccccaggtcctttagataagaatttgggcaagagaggaaaaaggtcagagtttagtttgcaaaagaaaaatcctcaggtgaaggttatgccccaaaggaatagattgaactgattgtagtaatggggccaattttgtaggcatccattactttttttctctctcttctttccctgcctccagctcctttaagtctattctcttttcttgagtcatgatttggctccgtttcccaggctagagtgtagtggtgcaaccaagacacactgcagcctcgaattcctgggtgcaagcgatcctccccattcagcctcctatgtagctgagactacagttgtgcactaccacacctggcttcttcacgtctgttctattaacctatgaaggcaaaaattgatttttgccttcataatatttctgtgtgtttgtgtacattttaatataaatgatatcagatgcacctgtataagttttcatatggctgatgtaacaaagtagcacaaatttggtggcttaacagaaatgtattccttccagttctggagggaagaagtccaaaatcagtgtcactgggatgaaaaggtgtcagcagaactgtattcccaacaagggctctattgaaggattggttccttgtgtcttccagcttctggtggctgccaacattccttggcttgtggctgctgcactccaatcttcaaggccagtgtctgttcatctctctctgctccaccttcacattgccttctcctgtgtgcgttcatgtcaaatctccctcccctctctcataatgacacttgcgactatgttaaggtaccatccaggtgacccatgataatttccccatccaaagatccttaatttaatcacatctgcaaagatcttttatccaaataaggtagtatttatagaccccagggattaggacctgatgcctttggagcctctattcagtctcttataatacctattatgcaacttgcttttcttgaagtccacaatctctcttagagattttttttttccatattggctaacatagaccttcttcactcgatgtcattgctgtagagtgtacccaggatgggtatttcatattttgtttttagtttattaaattgatgagcaatgttttgtttttattttttccattacagacatgtggcaatgattggggaaggggctaaagtgatacacactgattgatagtatttgttacatctcatgggtacgggatgagtccttcagaataatttcctggccgggcgcggtggctcacgcctgtaatcccagcactttgggaggctgaggcaggtggatcacctgaggtcaggagtttgagaccagtctggccaacatggcaaaaccccatctctactgaaaatacaaaaattagccaggcgaggtggcagatgcctgtaatcccagcctcaggcggctgaggcatgagaatcgcttgaacccgggaggcggagtttgcagtgagccgagattgcgccattgcactccagcctggtgacagagtgagactccatctcaaaaaaaaaaaaaaaaaaaaaaaaaatcctggctacttccagagttttcttgttgtaataactaaacccctctcctggtccttcctggtcatcctgatggctggtgttgaaacgtaggtgaaatactcaccagctgtctggccttaggcattaacctctctctcagtgcctcgggtgctgggcgcttagtctgtaaaacaggtatcatcatagcatctacctcctgggttctcaggggttttggaggagttaatatatctaaagcattcaaaacccgccaggcacacagtgggtactttactagtgttagtttttgttgttattgttaacagctcctttccccacccacgcccaaggaaaaactctcaaatagctggcatgagtatggtcatccacctcagtagcctgcctgtctgtgagggcctcctccctcagtgagcggcttggtcctactcccctgggctcctttctgctccctttcctcccactgttgagtctctcttccctgggattaatccaccaaccatttcgccctcttctgtgttttagcttcatccctacccacttttcttctccctctgttgcttccttccattcctttttttttctggagacagagtctggcgctatcttggctcactgcaacctccgcctcctgggttcaagcgattctcctgcctcagcctcccaagtagctgggactacagacgtacatcaccacaccctgctgatttttgtatttttagtagagacggggtttcaccatggtggccaggctggtctcgaactcctgacctcaggtgatccttccgcctcggcctcccaaagtgcttggattaaaggtgtgagccactacgcccagcctcctctctctttcttccacctttttgttttaccttattcctcccgccactccccctcccccttttattattaaagcagcttaaacaatgggacaaaggtcacattctattgtatttctagagggatgacacctagctagattgtgtgactagaaagactgaaaatttccaacagaaggaatagcaagcaggctgagaggaccggaaaggtacctaaccctaaagcttgtgtaaagtagagtgataaaaactcacagaaactaagttgcctagcacagttcagtagtgaaggcagtctttatggcaggagggtaaatagaggtatttaagataaaagtctaaaacacttagattttgcttaatgatgtcaaagaaatgttcttaattttatggaaaaactgttttttaaatcctagaaaattctacctaattcttttggtgtgtacatgtgtatgtgggtgtgtacagacacaccttcatattttaaaataaatttactgtgaacttcctagctttattttatattttattttattttatttttgagatggagttttgctcttgttgcccaggctggagtgcaatggctcaatcttggctaagtgcaacctccgcctcccaggttcaagtgattctcctgcctcagcctcctgagtagctgggactacaggcatccgccaccatgcccagctaatttttaaaatatttttagtagagacagggtttcaccatgttggccaggctggtctcgaactcctgacctcaggtgatccgcccgcctcggcttcccaaagtgctgggactacaggggtgagccaccgcgtgcagcttattgtttttattttttaagacagagtcttattctgctgcccaggctggagtgcagtggcatgatctcggctcactgccacctccgcctccagggttcaaatcattcttgtgcctcagcctccctagtagctgggactaatttttgtatttttagtggagacgggggtttcaccatgttgaccaggctggtctcgaactcctgacctcaagtgattgacagcctcggtatctcaaagttgaacctgctaactttcaacagtgtatattgttaatttaggggatgttttaattccaggtacttaaatgttcttgtgagacacaatgtatcatttccgaataagcccttttcttttttctgattcacttttctccaaatttcccaaatttgctaataatagaggtgagttaaactggactctagcattctgatgtgtttgttcaagatctggttcgcagcttttgtagtcaactggttttgtgtgacaaagttctgtatgcttataaaagttttaaaatcatttcataattggtgatgttgtagaaaaaaaccaggttcttgtcacacaaccaggagaagtttggcacgcagacactttgaagggtgagggggaatggaatggtgaaaaggcaaaaaaaaacaaaactgctcagcagagcgagaggggttccagttaacaggccctcatctcacagattgaatctcaggtccccacccaggaacaggagaggcctgtctccttccccctgcaaacggcctgaacttcctgcggctccaccctatcctcccagtgcacaggcaggtgggcgattacgggggtggtggggagggctcctccttatcttcgcaggtgggagattccggggcggggcggggagggctcctcctcatattggcgggtgggagattggggggggtggggggaagggctcctccttatcttcctcctgcatctatcagtgaagacgctgaggtttgcaattgtataatatccaggtttgcaattgtatactgcagttgtataattgtataatatccagagttgaaaataaaaaaaacaaacaaaaaaagctacagtagcattcccttttttttttttttttttaactttgagatggagtttcactcttgttgcccaggctggagtgcaatggcacgatctcggctcactgcaacctctgcctcctgggtttaagtgattctcctgcctcagcctcccaagtagctgggattacaggagcctgccacaatgcccggctaattttttgtatttttagtagagatggggtttcaacatgttggccaggtgggtcttgaactgctgacctcaggtgatccacgcgcctcggcctcccaaagtgctgggattgcaggcgtgagacaccacacctggcatcattcccttttaaaatgtcagctaggtaataatcttttcttttcgaatcaagtgggggtttcactaagaagggtagagtattatttctatgtgaggccaggaggctattgttgggtccaagaacaaatgcttagagataagcttgttggcctctcacggtgttgtgagagggttcagagtagacagacatgtgtcttcccccttttctgtcaccttcctttctgcctacaatgcccgtttttgatatccagctggtgagagtggataaataatttgtatcatagtgtcagcctcctcagaaacccataaagatttctttaaggatttggatccgatatctttctgaattaggccctaaattattatgaatgtgaacctaggttatatgtcttgcctgtggtatgtgtgctgcgatactttgaagcagaatgatttgtggatcattttaccagtcctttctcttttttggtcaaatgcagatggcatggaggaaatggaaagttctaggcatttttgcaaccactactatataactcttatggaccggataaatttagtagacaaagtaagtggttagtttcttggacctcggttttctggtctgtaaaatcaagagatgcatcaaagtttctttctagctttaaattctgtaattctttctttgagaattgtgtagcatgtataatgtttatgggaagtaaagtttaagtcactaaaaagaggcagaaatcaggttatcactcacagggctgttttttcagcctagtctctgccaatcctaaccttgttaaaactacaatgtggcaagagatgatgtcccattattatttctttcactcgagaatgcttcagctatatagatctatcaaagcagttgttacactggtgagtttccccatatccatcagaagaagaaaatccatcacacttttgactactttttcctctccaagaaaatgatctttaagagaatgacatgtaatatagactttactattcttgaggcattggagaaactgcatctgaaataaaatcaatacatgatgcagtggtgtatgtacatttcaaatattgaatggcaaaacattttatcaaagactttgggactaaatacccgtcgcagacttacataaagtaggatagaatacagtagaaatacgagtgtacctcctgtgtatataatacctagtcgtggttcagttactccatatatctcaactacactaacagaaagaggtagactcattagaggttaagaaaggtagacattagggctggtatgtttagaaatttgttgttcttttttttttttttttttttttagagttccatcccataatctcagtttaagttataatgatggttaccaggcaacttagaggaacaaaagcacagtcttagccttcatatttctagctgaggaaagtagacaaataaaacagaattctgtctcagttatgcactgagtgtgtgacgtgtaaccttaatctcttttttttttttttttttttgaggtggagttttgctcctgtcccccaggctggaatgcagtggcttgagctcagctcactgcaacctccgcctcctgggttcaagcaattctcctgcctcagcctcccaagtagctgggattacaggcacctgccaccacgcctggctaatttttgtatttttagtagagacggggtttcaccatgttggccaggctggtcttgaacttctgacctcaagtgatctgcctgctttggccttccaaagtgctgggattacaggcttgagccaccgtgcctggccccaaatctcttaaccttcctggatttggtccttgaaaccagtaattttaaattactggctaaattaattaaaattactggttaaattaattaaaacaaatggccaataaagccaaacagacactgagtcttttgttggtgtaaattcctttacacatttcataatgtcttctatgatattggtttacttttgggaattgaaacctttacagaaaactatcagtttcactaagattttaccatgaaattatatattagatcatcttcatttatttaataaagtgttaaacacaaagttatttctaattttatttgggttttctatgttttaaaaattaagactgcgtattctttccccgacaaaatccagctctgggattcattaatgtattcgaatattttttggttttctatttacttttcaatatgatcttttttcatttaatatgatctatcattttatgatattccaatggcctcttttgggtataaggtggaatcacattcacaggtcagcctgagatccaccggctgatagccctgccctggggccagcagacccttggcctcctttgtagttctttttcttcttccttttggggaaggatgttagaacggactggctttgatgtctgtcaggctgtttgctgctcatggtctcagggtttacagccaccatcactctgttggcttcaaaaggggctactctggccaggcacggtggctcacacctgtaatctcagcactttgggaggctgaggtgggtggatcacaaggtcaagagatcgagaccaacctgaccaacatggtgaaacctcgtctctactaaaaatacaaaaaaattagctgggcctggtggcgcacgcctgtagtcccagctactcgggaaactgaggcaggagaatcgcttgaacctgggaggtggaggttgcggtgagccaagattgtgccactgcactccggcctggtgacagagcgagactccatctcaaaaaacaaaaaacaaaaacaaaatacacacacacgcgcgcgcgcgcacacacacacacacacacacacacaaacaaaggggctactgtcccgtttatcactgtagtccaagtttggacacagacccttctcatagttcctcaacgatttctaagataaagctataattttggtgttttttgagacgcagtctagctctgtcacccaggctgaggggcagtggagtgatcatagctcactgtagcctcttcctcctgggctcaagccaccctcctgcctcagcctccctagtagctgcaactacaggtgcactccatcatgccaggctatttttttttctttcatttttttgcaaagactgggtttccctatgttgcccagggtaagttatagcatttaacatagctttattaaaggtatagggtaacaggagagaattatagcatacagagtaacttgtgaccagatgtgagatgattattttcggaatttataggcccaggccatctgcatggctttaattttggattgatctgctcccaggctctgcctgctttccatggaggtgaaagtcagtattccccaccatgtctagactcctgagaatccagactaaagtctcacttgtctcggagaaaaaaagtagagtttctccttcagtctaaggccttttttttcctttcaggatctaccgcttttcaggatgactaatggaaagaatactcatttccttcaaagataatttcacagtttaggagtgttattagcttaattcatagccctagcgagacccctatgtaataccatggtccgtaagtttttagctttgagtacacattctcaaagtacacaggctttgagtgattcatgaaacccgtgaagctgtgtgcagatttctggccacatgcctttttctcgggagcagatccatcgccctcatcagattattaaagtggtctagcatctccccagaagattaagaaccacttaagtaggtccagcaaccggacattggttcaagtgtggattagtcacgtagagcatcaggggtttcttccaggtagggcttcacttagagtccctcctccatcagcaaatatagatgggttttcacatcttctctccatacatttatctctgcttctgatccacaaataagggctgaaatgcaggtatctccagagtggtttgtaggaaccatatggtccaaatccattcttggacaagaagcatttctccagagttaacagagtctgcagagatgtaattttgcctaggctttacagctgtggtcttgtaacaatctttatttcataagctctttgcataattaaactgcctattcggccagtcttcctaggatgaagaaattgtctctacaaagtaagtagtattcagtttctacaaagagatagtcttttgccaaaggatatccacctcactgtggtttgaaatgtactattaggattttagagatcttaaagccaagatttagctaggtctaaattttttttattttttattttacttatttaagtatttattttgagatggagtatcgctctatcgcccagactcactgcaacctccacctcttgggttcaagcgattcttctgcctcagcctcccgagtagctgggattacaggcgcacaccaccacacccggctaattgttttctagtagagacagagtttcaccatgttggccaggctgatctcgagctcctgacctcaggtgatccacccgcctctgcctcccagagtgctgggattacaggcgtgagccacctcacccaaccctaagtctaaattctaataatcacctatactcctttctctcagcagcctttgccagatggaaacttctctgaggtacctgccccaggacttggagtctaggggagggatgatggcaatgaaaggtttcttttctcctgtcacatcttgctccagacgtcatcttgtctcctgttacacttggatctcaggcatctatcctggcttgatgttggagtcccccaggtgcctcatagtcccctggacactggcagggtcacctttcttttctgaaattgcagggcagcttgatgtacattgtaatgaacccaatttatgatgcctggcaatgcatttactaagtgccatttatctttttgtgtgtggaacgcattcagtcttctaagcaatgcctggatgttcattcatgtctggacttcaggttaggcatgagggtgaggtaaagtcatttgcaacagggttgcagctttcgaaattggggacgtgactgggcgcggtggctcacgcctgtaatcccaacactttgggaggctgaggtgggaggatcacctgaggtcaggagttcgagaccagcctggtcagtgtggtgaaaccctgtctctactaaaaatacaaaaaaattagctgggtgtggtggtgggcgcctgtaatcccagatactcgagaagccgaggcaggagaatcgcttgaacccgggaggcggaggttgcagtgagctgagatcgggccactgcactccagtctgggtgacagagtgagactcctgtctcgatctcttgaccttgtgatctgcgtgcctcggcctcccaagtgttgggattacaggcgtaagccactgtgctcggcgagacgctttctcaaaaaaaaaaaaaaaaaaaaaagaacaacaaaaaaaaccaaaaggccaggtgccatggctcacgcctgtaatcccagcactttgggaggccgaggcgggaggatcacgaggtcaggagatcgagaccatcctggctaacagggtgaaaccccgtctctactaaaaaaaaatagaaaaaaattagccgggcgtagtggctggcgcctgtagtcccagctacttgggaggctgaggcaggagaatggcgtgaacccggggggcggagcttgcagtgagccgaaatcgcgccactgcactccagcctgggtgacagagagagactccatctcaaaaaaaaaaaagaaagaaagaaagaaaaaaaaaaactggggaccaaggcaaatagtcttgaggcctactaacataaaagaataatcagagtcttgtgtagtgatgcctgcctttactcccagctactagggaggctgaggtgggagaattgcttgagcccaggagtttgaggctacagcgtgaatataatcgccactgccctccggcctgggcaatactaatgagaccttgtctttaaaaaaaatgttcaagaagggcttttgactgggtctctttttctgcctctgctgtccatgtctcagcataatgttttagtttgaaatgggattgctcttttttttttttgccttcatcaactgtttttctatctcgtgtggttttccttgttagaggtggatgctggggctttgaaaccagtctgctgagtggtttctaatattactgttaggcatgggaaaaggaaatctgagggatgtgaatttggatcactgacctggcaggttgtcagttttctcagggtgacgtagtttcttgcttaggtgccatcagcgaaggttaagaaagtcctctcacttccatccctcatgaaggaactcaggaggtgattacaaaacagtgttgctgaatctcaccgcaattagtgcaagggtagaacatgtctccaggttatgatcatggctccttcctctctttgctctccatgatcagatttccccctctattgctttgttttgatgggtattttacaggaacccgggagagaacagtctcaggatatgtactatggtaccatttcacctccaatttagaatattttaataagtgatgattttacagatttgcaacttgtgatcatttattcattgatagagaatgctagccaattaaaaacagcaactttcctagtgtcttagagtttgaaatttcacgtgaaggaaatataaaattaggaagtatctaataaatagttgaaggtcttttagtttgacatcaacttttaagtgtatcaattattttattgtagaggatttgctcatccttttgtgtactattaatattaaatatcccactttggactagatgaaaataattattttacaacattattaataccttagtttaaaacatagagtatgtaaagaaatgtgtgatgataaaccattttgtaatttatttatttatttaatttttgaggcagagtttcgctcttgttgcctaggctggagtgcaatggcacgatctaggctcaccgcaacctctgcctccagggttcaagcgattctcctgcctcagcctcctgagtacctgggattacgggcatgcgccaccacgcctggctaatttttgtatttttaatagaaacggggtttctccatgttggtcaggctggtctcgaactcctgacctcaggtgatccatccacctcggcctcccaaagttctgggattacaggcatgagccaccgtgctgggccccgttttgtaatttagaccttcactaagttatactgtcttccctcacccgattgccctgaactagtaccattgtaatctctgttccaaccgtagagacagtttgcagaattttcagggctgagccgcagttctggcccaggttcctgtggatgctgaggtttccgctgacttccaagatagcacggaggtgggggcgttgtgtcctatgctgcgttcaaaagctgagcttccgttgccttagcatttcgctaatggcagctgtgctgtgtgtctttattgcaggtgctttttcctgatatttgtttgagctgttggtgttcagccttggtcatttagattcttcttatctccctgttatcatggtgtttagtttagtgtgtgtttttttgttttgtttttgttttttgtttttgttttttttgagatggagtctcactctgtcatccaggctggagtgcaacctcagctcactgcaacctctgccttttggcttcaagtgattcttctgcctcagcctcctaagtagctgggtctacaggtgtgcaccactatacccggctaactttagtatttttagtagagatggggtttcgccatgttggccaggctggtcttgaacttctgacctcaagtgattcacccacttcagcctcccaaagtgctgggattacaggtgtgagccaccacgcccacccctcttttttttctttttcaaatattctttcttttcctcatagctgcactttgtaatgcatagggttaataaattgttattagatctccctggccaagcttagaatagagcaaagagtcactgagagctagatgtgtagacaggggccttgaaagttttggtgatttgctcaaggtaacccagcgggtgggtggtaacagagctgagactgctgggagctccttttcagtgatgcttaaccatgtctcccttctgctgcctgtagctgtttctgtgtctggacttgtaatcataggtggattcatatgacacctctctaactgcaccaagaacaggaatgtccaccctccttgaaggatatgagttctaatgtggattcttggtcttctttgggggctcttcttatgtttaatgcacttgttgcagcatatactgagagtctgtgaaatgttttcagatgtaaactattgaatcatttcaagtatttgtattcattagtactcatagcacaaatgccattcctgtcccttaaagtgtgcaaagcatgggtgtttgagggcttggcaaccaacgtgtgggcacctctattttgaaatcggttttgtttgcaattaacaaaggttaacaaaaaagtccttttgggaagtttggccgaggtcctagaatttgtacatacctttgcaatgtgctcatactctgtggcacatctaggatcctcagccccttgttcttcgctttttcagttgaccaagttaaatattaaaggaagaggatttctttcttgctaccaggggattttatcatggtaaaaggcttttaaataattttttaaagttgtgataaaatacacataacataaaatttgccattcgaaccatttttaagcatacggttcagtggtgttaagtatattcacatcattgtgcaaccatcaccaccatccatctccagaacccttttcatcttgcaagactgcaactgggcgtggcaaaatattttgtatgtacaaataaatctttaaagctgaaacaggccaggcacggtggctcacgcctgtaatcccagctctttgggagactgaggcaggtggatcacgaggtcaggagttcgagagcagcctggccaatatggtgaaaccccgtctctactaaaaatacagaaattagctgggcgtggtggcatgcgcctgtagtcccagctgctccgcagcctgaggcaggagaatcgcttgaacttgggaggcggaggttgcagtgagccgagatcacatcactgcactccagcctgggctacagagtgagactccatcaaaaaaaaaaaaaggctgaaacaataaagttcttatggtagaaggtgcagtagtgacatatctctaattcaatttatattttctgtttctttaacatttcaacatcttcaagtaacatttatatagtgttttcttatattctcattgaagattcaaaactcatgtgggataggcattaatattcccattttataaatgaggaatttgaagtagtaacagaaaaaaggtaatgaacaaatcaggactccagcttagtgctgtgggctctaaatccttttctgtctccattctactgtgcttcaaaaggctgtgactaatgttttctttatctatctatctacctagctagctggctggctggctatttagctagcgatctctttattttgtggggatggagcaggcattgagggaggctttctggagttttgttttaaattctgggtcttgccctgacaacagacagttgtgttcataaccttgggcatctcatcggatcagggattatggtgctttgcctaaacacttagtagatgcagcagctgtctattcaaatactactttaaaaaatgcctggaattgtatttaaattgcttcaatttttcactaattaaattgtagattgtttctcctggggattttgcactaggccgagtttcctcaattgttggtgttggacaatgacaaaataaatcttttgcattgtagcttagtaaaaaatcctgctgaatgggctaaataagtccacagtcatcccataagagacttattttttaaaaaaacaattttttttttttttggtaagaccaggcatggacagatattgggcttttgtttgtttttatttctgtactttgattctggtgcttaaaatacctggaggggtcacagacacaacggaggcccatgtcttctattgaatgtgtcagcttccttggtctgcatgggttttaccaagaactgtacaatggaattcaaatattttaaaaccacatgtgtgtttctcacatggctgctacagtttaaatcttttgtcagcctgttcaaggggttagatgtagcaaccagtttgccctaggactttctctagagtccttataaatggtcatcttgctatagcatttacaaagcatttctctatgtgctgttttcattcacagagaggaggagaaaacaaaattgggaaaaggaaagaacttagaagggctcagtgtccctgcagagcaggagcttgtaacaatatgcccttgatatttttaaacaaaaatgcttgcttgctcttaaaatgcaaattgtttccattcccctaaaaaaaatgcacaatttcatgctaatgttcacctctctatccacagataattaagactttgctctcagaataaataagtacctaacacttacgagcactggctttggggcagccagtgtctatgctaaacctttcacatgcacgaacctatttaatactcacaacgtagtgaggaaggtggtattctccccattttacagacaggaaaaagaagttcagggagggggttaagagacctgctcagatgtctcactgataataagtggcagatctgggattgggtcctttctgtgatataagtgctcagggtttttaaaaagcaacagggttttttttaagggttgttgctgatattaacaattttcagatatgagaaccaatgtggaagcaactcagcatatggatgttatagccaatctcagataaaatgtaagaggcaagttctgctcaacaatgtgctaacatcggcagagctgaagtggggagctggagaggtaccaaaatattggataggaaaccgaatgctttttcaaatcaagtacctctgagtgaccctagacagttggtgagaaagagtttgtcaccaacataaataattggaaagaagtgttagatgcgtttgaagcaacccagagattcccttgtgaagctgttgagaagagactagagtgtgaagaaaagaagcttgcttggtgtccaagataaaataagggatggatcttagcactacagatggaaactacagcagcaaataacagaaccagaagagatacttttctatctggatttatgcagaaaggatgtcaggtaactactgatgaaagcaaataaatccccagtggctatagtatcagataaaaatgcaggacacatttaaaatgggctctccacatacaaattcctcttttgagacaacctgtaccatataaaattttattttattttattttatttattttttgagacagagtttcactcttgtggcccaggctggagtgcagtggcgctatctcggctcaccacaacctctgcctcccgggttcaagtgattctcctgcctcagcctcccgagtagctgggattacaggcatgcgccaccatggccggctaattttgtatttttagtagagacgaggtttctccatgttggtcaggctggtctcaaactcctgacctcaggtgatccgccccccttggcctcccaaagtgttggcattacaggcgtgagccaccgcgcccagctaccatataaattacattgtaggtaaaggtctgtggtagccttatatatttaattcatttaaaacaaacccaagtacgtctttccacagactctcacaccacattattattcagcatacattctccttattaatttttggaattaagtatagttattatgttcttaaaattgtttcctggctggccgcggtggctcacgcctgtaatctcagcactttgggaggccgaggcgggtggatcacttgaggtcaggagtttgagatcagcctgttcaacacggtgaaaccttgtctctactaaaaatacaaaaattagctgggcgtagtggtgggtgcctttaatcccagctacttgggaggctgaggcaggagaatcacttgaaccagggaggcggaggtttcaatgagctgagatcacgccactgcactccagcctgggcgacagagtaagactctgtctcaaaaaaaaaaattgtttcccaatgttagttttagaagattatatagcagatgccatgctgaggtagttcaggaaccgtttgtaaggtagtgatgaaattcggagctggagggtgacttacaggtcagtgagaataaaatgttgctgcttatttctgaatgtcaagttacaatgacctactttttttttctcatcttcttcatgatccaagttttccaggcataaaatatttggaggtgtttttttctctttctttgctacttctcctatggtcattgtgtttcttgcactggtctggcaaggtagaccttttaatcatattttaagttaaaagatgtggtaaaagattttgaaacatttaacaggttttattggacaaatagaaattgtgtcacatttgtgtacaaaaatgtttcactaaaattaggatttcatttaggtctatgtgtttctgtggggatgtgtgtgtgtgtgtctgtctcatagcctcttctgaaaatttcttgaaagcaatagaatgttaccccaaaaggaaaaaaaaaacccatatattcacttgcacattagatttttttcatacaatttcaaatggtggattcatccttgaactcctgcttatgaatcctttgttctgaaatatcacaggccattttggatatacttggctttgggtagtgattatttgtgtagtctccagagaaaggtggatgtttgaagttgtatgacttagcaggaaatttctagatttcaagtgtaagagaaaataaatcttttgcaaaccacgggccataccttgtataagggagagagacaacttgagtttgagggtattatggagattttggattggagggaaatggggctagcgaaatattagaaagcataattaatggctttagtggttttttaaaaacttggaacatacaataacaaatgcaatgaagacaaacggtggtaaatatttacagttacactagaccttaaaggcagggatcatgtcctagtggtgtgtgatttgggagctcatacctgggagtcagtaattggctgtgagagtggaagaggccagtcctcattagagaccttctgggaggagatgagttctgggccagagcttcatcttgaagcttgttagatttttttttttttgagatggcatctcgctgtcaccaggctggagtgcagtggtgtgatctcggctcactgcaacctctgcctcccagattcaagcaattctctgcctcagccacctgagtagctgggattacaggcgcccaccaccacgcccggctaatttttgtatttttagtagagatggggtttcaccatcttggccaggctggtcttaaactcctgacctcatgatccacctgcctcggcctcccagagtgctgggattacaggcgtgatccaccgcgcccggccgaagcttgttagatttaaactttcccctgcaaggcacgtcagtggtaaaccacctaacgtggtggggaaagcccggaagagttgagaagcctctctaccctcctttctccttcgaggtagaggcatcttaactccctagctcctgcattgttactaagagacctgcagctaaacaaatggtgcaaatcttggcctaaaaggagccaaaattgtcaccttagactgcatttaccatcctgctagcaatatgtagtgaaagaccacctgccttcatcctcttgtaaatcccagtaatactctgtttctaccactcacatgacatccattaagtaattgctttcgttcctttactagactgaaagggaccttcatttaaggtcagagatcttttctaacacaatttggtagtccttgcctaccatggaaagccacacatatattgctggtgcttaacaaatgcttgctgagcaaatgtttaaaaggccaggtagggcgtgccactgaaaatctctaaaaattctctttggattgtctgtaatactgatcaggttggaacaacaattcaaagttatgctgtcagaggctgaacgatttccttgtcattaggacaatcaattttgtaatttacccttagtctacacagcaagtaaattgtagtacttgcatttttggtttcaatgatgtatatatagaaccatgatgaatggaattatagtcaagttctggtaattttaatgtatcgtctcagttgtgggtagggataaggtagggtcattcattaaataaccattcattgattaacatgtgtgaggtgtgattttatgatttttatgaggaaataaacaaaaaaaaatgtgtttttttgcttgtaagtagttctcaacttgttaggggagatagatgcatgagaagtagttacaatctctaatgtgttaagtaagagagaggtaaggaagggagggacaaaggaggaactgattgatttggcttgggtgcagggagaggggccttaagtatgagttgagagtccaggagttcaagaccagcctcggaaatacagtgagaccccattctctacaaactaactaaataaataaatataaaaaattttaagaattagctggacatggtggcgtgtgcctgtagttccaactacttgggaggttgaggcagaaggattgcctgatcctgggaggtccaggttacagtgagcactgcactccagcctaggcaacagagtaagacattgcctcaaaaaaaaaaaaaagaaaataaaagaaaaaaaagtatcagtagagagtggtaggcaatgagtgccaatgagactggagtggtgacattccaagcatagaaaagagactgtgcagagcacagaggaagatgtggagatccctgagtagtgtgcctggagtatgagatacaagggccaggggacaactggagatgaggatggacaagggctgggtggagactctgtgggggctcttaaccttctgtagattagttttttttttttgtaggtaccggtgtttttgagagtgaaagcaggtcctgactactggtttgttttatagtaaatatctcaatccagatctcaggtctagctgaggcaggagccttgggcaaatagtaaacagggactggaattggtcacaggagctgtgtcatcacccttgctcttcaaattataaaggaagcctaaacacacaaactccagtgtgggccgggctgactgccagatgtgcacaggatcattgtacaaagtggcaagattctcttggatattggtttatctatttgcttagaatgaagagaaataagggtgaacttgaagtttttcttgttatcgtattttgacttgcaaatctgagtaaaactgatggtgcaatctcctttctatgtggggctgacctcagaagagtagtggcttgtagtgtaaataaaataggagcaacagcaaacaattaaaatactgaatccaggtcacctagcactcggtggggtaaggactactcagacccagcacttgtataacccgtataactggatttacatgttctggccccctattcaatgtctgacaagcagttttaataaaaaaaaaaaaaactttacatttttatatacctagtagcattgttaatcctgtttgtttctcaattcagtaacaaacaggataaataacaaatatttatcaaataccttctatgtgctaggttaaattttaggaaagcttaaaatcaccttctccaaggtgattttcccagctcatttccaaaaaaacacttgccacagagacttcagagtctttgagtgaaaactttgtcattaattgattaattttattcattcaatagagatttattctggacacttacaaagtaccaggcatgatgttaggcactggcactgggagtttggtgctgaacactgcaggccctatccttgtcttcgtggagtttccatgctagggggatattgacaaataataatagcattgcagtgtagcatgataaatcatttgaacgagtaaatataaggtgctttgggagagtgagcaggggttgcctaacccagacttagaggaaaggcttctgggagaatgtcatatgtaagcagagacttgatgaagagcaagagtgggtcaaaggatggaaaagggggaggatgggttaggattggggtgggaggcatcacaggcattcacaaggtcatgtgccagagcccactgtgtgcgtgtggtggtccagggtgggaggtgttgggagggaataaaagcaatttagcttggctatagtgtggagtgtgaggtggaagtagagaaatggggctggagcattgcacagatcctgaacatactttgagctccgtaaaggtgtttggaatttatcctaatgccaataggagactgactttcctagaacgatctctgtagctggtgtgtgaaggatggatggggtgaggcaaactggaagacaggtagaccagttaggaagtttccacagtaatccggtggggagataatagtagccctaattaggggagtggctgtaggaatgcggaaagtggctggagtccagagctctttaggaggtggatttcagattggacttggtgactgaatggaggtgggggtcttggggaactggtaagaaggggacgctgttccttgtgcaaacacaatgcttgtctctgggggtgggtattattttcagtgtaattaaaaaaaatattaaaactgatctaagaaacctttaaattgtctgctagctcagccaggatacagatgctttggagggaggaaagaaatacgttcagaagggtgaatgcactccaattttgatttttctctctctcctttcaaatttcaaggctggttgcatatgcctcattagctcacgggagactgtgatcctataatcttttttcatattcagaaaactagagatgttaaacttccttggagaaggtgatttttgcagcctttgaataaaagcacttccagttctacctttagttgaaaatcaatggtgtctaatgtgtatgagaagtcaccccagtctcttgtgtccaggccaccagcacttatatgttatgcctatcactttgagtcaaataatctctagtggtccccaactgctaaaaatccccattctcttggatcttcaatttttttcttttaagttgagaaaaaaaatctctcctagaaatgtacatttgatttcttgctgaattaataagtttttctccttcttaatgtgtcctccaggtcattaacggaaaaatgtagtctatgatgcagcagagctctgccctttttattttaatacattttaaatatatcacaattgtctgcactctgataaaagaatgtagagctggaattttaatttgattatcatccccaatcttcccaggctttcgcaggcaagtactttgtttgaacagctgtactccggtaaatctcagtaacaaatgaatcaggaatgattttgtgtagcaagtcacatgaagggaacttccttagaaagacaggtcattaagagaatgaagaaagaaaaactagcaaacatttgagaaatttagcaactgtttttttttaaataaagcaatttgttctaataattatttcctaatcatcttaaaatacgctgtcattaacggcagagaaagctctttatttccttttgaattttaatactgggtagaaatataatttacaatgaaagtcagcaggaaaggaaaaatactaaaaacgaggaggcataaaaaatggaaatagatccctgtagtcaattttctatcatctataattttctatcatctatatgtgtgttacccatatgctggggtggagtggggaggggagagggaggcgctgtgaaatacatctgcctccgatcacaaaaagatcaaattaacatgtgaaaagatattccaaggagctgtgggagagaaaggcttttggctttcaccatcttacctactggatgggtttgaaagcataaaataaagctaaactaaattcagggaaacattgattcacccaagtgaataaacaacttactgcatttgctaatctaattaatcaaactctgcttctccttttccaaaggagattcacaggcagtaaaataaattaaatcaacattttttttttcccacttactaaaaataagctttctttccctgggtaaatcggtcatttaaattcccaaggctgcactcccgtagtcctctggcaggaagcaattgtatgggtataaaatcatttctgtgcagattgcagagcttgggctctgagcatcatgtctgagttctgccacctaaactgatgaataagatcagttttaactgaagttatctttagaaacaaatggcctatggatgatgttgattagcagataaaaaagcctgttacatggatgttttatgaaacttaaaactatattgatggcaggaaacaatgattttggaggaaatcctggaaaattaaggatatttaaagtttgaaaacaattgtaattgtgaaagtttagacacggaagtcataaaaaaatttcagttcagtagtttgcagatctgttacttaatctttttagttaactttagatcagtagaataagatttagttttagactgtatgtatatacatacggcaattttatacatacatacatttacgtaaatacaatatacaaggaaaagtgaaggacagagtaaacggagaagaaaatgaattaaaagattataaagtgttgaatgacaggctttatgtaagtaaggcaaaaatgtaacacaggaatatcctagataacaagttaagtatgagctaagactgtatcgctaggtttttcattttttaaaggcgttataccaggatgtggatttaggaggcctgcagtttagaattgagaaagagctcactgtttatattaagttctactcacacttactgcatttccttgtctttgtcatgaatgggcacccttccaaggaagaacctaaatggaaaagtgcttccagctgagttcttaatgctaccaccttcgtcatctgtctggtgccctcaccttgaggatcaaaggatccccaaggattgcctttccccgcatttccttctcggatggacttatttccgttctttttagttttgttcaccctaggatattatgctcaaaactaatttacatgctcagctaatcttaattaaaatgtaaaggcagatcagggcacgatcaaattaagttctgaatatacttggatagttgggcatcagtttaatggattaaacagttcttggaattgcttctctttcttgacagtaagtcttagttttgctgtcatttcttaatagtcccttttacttctactttcaagctgtgactgaacattctcttttaacttacagactcttttgctatctggaaacccatgtccacctctgacttccactcaaaattgctttcctcacagtctgactgcgagagttgtgaaaaattgggatgtgcttctgaggtgggctgtggaatgccatgtaagttgctacttttttttttctgaatgcagtgggtattcatgcgcagtagggatgttggcatatctctgatgtttccttctaaggctggtgaatctgggttgttgctgttggggtttgtaatgtagtccatgtctattagtgaagacacagagggcaaaataagcagtttctttcttctttctttctttcttttttttttttttttgagatggagtttcactcttgttgcccacccaggctagagtgcaatggtgcaatctcggctcaccgagatctcctcagcctcccacgttcaagcgattctcctgcctcctgcctcagcctcccgagtagctggaattacaggcgcacagcaccacacccggctgatttttgtatttttagtagagacgaggtttcaccatgttggccaggctggtctcaaactcctgaccgcaggtgatccgctgcctgcctcagcttcccaaagtggtggaattacaggcgtgagccactgagcccggccaaatatatatatttattatttttattttttgagacggagtctcactctgtagcccaggctgaagtgcagtggcgcgatctcctttcactgcaacctccgcctcccaagttcaagcaattcacctgcctcagcctctggagtagctgggattacaggcgtgtgccaccacgccaggctaattttttgtatttttagtagagatggggttttaccctgttagctgggatggtcacgatcacctgacctcgtgatccgcccgcctctgtctcccaaagtgctgggattacaggcatgagccactgtgcctggccaggggccaaatatttttataataaatccaccatctctatactgttctgtggtgaaatatgctgaagattaaatgaaacctttcaaacttggttatcatggatttggctgcatagttggccaaactagattggttcctttttttttttgagacagagcctcgccctgtcgcccaggatggagtgcagtgacacgatcacggctcactgcaacctccacctcccgggttcaagcgattcttctgcctcagcctcccgagtagctggaaccacaggcgcgggccaccacacccagctactttttgtagtttttagtagagatggggtttcaccatgttggccaggctgatcttgaactcctcgtgatccacccgccccggcctccctcctggcattataggcgtgagccaccgcgcccagcaactagattggtttctaagcattcactttgtgatttgtttcattatctttaacattcaaattggggaatgacttaactagatgcaggcaaagacaatatcttgcttactatctttaaggtactgccacctagatactagagatacaaagatgagtaagacaaagtatgtgttgttctgaaaatggtggtttatctgttaccatttataatgctgcagtatacttgtttatgtcttctagattgtgagtttgtttgaggtcaaaaccatggcagccaaaaattccacatagaaatttccactaaatagtttagaactgaaaagataaaccatcccaaagtactttgcatttggtcaaattttttaatttttttaatttttttttgagacaaggcctcaccctgtcacccaggctggactgcagtggcacggtcatggctcattgcaacctctgcctcctgggctcaagcgatcctccagcctcagcctctgagtagctaacaccacagacgtgtatcaccatgcctggctaattttttagtttttattttttgtagagacagggtctctctatgttgcccaggctggtcttgaactcccaggatcaatggatcctcctgccttggcctcccaaaatgctgggattacaggtatgagccaccatgcccagtgacatttcctaatagctattattgtcatcacaattactccttactaataatacctaatatatagatcttgcacatctcttggcttatgtgagccttaaaattccatgaggtatggagggcagcagatacttctgtatcttattgatttgggcaacctgcccagataatgcatgtaatttttctaagattatggatttagtaagttttgcttaagtgctcagacacaggtttcctcagtccagatccattgtgctgtttgataagcttttacggctgggctattacttgaatacttgaagaacatgggaatgtttctgtgtgtataagaaaggatataaaattagccaggtgtggtggtgtgtgcctgtagtcccagctactagggaggctgaggtgggagcgttgcttgagcccaggaggtagaggttgcaatgagctgagatcccaccactgcactccagcctgagcaatacagtgagaccctatctcaaaaaaaaaaaaaaaaaaagcatgtaggggaaacattatcaacattatcactatttttacgtgtttggaaccgtacctggtagttggggtattggtctttcttactctgaaacttctcagggtaaaatttcaaatgtgtgttgcttatgtctacttttattttggcttaatagagaaattttcttttctgacatgcaggcctagaggtgaaacatgtgtgaccatgcccttgtacaccggcctctgctcacctgtttgcctcatttcattaagttctcccccatgccattcactatgctcaagaccagtggttcatcttttccaccacagggcctttgcactgcctggccctctgcctacaataccattcccctttccccacctcaacacctcaaccttggcttggttgagtcttatgcatccctttggacttaggctaaaggttgcttggccagagaagacttcccaaagagaatgaatattgtgcgacaacctcagtaaatgtttgaatcagggtccctaattgtaagcgacagaaacggactctggttaagcagaaatggaatttattgagaggatattgagaagcttgtggtcgccttgggaaggctgaagaactaggcacatagctaaacgtttcggaaacagtttccaaaaccatggcaaagaactggcctaaagaggaaaccgtcaccacctgtgctgcccccttgagccctgaatgctgtggtttctttctttctttcttttttttttttttttttttaagttggagtcttgctctgtcacctaggctggagtacagtggcgctatctcggctcactgcaacctctgcctcccaggttcaagtgattctcctgcctcagcctccggagtagttgggattacaggtgcccaccactacgcccagctaattttttgtattttttttttttttttttttgagacggagtctcgctctgtcgcccaggctggagtgcagtggcatggatctcggctcactgcaagctcctcctcccaggttcacaccattctcctgcctcagcctcccgagtagctgggactacaggtgcctgccaccacgcccggctaattttttgtatttttagtagagatggggtttcaccgtgttagctaggatggtctcaatctcctgacctcgtgatccgcccgcctcggcctcccaaagtgctgggattacaggtgtgaccaccgcgcctggccaattttttgtgtttttagtggaggcagggtttcaccatgttggccaggctagtcttgaactcctgacctcaagtgatctgccctcctcagcctcccaaagtgctagcattacgggcatgaggcatcgcacccgaccggttgctgtggtttctaatgctgccaggaaatctgcctgctctgagaaggcagccttgcaaccatcactggccccctaagctggataccatgattgccatccttacctgtaataaaaccatgtcaaatccataccggtatgtcgcttcctcctgcaagttgcccgcatgtgaatccaagttgttcaagggtgaatctgattggtggtactgaagtcaccctagctgcaaaggagactggagaacgaagttttctgagttctttaattggaaagtgggacttattagctgaaaattatccagctacatcaagggtgttcaaaaggtgctaaccagggggaaaacatgacaaatatcttctacactgagacgcagggttttaatccacctatggaccaaccatacttacctcacagggttgttataaggattaaggtaatttacatgaaactgcttattaataaactgtacagagagcataagtataaaataatattatttctctagtgtaacatatctttgactgaagcataaaatcaagtccttaataagttgacaaatctccagctcactttatatgtttttaaaatggtaaggatattcttctcccccaaaagccattttaaatattcaagataaattgaaaaaagaaaaaaagtacctcttctatgaacgtgctgccctcataaatttctatcatcttcacgtttattttgtaatggaaatatacaaacaatgccaagcatagaaattgtagtttaaaacatgtgagtgggttttcagctacttttgatttgtttctgattttaaggctttgttctaatctactttttatactctggtttcaacatgaatacagccctcttgtttgaaaacagacaatgggcttattcaaccctcaaggccctctacatttggtgtttctgccacggcccttggtggctttaccacatatattattatcttgtaaaaaatgtagacgtaacagctgagttgttagcagaagtcatagtagttgtgtaaaagggtgttagtgtaaatgattgtggcagttgcattaacgctaatgcagtgggaattattcacgtattcactgaatgtaatcctggccttccgtggtggtaaagttcctctatagaagaggagaggtcgacatcaatgtaatttcagaggagaaacagccatgtgtagagctattttcctatttgacagaaatgttttccagtataacatcagaattttgagttatgctacttaactttcctttcttgtaaatattgaattaaaataagatattgctagaaaaagtaaaacatgacccagcattgcaatgctgaaaattggattataattctcagattgttagatttctgccatcttataatttattcaagaatatagagaattctaacgtaagtgtcttcatgcaccttcttacttaagtgatacttcatgttaccctgaactgtcctgaatttccaaaaatctcatgttgggttaagaggaatttcctttcaagatactctgtctcctcttcaacatcttctcaacccttttctccccacccacacatactcactcatttacacttaacctaaagaggacactgattttaggacactggaaatctggaatccttacactgtgttttagtaaaggtatgagcctggaactcctgaaggccttaaaaaatagcactgtagtaaatagagcttagttggggtaaacagagcaccccggaaagtagtatattttggtgattcaaaatttatttcacttctctgatctgtgtaagtatttatgtgatctgtaaatacttcccagccataaaaattctaatttcatctctcaagatacatagtgggcacttgtgcaactgtattcagggagctgtctgttggttggagagggagatgaagtagattgaggtgcaaatggcatatttaatgccgaagctgttgctttaattggtgatgttgaaagtcacttgaaaccacccccctagtcctcaagggagttctcaggttacgtgtgggtgtactgtgaatgccttttattttattgactcactaaattcttagattactctttaccatttgatattgacagaccataaaattcttatggaacctgctcagtagtgacttataaagaattatcttgttaataaactcagcatcatttggaattcaagtttaattaaaatggaaaagtaaatgatgatgtaaagatttttcctcatttaaacttgtatccttttattgcctctctgtcttttctctaaattcaaagatagattttatttgacacccatttttgcaaggtgcatttttacagaatctgttgtaggacttcttctcattagcttttaaattattattatttttaaattagagaaggagttgtgagatagagtctgagagaggtaaaaatgaaaaatctatgttatccagggattttagtttttgggatgctgtttaaagataatgattgtttatggactctttaaagatgttttctcataagagttgccaagtaacagattagttatctgagggtggtttgaaagaccttttgaaattgcctgggtgacaatactaccttatggtacttataaagctcctttgaagttggccttttatattagaaaaccagaaaatatttttcttttattaaacagaaaacaatacatggttcagaggttagtattttttttttttagaaaaaattacattggttatttttgtgattgactccaattttttttttaaatctttcagcctttgtgggctactggatttttctaaattaaggttcttagtataatacgtttggctgctcttgtaaactatagttacgaggtacatactgttatacctcgaaatttgaggccctcttcttttttctcttctgtttcagacactgtggtacaaaacctgcagcccccaagcttggttaagagaattttggattgaaataaatattgtagggcatgcggcattcctgcacaacccttgttatacacagtcacactgaaagaacaggttaaatggaaggggctgtcaggggtcagggctagaaactcacagaggcagatattgcagtttggataagcaggagtttatgagagtcctcttcagtccaagcttatctgagctcacaaaggagatttacggtctgttgctctgcaaaagctatttgggcaggcacttttcttcccaactagcttttaagtgctcctggggccctcaagcctattcacttaggcctctcagattatgaatacataaaccttaatgattttggagtcccaaaggaagacatattaactggtacatcatcaaaacatgatgctgctaatagaatggacaaatacatcgtagggcatcacaaattcacccgttttctagtagtgactataataataagtttttgcaacccgtaaagaacatttattctgttctagcattgataggatgactgatattgattataaatttatattcaaatagtggaaccagttgtttgatagacataacctctgagaccagcagtaatgattttagtttttaatggtttgacaaaatatacaaggcatttgatgaatacacaagttggttatttcaagcatcttggagcttcagtcttcccatattcaatagtgatgtagaccatgcagtctgttccccctttacaggtataatttgtctttcaaaataaaaattgtgattgtgattgttactaacacattgtgtctcttaatattctttaaatacttcaatcttttcaagcaacgtttggcataacctgaattccactcaaaatccctcaggagagaatagaaactgtcatatgaaattggttataataggatttaacctatagagttctgattctttcttcccttcaatttttatcaagtatttaattgcccactggatgatttattttagaattggcctacttttttttttttttttttttttggcttcagtgcctgtgggcaaatgtaaatttgcagctgaattagcaaaccagggatctctgtgtaacttaataaccacaacagggaatcaagtaactgatttccctctttttctagattggccatgtgtgtaaggtggtagaactagaattaggagataagggggggttatgaggaaatgattaatttcaaattgttttattaatacaaaaagaatgtacatttattgcggaaaatacagaaaagtaaaaagaagaaaagaaaatccattattcttccactcagagaagttatgtgaatgttttgatatcttttatttcaatcttttacttttttgaaatattttatgcataaaaagtgtacatacatttctgaaatagacagcaataaaaggctgacccatgcgtctgccatccagcatagaacagtctcaattctgttttatctttcaattattcctcctcacccgtacctcagatacaacttttcccttttcaattaaagttaatttctccaaaataaaatgtaattttgataatttcaaacacgtttagtctcttagcatattttacataagtcagcatcctgacatttttgttttccattttcttgtgttccttcatgatttcgccatatatgtgtccctaactaataattgctttattttgcatgttttaaagcttcaaatacatgaaactgtactgtgtttcttctatcgcctttttaaaaattaacgttatatgttttgtgatgtgcgcaactttatacatttattttcattgctgtatagtactactgtgtatgaatgtacctcagtttatccatttcctgtcagtgtacttgtgggttttgttttgtagcagattctgtcagttcctcacccacgtcttttagctgtttcgtgatgcactcatcaacctccagatgcattatctgcatctgtgtctaagcgctctcctctccatcccaactacagaaagccttgcacatcacagaaagccaggagtgcccctgggggcaggtctcaaccaatgactctggggagttggggtgtaaataccgcagctcccttggataattgcagttcccctagtttctctatgagacgatgccccagtgactcacacagtagttggtttaatggtacaccgtttattggctgccttttcttccctgtcttactcccccatacccctaccagttttttttgtttatttttttcttctaaataaacttaatttttgtcttagggtctgcttctgagaggagctaaactaagtcaagtagtttgcagtttgggtcattgcaaataatactgctgtggacattcttgtatcctggtacacagagcaactggtacacagtttttctgggatatattcccaaggagaataactggattacagggcatgcatatattccacttcctgagttggtgcaggcttgtttttcaaggtggttgggacaaacattcatgagtaatgagtaaaatattcctatcattcaacaccattgcaaacttacctttggtattgtgtttagcatagtttcttttaatttgtatttctggatacttaatgagattgtacatctttacatatattattggccatttctatgcaaatgaatatttgcatttgtcacttcttctatggtctgtattttttttttttttttttgagatgaggtctcactatgttgcccaggatggtctgttcttgggctcaagtgatcctcctgccttagccttcttagtagctgggaccacaggcatgtgccattgtgtctggctgtaatttgcttttttgtaggagctctttataaattctaggtagtagcattttatgtgtcttttagacattctctccaagtttgtggcttgtcagctccctttctttatgagtcatttttaatgaacaaacatgaagtcaaagcacttagtttttttttttttgagacggagtccctctctgtcacctaggctggagtgcaatggtgcgatctcggctcactgcaacctccgcctcctgggttcaagtgattctcctgcctcagcctcctgagtagctgggattataggtgcctgccactatgcccagctaatttttgtatttttagtagagatggggtttcaccatgttagtcagggtggtcttgaactcctgacctcaggtgatccacccgcctctgcctcccaaagtgttgggattacaggcgtgagccaccacgcccggcacagcacttagtctttcacaattaaatgtgatgctacttgtaagttttttagcagtccttttaactgtaatgtttggatcatttgcatttaatgcaattatccagatggttgggtttgaaatccattattttattatttcctttctttttgagaagtgctgggattacaggtgtgagccaccatgcttagcctattttattatttcttttctcttttctttctcccacacactcctcctcctcctgttgcatttaatacttcatacacagaagcagaactccagtacatttacatgttagcagtgttttgtcctgtggacaaggagaggattccttcctatattggaattgccagctgtgtagtagataactggaataaagtgtttctgatggaatgtgtttggatatcactcatgtaggaaaagcataggagcgtgcgtttgtaattctgaacacattcagtgggtggctttgtttgctaataaggtggttcttgaaatgccacagaagtggacaaatatgttagaaagtctgaaatacttgaacatgatacctacctttgaggactaagtgagacaagtgatgagtcgaggcgatatcaaggcgataggggaacatctgtggtagctcactgggcctatgatcgcattcttctcaggtcagaagtcccatgcgagagacccaaagccacagctcgcttcattcctctgacgaaggcaagcttgctgctcagctctcctacgttaatctgccaataagttctgcaaaactcacttggttttttaaaaaactaattgaactcacacgaaagctttatcagtcaacccttaagtcttgctgccttaaacagatcagtgtaaaaggagtttttgtaatgtttatagaatgaggttgtgtgaggtcactgaaatggtgtttgtttttcttgcagctatttcagtggcagttatacaaagcttgatatgctttgtttgggaatgtgtgatactgtaagcatgccatttttggtctgtgctaactgaagcaacattttaccctgtgtgtagatagtgtggtgtataatcattcctgtgattttaataacagaattataatatgtgagacctcaaatgggtgttagacatcatccaacttcctcaccacagaaaaatatataggcaggaagaaattttaaaaactcgtttcatcatgccagctaggaaattttggtagattatgtaaaatagagattcacccacaaaatgtaatagtaaagtttcaagaatgagaatggcagacgaagttttaggagaatgtctgttgctcaagtgaggcattcagtagaaagtagtggaaaattggttgggggtcatacatctaagcttaggagcattatatgcaatcttacaatattctcaaggccaaatctcatgcatatctttatgcagcccctgtcagagactgcgtttaagaaagaagatactttaaaaaaatggttaaaatggttttttttttttttttttggagacagaatctcgaagtcttggagtctcactctgttgcccaggctggagtacagtggcgtaatcttggatcactgcaacctctgcctcccgggttcaagtgattcttctacctcagcctcctaagtagctgggattacaggtgtgttccactacgtctagctaattcttgtatttttagtattgacagggtttcactatgtttgtcaggctagtcgtgaactcctgaccttgtgatccgccaggcctcccaaagtgctgggattacagacatgagccaccacacccggccaaaatggtaaatttttatgttatgtatattttgctacaattaaacaaaagcaaatgcaaataaagacaaaggaggctgtggattttcaccattttttttcttgttttttgtgtaaaggggaaggcagttaccaacccctgtggacaggaatcgcttttgaaggtagggctgaggtgatcatcaaccaagttgtaaagatcaaaactgaccagcctgccggagactacctaaccctgttcctgtttctgccgtatcaagtgaggactttctgttccctctggcgatgctactctgtgtgactcatgattccacgtaggcttgaaggaatggtctttattcagtgcctgttaggtgtgaagcaaggtattagaaattgtatatacattatcacattgatgtatcacaatcatctgctggaggtggtattatccctaatttttagacaaaaaaagtgagattctgagagggaaagtgtagtctccaagctcacacgtgtagcagttcagagaattcaaacccagatctctgtttttgaactccttgaccttgtctttataatgtcattgcctcaaattttgtatccacccaagctaaatggaaggaagaatttagtaccttagacttggtatattgtttttcaggggaaataagtataagaaataggatttcgtttggcatggagtatttcattcatatatgagatttttagtgggaacccacttggtgctagacgttgtttgtaggcattggtgagccatatctctgtgcaagacaggcgtagtccttgctctcagggaataataaattatgccatagctgtgtaaacccacttcgtctgcatgcagaaatttatttgaaactgaattaaggacaacaatcaagcttttaactatttctctgttactttcatcaccatcagctgtggtccggtttagcggaagcaaaatagacaaattcagtaaaatgtctttctgtggagaactcccaaaatgaatacgctgagccgggcacggtggctcatgcctgtattcccagcactttgggaggccgaagccggctgatcacgaggtcagcagttcgagaccagcctggccaacatggtgaaaccccatctctactaaaaatacaaaaattagccaggtgtggtggcacgcacctgtaatcccagctactcggaaggctggggcaggagaatctcttgaacccgggaggcagaggttgcagtgaactgagatcgtgccactgaactccagcctgggcgacagggtgagactccgtctcaaaaaataaataaataaaaataaaaataaatacactgagtctcatgatctgagagagttaatgttctgtaaagttgctgtgaacactgaattagcaaatactgaaccattgctcctagggaaaatacagggttaggttcctgagagcctctggctgcaagattttcatcaatgaacacatatgcttattttatgtgttttatttagcatgtattttatttaatatgttttatttgtattttaaaatatatttacatttagatttgatacatatatttaatatatgtgtaatttaatgtatattattggttcattaacattaaactcatggctaatagtgctacaactcatgcctaagtgaagcttagcaaacacgtgccttttctctgcaaggtacatcacagacttcttgcgcttagtaacactagatattaatagcatttcagccctccatctggggggcattgcaaacagtgaaatcaccaacaaaaagcataaaaatgcaaagaacatggcattaaaaatgacacttgtttacatgattgaagctgaaacaagaaggcagcgtgtcaccttgttcagcgtcagctgggaatgtgtgttgggcaacttagaactttcactgctctgtgcatgtttgagaaagcaggaaagcaccatgcatattgattttggggttacacgtaaatttctgcaagttaggtgaatttgcaaatacagaatctgtaaacagtaaggtttgactctattaatgtcaataataaaacataatgagaaaaatatgagatattgcaatacacagaattcaaatagggcaatgggaaggtgcctggggcgggtgctacagattgggaggtcagctgaggtgtctctgaagaggtttcatctaaactgagatctggattacaaggaggagcctgtcctgtgaagatcagggggaagggcatttgaggtgggagtgagtacaggcagggcaaaggctccaagacagaatgagtttggtgtgaggaaacccaaagagaccactgtggctgccagaaatggagagctttggaggcaagtacaggcctggtcactagggccttgtcggctggagtgggggtaaggatttgtgctcagtgagtgattcttgctatatttctccgtaaatgttgcggcatttttttcattttccctgccacacttcctaagtggaggtgttgctttttacttctttgctcttttttggtgtcctagacacagtagcccctatatgtgctgagtgacaccaagctttcggcttctggtgctgtaacctttccttccttctgtgaccattgtgaatgaggatggagtatgaatgggtgatatcatgagagagagtctgcattgtattgtattggtgtggtgggggtgctgaggggtagggaagcaggaagaggcaatgtgtacaggaataaaagttacttaaatgctccaggtctgagttttcttagttgatgattagctatgtctatcaggaaacaaagggtcgtcacccaggctggagtgcaatggcgcaatctcggctcactgcaacctccgcctcccaggtgattctcctgcgtcagcctcccgagtagctgggattacaggcgcatgccaccgcacccggctaatttttttgtatttttagtagagacagggtttcaccctgttgaccaggctggtctcgaactcctgacctcaggtgatccactcacctcggcctcccaaagtgccggaattacaggcatgagccactgtgcccgtcctggtccttgataattcttttctttttttttttttttgagacggagtctcactctgttgcccaggctggagtgcagtggcacagtcttggctcactgcaagctccgcctcccgggttcacgctattatcctgcctcagcctcctgcgtagctgggactacaggcgcccgccaccatgcccggctaatttttttgtttttttgtttttttttttttagtagagatagggtttcaccttgttagccaagatggtctcgatctcctgacctcgtgatccgcccacctcggcctcccaaagtgctgggattacaggcgtgagccaccgcgcccggcaattctattttttttttttttttttttttttaagacggagtctcattctgtcgcccaggctggagtgtagtggcgcaatctcggctcacggcaagctcctcccgggttcacgccattccactgcctcagtctcccaggtagctgggactacaggcgcccaccaccacgcccggctaatttttttgtattttttttttaggagagacggggtttcaccgtgttagccaggatggtctcaatctcctgacctcgtgatccgcccacctcggcctcccaaagtgctgggattacaggcgtgagccaccatgcctggtcctatattccttttcattcctgtcgaggtaagcttttagtaaatggatttcattccaccctttccttctggtaagaagcaaggactgaggatgatagaacttgtaaatgtttgaatttcatagtacacggtttatgtgttggatttgtcaggtgtccttcagcgttatttggtgaaggtgggcaaattaaatttgcctttttcaatatcctctgaatttttaatgagctgctatatgtcttgtcactttttctgcccatagctattgttttcagcataactgtgttctgtaattcttttttctctgcaatagtaatttatttattttacttttcaagatggcttccatttgtgttatgcaagttttagattttgtacaatatagagtgtataagacaccttttttttttttttaaactgaagagctatggaatctagtatacccagtgatatagctatgacacatttatctaagaaggaatatgttaccacaaagacagtttctttcttttggagaaattttcaaatgcatcagtgctttaaaaaaatcaccattttggtatccatatgtgagggtgagtgattttttcagagagaaaaaatgtgttccaaatagatatcagttgatttctttaatcgtaagttttatattaatgcgtcttttttttttttttttttttttttttttgagacggccaggccagagtgcaatgccgcgatcttggctcactgcaacctccgcctcccgtgttaaagagattctcctgtctcagcctcctgagtagctggggttacaggcatgcgccaccacgcccggctaattttgtatttttagtagagacagggtttctccatgttggtcatgctggtctcgaactcccaacctcaggtgatccgcttgcctcggcctctgaaagtgccgggattactggtgtgagccactgcacccggcctatgagcctttttaaaaataaacaagctgactgtttttaccaaacgctatgaaaatacaattataagctattctgtcaattaggaattagaggttcttagaccatagctctgagagcacactaagtcctcatgctaaaatttattttaaacataattaagaacagaggtggttttaaaccacttccctgctaacttttttttttttagacagggtcttattactctgttgcccaggctggatgcaatggtgcgctcatagctcactgcagcctcaaattccctggttcaagcaatcttcctgcctccgtctcctgagtagctgggactacaggcacacacccccatacccagctaatttttttgatatctagtaaagacaggatcttgctatgttgcctaggctggtcttgagctcctggggtcaaaggatccttctgtctcggcctcgcaaagagctgggattacaggtatgagccaccacgcccggtacttctagtttttgacatcatcaactatggttgagttatgcagaatcagataatagactaatttagcaaataatctttttaaaaattacttttagagaactctaaaaatgtaggtactttaaaatattttactctagtcaaaattttctcttttggcacaaacactataatttccaaaatcaaggttttggaaaaccttgattgttttgtaccttggttttcaactccagaagaaaaagtctagtccctgctaaaacaagaatcagcaagttgatgagctgggtgtctttgtaaacaactccacactttcaggattaagaaaacaagtctcatatgctgggcatagcttgggatcgtggactagataggaaactgtggctttagccttgccacactgccacacactacctgctgaacacaacacaacaatttagattgagaaaatgtgaatacacctccagtgactggaaatacatctcaatatacaagtaactttataagcacatgcgaagtttattatctttatgtgcatgaaagcttctgttatcagtttatcaaatattacatctttgacaaaaatgcgtatacatttgtcactatgatagtaaggcatgcaaactgcactagtacggagttgttttggttttgcttttttagaaaactctgatgttcaggtgggggtgatttgcgaccttatagcaaatgcacaaagaaaaatcacatgtagcttttaggagtttcagtttggggatctaaaggagcctacttaaaaggaggttgcgtggagctaaattaatccttatttttatattatacacacatattcatgataggaacatgtctatctcagtgacaacatctcttgccacactcatatttatatcatatctttatccttcctgctgtatgtcccagaatgcaattgttgacctcactttttttattaaattttttaaaatttaatttttactttttttttcctctgtgactctagccaaggaaaatcaagctaattaacatgtacattactgagaggtgacagcgtgctggcggccctcacagccctcgctagctctcggcgcctcctctgcctgggctcccactttggcggcacttgaggagcccttcagcccgccgctgcactgtgggagccctttcctggcctggctgaggccagagccggccctctcagctcgcggggaggtgtggagggagaggcgcgggcaggaactggagctgcgtgcggtgcttgcgggccagcgcgagttccaggtgggtgtgggctcggcgggccctgcacttggagcgcctgaccggccctggggccccgggcaatgagggacttagcacccgggccagcggctgtggagggtgtgctgggtcccccagcagtgccagcccaccagcgctgtgcttgatttctcaccgggccttagctgcctccccgtggggcagggctcgggacatgcagcccgctatgactgagcctatccccccactccccgtgggctcctgtgccgcccgagcctccccgacgaacgctgctcccggctccacggcgcccagtcccatcgaccacccaagggctgaggagtgcgggcccacggcactgggactggcaggcagctccacctgtggcccggtgcgggatccactgggtgaagccagctgggctcctgactggtgaggacttggagaacctttatgtctagctaggggattgtaaatataccaatcggcactccgcatctagctcaaagtttgtaaacacaccaatcagcaccctgtgtctagctcagggtttgtgaatgcaccaatccacactctatatctagctactctggtggggacttggagaacctttgtgtccattctctgtatctagctaatctagtggggtcgtggagaacctttgtgtctagctcagggattgtaaacgcaccaatcagcaccctgtgaaaacagaccactcggctctctgtaaaatggaccaatcagcaggatgtgggtggggccagataagagaataaaagcaggctgcccgagccagtagtggcaatcttctcgggtcccgttccacaatgtggaggctttgttctttagctccacaatgtggaagctttgttctttagctctttgcaataaatcttgctactgctcactcttttggtctacactgcttttatgggctgtaacacttactgcaaaggtcggcagcttcactcctgagccagtgagaacacgaacccaccgggaggaacgaacaactccagatgcgccgccttaagaactgtaacacttaccgtgaaggtccacagtttcactcctgagccagtgagaccacgaaccccaccaggaggaagaaattccgaacacacccgaacgtcagaaggagcaaactccggacatgctgcctttaagaactgtgaagcttaccgcgagggtccgcggcttcgttcttgaagtcagtgagaccaagaacccaccaattccggacatattacctcacatagttaactttttggggagtgaaaacatttatttaaaaagatttggccgagctcggtggctcacgcctgtaatcccagcacttttggaggcagaggtgggtggatcacgaggttaggagatggagaccatcctggctgacatggtgaaacctcgtctctactaaaaatacaaaaaattagccgggcttggtggggggcgacggtagtcccagctactgtggaggctgaggcaggagaatggcgtgaacccgggaggcggagcttgcagtgagccgaaatagcgccattgcactccagcctgggccagatctcattttcaaatggtatggtgtgccctcatttattttttttcattcattcattcattcattcattcattcattcatgatgttttggctgaatgcctggtatgtgtggtaaggagagaaaggaaaaaagcaagtcataattgcttcattcagaaactatggaacccggattcgaatggggagacaactcttggatacttgtagagttaagaataaaagtttaggattcagggccagaataataacagtaacagttaattcgacaggaatttctcaaaaggggtactcagggtgaggaggcactttcagggagtaaggtataacttaggttcatcctggaatgatgggtaggaatcaatagctagaagcgaggtagcattaaaactgaattctggcagaatgctgcagtttcgtataagaaaagacttgttttaaataaaatacttcacagaaggtaggcagacattagaagtaagattctttttcttcttttttttttcaagatagagtcccactctgtcacccaggctggagtgcagtggcatgatctgggctcactgcaacctccgcctcccagattcaagcaattctcgtgcttcagtctcccacctgcttggactgcaggtgccaccacgactggctttttttttttttttaagttggagtctcactctgttgaccaggctggagtgcaatggcaggatctcggctcactaaactctgcctcccggggtggttcaagagattctcatgcctcagtctcccaagtagctgggactataggtgcatgccaccatgcctggctgatttttgtatttttagtggagacggggttttgccacgttggccaggctggtctcgaactcctgacctcagatgatctgcccacttcggcctcccaaactgctgggattcgggcatgagccatcttgcccggcctaatttttgtagttttagtagagacagtgtttccccatgttggccaggctggtcttgaactcctgagctcaagtgatccgcccaccttagcttcccaaagtgctgggattacagttgtgagccactgcacctggcccaaggtttttttttttgaagtaaaattattttatatatatatgtgtgtgtgtgtgtgtttaattagagaaagaagtaaagaaggaatgatcaatgatgttggtatagtgtaaaatgatccagcataatttattcactaaatattggcaaaagattatatattagcttttcagatgggtggttattgttctgataatgatgaataagtgtctaaaaattgttgcctagtaagagcaaaaataggaataacaggaatttttttttttttttttttgagacggaggctcactctgtcgcccaggctggagtgcagtggcaccatcttggctcgcagcagcctccaccttcctggtttaaatgattctcctgcctcagcctccagagtagctgggattacaggtgcccaccatcacgccggctaatttttgtacatttagtggagatggggttttaccatgttggccaggctggtcttgtactcctgacctcaggtgatctgcctacctcagcctcccaaagtgttgggattacaggcattagccacctcgcacaacaataatatgcatttttaagatcctgtaaatattttatttgttctagccaacacctttattgaaaagaaacactttttctactttagtgacaatttgtcatgttagacatgcaaatctgatagatgacaggagaaataaaggttgtccatttcccttgtaaccccgccccagagattttctttttctcttcaaaattactttagggacccgcaatagaaatgacgtaagaggccaggtgtggtggctcatgcctgtaatcccagcctgggtaacgtggtgaaaccccgtctgtccaaaaaaaaaaaaaattttgttgggtgtggtggtacacacctgtggtcccagctgtttgggagttctcaaacagctgagaggattgcttgatcccaggaggcagaggttacagtgagctgagatgatgccactgcactccagcctgggcaacagagccagatcctgtcccttcccctaaaaaaagaaagaaatgacgtaaaactgtgaattttggatttctagggggccaggaccatttaaaattcctagaaagaagtatgactaaattcttgttggttcttttgtgagtatgctagtgaataagttcttctcatgagttttgaaaattagttcgtatgggaaagttgcccaagaattatagtgtcacagggccagaaaaggggaaaaaaagaaaaaagaaacatctatttttgtcattttaatcagtagagtaagtcaaaaatggggaagattcttttgtcagttgtcaagaaggggactgtcacacctgctaagcaggttaagcttgtttttgaaagcttgcaatgcaatttgcagtaatttttttctcctgctactgaccagatccaaaactttacgttgttcacaccagaaccagttattcaatttatgaagcagttgattaaaacatttactactcattcatcattcattcattcatcccataagagttatatgcctatttaccagtaaggcatcatagttgtctatgtatgggtggctataccttcagggaggaaaaggtatagcgaatatggtagtgaataaatatccctgggtgtagggttcaattgtgaaagtaaagcattacataaacaaatgcaaccattattaattagttaccttctgttagctagcttggattttatttggcagataatggggtttgtatgatttgtgccatgtcacttctctgtgacatcactggcaacagacagttgtgtgtcttttcattcctcccttcttacattcataaacacatgtatttgtttactttaacaaaatgggatcatagtatactgtgctttagagtattctgtcacttgccttttccccctccacatgtccatacgctataatcatccttccaagccaaaacatctcaatctttgttgttgttatgaatggcagcattcatatttgatgaaaccagaattgatatgtcatcatatcttcaaggagtttccttttatttaaattaattattaataactttattagagacaagctcttgctctgttgctcaggctggagtgcagtggcacgatcataactcactgtaactttgaactcctgggctcaagtgattctcccgtctcagcctcccaaagtgttgggattacaggtgagagccaccaagcctggccaatttctaaaaaaaaaaatttgtagagatcaattctcgctatgttgcccaagctgagagtttctgttttaaaaatgcagcaaaactgatcagttctcataattgaattgaagctagataaggcatttagtattcgatttatttatttaaagaattccaccatcctttaaggggtcttgtgtgtacaaatttgatatgacatgtaacatttttctttctttttttctcttttgttttgtgtttgttttttgagatggagtctcgctctgtctccaggctggagtgcagtggcaccatctcagctcactgcaacctctgcctcccaggttcgagcgatcttcctgcctcggtctcccaagtagctgggactactggcatgcgcgaccacgcccagctaattttttgtatttttagtagagacggggtttcaccatgttagccaggatggtctcaatctcttgaccgcgtgatctgcctgcctcggcctcccaaagtgctgggattacaggcttgagccaccgcatccagccaacatttttcaaatagaaaatctgaagctaaaatcacccctaaaggacaaataacaggactacaaacagcgataagacaaggaattctatgggcaacacttaagtctactgcagcttgggctggatattctccttaaggaggaacctgtctttgattgttccattgcccttcaactctgagcctattcaatcattgcagagcttttgctcagtagccactctctgtattcacagaggggccacctgcctccctacccggcatctcggagcaccttgcgtgtgcttgggtgtcctggagagctgaggaagcctgctcactagggcatcttctgctcttgctgttttattgtgagcagaagggagccattcttctgtaaggttgggtgtacgatgtggtcctgttttcagggaatattcagtccttgccttcttctgccatttgatagaagactttggtgttttggtctgccgtaatatatttatactaatttgtaggccaggcatggtggctcatgcctgtaatcccagcactttcggaggcggaggcgggtgaatcacctgaggtcaggagtttgagaccagcctggccaacatgatgaaaccccgtctgtactaaaaatacaaaaaattagccaggcgtggtggtgcacgtctgtaatcccagctgcttgggagtctgaggcaggagaatcacctgaaactaggaggtggaggttgcagtgagccaagatcgtgccactgcactccagcctgggcaacagagcaagactctgtctcataaaaacaaacaaacaaatatatatacacacacacacatatatgtttatactaaattttaaaaattcaacctatgtggatcaaaaatttcaaatttgtctgttcaagtctatgtaaacatcattatgtaaaagtaatctgaaaatagtttttcatgcaacaagaataatgtatattttcagtctcaaagttgaaatgaatgagaaatgtcaaaacaaaatgaattgattgggaaatcaaatctaagcactgacaaatatgaaaagtgtattatctaattagtagtttatgaaagtgaggcacttttataatcaaagaaataaaaccttccagagagatacagaattactctgacctgaattattttaatgggaaagagttgtttttgtttaaaaatttcaggtgaagtttgataattttatcttaagtccacttggcttcattttgttgggcagcattggacaggacagtgcagccttatacagatgactctcagttctttaaaaaaaaattaaaatgggtccatgagaaaataaaaatttaatgtatcttaagtagaggatcttgagaaagctaaaaactgcttacctaaactgagacattaccacggatttgtagctaagtcatttagaatagactttatttgtaaatgtaaaatgatactggcaccaagatatggttgtgaaataggaagtctccagaaaataatgaaaaattataaaccgtgcccatagacaatagtcagcaaaaacagattgtggaaagacaggaagacagagcttatcctagtcatggtactgagtggagaaaatctcagaattgtgtgcactcaaaaactgtgcagccctgttgaaaacatttcttgtaatattatcttataatagttacatctacctgcacactgtctcaaaataactttagtgtcacaataattttggttgagctcaacaacgttcttttatctttctaagccatattcatttctcagggatgattacagaattggttaatttgaaagagttgtagcataaatattgtgactcatgaaatgtttttagtacttgttttagactttcatttcctttggtcatgctcttgtgggagatttaagcagtaatagcattttcatttttctttcctgcattccttacccatgagaaggtaatctttaatacactgtttttacttagtaagttctggtgttttaaagaaatgggttttttattcaatcataatttattgaacacctactaagtgcccagcacagaatcagatgttaatctaacataattttccttttttcaaatggtcttatttgattttttaaaaaatggatattaatgtacactagaatggagatttttgtttaccagttatttgttgctatataaatgtgggttaaattagtttttcttccttataccaccaacctttcagacttttaaaggaattactgtagaattaaaattaatagattcctcagtactggccaaactcatggatttgtggcacttcagaataatattggcttttaatgaacagaatagatttgcatggaaatgccagtttcagggatagaattagagttgggatttattttttccctgaagatctgcttcgaaaatttgccccaggtgatctctgtccttgtcctagggtcactccagaattaccacttttttctgcttgcgattcataaaggtaagaaggacaaacttagtctgttttgtagtggaattgttatttttttttaaccttatcttttattttccatgtaaaattgcttttccctctttaactacctcgcatagacagggcaggtagagtgaatgtcagatgaattaaggtagcactgaactccttatttagcctgtcaatagctgcatgattgtttttgcatgaaatcccaagttcgtattagctgctcaactttcaaactttaatggggaagtcagtctttattcttcagtagtgtatgatccgtgaattaagtttgtattatgccttctgtcccaaaatttcctctctcttagcttctccctagccccagagatcagtttctctgcatgtgtcaaacttccttttctctcctcatatttcattcttccaggatctgtaatgtgtccaagttctcatagctcacttaaaaatggatggagtccagagggatcagtgccgacttttcattaatctattagagcttcacatttactggcttgcgccaagagatgtgggagaggaggaaaatgagtaagatctcacctcctggaaaggagggtgccactgctttttcagtggtagagttgctcccttaaagcagactctctcccagctgaattctgagctgagtgttacagagataagtcagcttgaatctggaggagtgagagagtttggctagggccctgtgacagctttgtggtcaggaaagaatatgtaaattcactgaattcccaggcatttcagccctagaggagaaggattaggggaatccaagagtcctgaccttactgtgagactgaattataactagagccctttttaactaacacagcttgagtttcatatttgaaataacgcttaaatcaaaatagtctccactcttcccatatactgatgggaaatttattaaatgttaaagtctaatctgaaatcaaatatagctttaaataaaactatgcaacatcatttagtagtgtttataacttgagtgatgactgtctgggctcaataacccagataggagaaggaattccatggccctccttcccaatccagacctgtctggaagcatttatttgtactaagttttccagtctgaaagtctgtgtcattgtttagactctgtgtgaataaacagacagagcaataaacttcctcttcaggtgaggtttatatcttttaaactagactgtggcctctaagccatggctttcctgtagagaggctgcataattcagttctgcagatgttttggtgaggctttaccatgtgcccaacctgcactgtgttcttttaggcataatgataattgcaaagaaacatggctcctaatgaagttgtagtcatttttgggaaaagtgagtctgacacacattaattaagatacctacttcagaaaatcttaaaatatgtatcatcgagggctgggcgcggtggctcacgcctataatcccagcactttgggaggccgagacgggcagatcaggaggtcaggagatcgagaccatcctggctaacacggtgaaacccagtctctactaaaaatacaaaaaaaaattagccaggcgtggtggtgggtgcctgtagtcccagctactcaggaggctgaagcaggagaatggcgtgaacccgggaggcggagcttgcagtgagccaggatcacaccactgcactacagcctgggcgacagagcgagactctgtctcaaaaaaaaaaaaaaattatatatatatatatatatatatatatatatatacacacacacacacacacacacacacacaatcaaatgtcatcagttcaagcagatatgcgctttgtagtcaggaagaggaaaaatgagtgttggctttagttttggggggaagtttgctgaaataaattggatttaagatgatctgtgcagaatgtgttcacttttgggtgccagattttaataaagttatcatggagcttcctatttgggtatcaggcatgacttaacatctaaacatcaatccctacaaccgtaggctagggctcagacctagagtcctcaatctggtccggcctgcctaaaacccttgtttatttccccaatatgctgtacaaatggtattatttactctgggtgcatgacatgaataatagttaagtagcactgaattagaggtatttctttggaaggcaaagggtctagaaaccaggtctcttgaggaatagttgaagggccttggcatatgagcttagagccgaaaagattaaggacaaacaaaatagttattttcaaacattgcaaagacattttgttacagaacaagtttatttgttctacatcaatttaagatgcagcatggggcctgttgggtagatgtacaagtgagcacacaagaatccagctcaaataagaggtttctcacgattaaaatgctcgacagagcactgtttttcagagcagtgccttcttcatttctaaaagtgttaaagagaaattggatgtccttgcagccggctatgtggctagggtggctgggatgcactaagtacgtgtttagggatcccaggcaagtagaaattatggaggctttttagaaaaagacaactatagcatgaacagacacaccaggggaacaatgagaacaggaaatgttcgtgtgccaggaatgtgtggaggaaatgacacgagcatgagattggtgatcaagaactttaaatattctgataggcagtggggaaccgtcttgcttccagtcctggggaaggatatcacaaaaccaatgtctgaggaagctttgctttctgtcttgtgccagaggaatgttaggagagagggaaagagatatattccatgcagggagatcactttgggagctttccccaattatactctttcttaactgtgctatgggtgggtggagaggggagtaatggaaacagagacggaacataatcagaatttaatggaagagctaatatgggtttccttgaaaattgtcctgaaatagaactctccaaattattaattgaaagtgatgtggtcagtttgttagatcagcagaccacaatcagatatctgcatcttggtgcaccactcaagctgaccagtgacctgagacaagtcattaaaattccttatattctaattccctagcagtattatcccagcatgagagaatgtttgcaaaacattctgagtcttggatgaaaggtaccttattataataatattatactataattattcttgttattggggttattgttctcaacattgatgcaatttaatacttcctaccttagggatatttttgtcttacagcagaattgtgaaagtggctttcctgggagatattctttgaaagactgggaaatctttcaaatatttgttttaataatagctcattgaggaaatgtgaaaactatgtaatattaaggattatcactcctattttcttctcaatctaatatctaggatatgttgaaaatacttttgtttcatctccttacagggagctagaatggtttagattggtgctttcctggggtactgattttttttttcctgtggaattctctgaacagggctttcctcaaaagaatacattaagactgtcagaatgattcttttcagcagattaagccttgcagatgccctttgttgaaggaaaaaatgcattattctgaaagtccttctgatcttcaggaaaactgaaaatatcaaatattctcctaccatttgaacttccctacaagaaaaccccagatatttttattttctggtctacaataattcagagcttattgtattttaagatgaggatatagacatgttttgaagaaaaattaactttttacatattcatttactgaaaggaagacacccttccccccaccctggaaagacagaaatcatagtgcttcgtttttatttttttgtttcctatttcttgcacctggacattttcctggatgaagtgatgtgtacggcataattatcctgggacataattgcttcatgtgtgtcagcaagacatggttcagatatttattgagctctggttgtctgtgtcctaaataagaccgtgctatttcagggttgcaaaaacaactccaatgcattggaaaaagcagaaaggaggacattcctcaaaaagagttggtttcatggtttagaaatccatttattgcttgcaccgacagactgtgcttgagtgtgcgaaggctcactttgatttataggggcttataaaatgctctgctctttgtacccaaagccacagacctgctgtgaatagggcacgggccctgagtttttctggtggtcaaatttataaaaccaaacaataatctctttgggaagctcctcaaaggcgagcctgagtctgttaacttcagtctgtacaatgtctagcatagggccacatgttgacgagccctcataaatgtccttgttgctgttgatgaatgaaggattgaaactgggaatagcatgtagggcacaggcgtttgttttccatgacagataggaagagagcttgtacatggggaggggatagatgggggggtcaaggacatattttgggggatgctactgtattctttaagaaaaaggaaaaatggctcaaattatctttcagtagtgtcatggccctctgctaggaaactggtttatgatttgaaggtgtctgagacgttcactctgattacagtgcaaagggtcatttgcactctatgatgcaatgatggcggaattctgtctcaactttgctgtcggccactctgactagtgttttttgtttgtttgtttgtttgtttgtttgttttttgagagggagtctcgctgtcaccaagctgcagtgcgatggcaccatctcgctcagtgcaacctctgactccctggttcaagcgattctcctgcctcagcctgccgagtagctgggattacaggcaagtgccaccacgctcagctaatttttttttttttttttttgagatggagtctcgctctgtcgcccaggctggagtgcagtggtgcgatctcggctcactgcaagctccgcctcccaggttcacgccattctcctgcctcagcctcccgagtagctgggactacaggctcccgccaccatgcctggctgattttttttgtgtgtgtgtttttagtagagacggggtttcagtgtgttagccaggatggtctcgatctcctgacgtcgtgatccacctgtctcggcctcccaaagtgctgggattaccggcgtaagccgccgcacccggccatttttttgtatttttagtagagatggggtttcaacatgttggccaggatagtcttgatcttctgacttcatgatccacccgcctctgccttccaaagtgctgggattacaggcatgcaccaccacacccagcttactctgactaatcttttatttcagtcccttccccttccctttctccctcattccccacttcctttcctcccacttttcctttcttccttcctcaactacttgtttaaaacctgtttctcttctaggctataaagatcccgtttccttcccatagctgaagaccatttagggaaggtggaagtacatgcctataatcccaactacttaggagacagaggcagaaggatcacttgagcccgggaattttagtccagcctgggcaccatagcaagcctccatctcaaaaaaagaaagcgttttcatatatgagtaaagctgaggcttgcttatgtccagagggggaaaggttacacattttcaaatatacctgttgcattttcttacacagaaagtgggatagcaaataaatagaacatcttgtctgtaggatgaatgtaaccttaagaagtattgcagtgtgttattattgcttaaaatgtatttatttaagacctctttgttgagaaaatttctcagtttgggtgaaaagatagagaatggaaccagtatgcagtagttatattgttgagggagtcttgaagtggcaaagaaaatgaagtatttctttcaaatagtattttgcaaccgaactgaaattccactctgcacaaatgtgcctgcgaaaagttacagtaatttaggattgaaaaacctgtatgttgctaaattcatagttaacctaattttagtttttgcagaaaagacgatttatagtatgaagaaatgataatacttttttaggagttttctttttttcttttctttcttttttttttttttttaaagagacagggtcagccaggtgcggtggctcatgcctgtaatcccagcactttggaaggctgaggtgggcagatccccatctctacaaaaaatataaaaattagccatgtgtggtcgcacatgcctgtaatcccagctacttgggaggctgaggcatgagaatcccttaaacctgggaggcggtggttgcaatgatctgagatcatgacactgcactccagcccaggcaatagagtaagactgtctcaaaaaaaaaaaaaaaaaaaaaaaaaaaaaagatggggtctcaccatgttgcctaggctggtcttgaactccaggcctttagcaatcctcccaccttggcctctcaaagtgctggaattataggcatgagccactgtacctggactaaaaaagatttttcatgcgaaaattatgtgatttttggttacctttgttgtaaaaacattttttcctttttatttgcttcctagagctctattcagtgagaaggttttattctgtgtattaatcagcacacacttcccatgcacatcttctcctaaagtgaaggcctccaacctgaatttcatccctgtctccaatctaatctttatcagggtgattttgacttcgtcctaccctctggatggcagtggggccacaggtggtaactgtcactctttgaagcttcctcatgtccataggcctcggtcccgggtccatttgttctcagcagcgggttgtgccctttgcatctgagcttgttcagtgtccatagtccatggtgtccctcctcaggtctggctttgctttgtggttcacatggctcacaatccggcttgcccaggatactgccactgtacccctgctgctccaccatagttattcagaacaccactttccttctctagtttcgttcctgagttatttcaggtattagtgcagagaggggccaggttcagcttgggtgttactttattttttaatttttaattttttaaaaatttatcattattttttagacagagtctcgctctgtcaccaggctggagtgcgatgacgcgatcttggctcactgcaacctccacctcccgggttcaagcaattctcctgcctcagcctcctgagtagctgaaattacaggcgcctgccaccacacccgggtaatttttagtagagacgaggtttcaccatgttggccaggctggtctcaaactcctgacctcatgatccacccgcctcgacctcccaaagtgctgggattacaggagtgagcccgcgcctggctgcccagctaattttttttgtatttttagtagagacggggttttgccatgttggccaggctggtctcgaactcctgacctcaggtgatacacccacctcagcctcccaaagtgctaggattacaggcgtgagccaccgtgcctggccttgagtgttactttaaatctaatattgttgtattggggtagaggtagagaaaccattgcctgtagtaacttagtaacaatgggtctatattagtagggttctgatctgggaagaggatatcaattatttacttaatagataatcatttaccacctattttgtgtcagatacagttccaggtcctgggaattatagaagtcaagaaaacagagtcagggccctaaagaagcatgcattttggcaagagacagtggcaataataataataaaaaaagatataatttaatgtcgggtaacaataaatgctgtaaagaaagcatagcatggagatagagaagttgctgcaagagctgttttagagggggcggccagggacaacttctgaagaagggacacttgaaccatcgtcacagtcatctagatagatcacagtcatctagatagatcttgtgcaacgggaaggcctcttcgtattccctctaagctcatagaggatcgtgaaaagtctgtggaatcttactggggataggacagtaatttacacagtgctatggcgatttgttttgtatgtattatcttcagctgctgggaacttgctttccatagtccatctctagccatctccagtcccaacaatcctacagcctacatttgctgtttggtatattacccagatcacgttttcagtcactttatttttttatgtatttatttattttttgagatggggtttttctcttgttgcccaggttggagtgcaatggcgcggtcttggttcactgcaacctctgcctttgaggttcaagcgactctcctgcctcagcctcccaagtagctgggattacaggtgcccgccaccatgcccggttaatttttgtatttttagtagagatggggtttcaccatattgggcaggctggtctcgaactcatgacctcaggtgatctccctgcccctgcctctcaaaatgctgggattacaggtgtgagccaccatgcccagccgtttcagtcactttaaaagttctaagaggtatggagagagaggggcattttagaacatggagccgcacagctatagaatgtgtcctggcgctgttccctgtccgtcatgtggctctgtaggaagaagacattctgggaaattctatgctccaggtcctagcttggagcctccctccctctgtgaggtttgcaacatttcctgaaccttagagagtaaagggaaatgtgctcctatatccagaacttccaaatgtaagtgtttgccaagtgctttgcaatctgcctttccataatttctctcattatctctgtgatgggatttatcatgctgtactgcactttactgagtaaatgtagggacagatggaggtggcagactggaggagaagagcaagagatgacattgagctgggagctcttcacaggaatggtccgtctgtgggcttcctggggggtgaggaggggggacaaatatgtgattggcacatggtattgccattcagtaacacctgtggcatgaataagctacctagggtgaaggtgagctgctgtttcgaagttttgaatacaattatattttaaattaatgaagagatcctggcactgaggaggttgaaatccttttgcatggtggattttctggatctgaattttataaggaatttttttttaaatagcattgaaagatttttagtagatgaagacaacatgcgtagtaaggtggccattatatggtgagtcagttcactatgccctaggatttgaattgctgttaagttttggatgttgtaactgactgctggttggtctgttcctatttttgctgctgttgttcatccatccaaccatgcatctgtgcatccatctgtccattcattcatccattcatccatttatccatccatccacccacccacccatccatccatccacccacccacccacccacccatccatccatccatccatccatccatccatccatccatccacctctccacccatcaatctgtccactcatttctattacttactagtagtgtgattattttcttcatctcacttggactcagttttcttcatctacagaatggtgagttttgtctaggttattgaaagggtcctgttaattctagaatcctaagattcttaccatttgattacagtttgtgcaagacaattggaaagaatacaaacatgaattaaacatgggttctgccctccaaaagcacattgtctggtaggcgtgctgacatagaaacatggcacaaatgtgagtagagaatgaccaagtaccaaacacagctgcggttaatgtgtgcgatgggaatttcaagaaattcaagaaatttggctgcagatgttaaggaaggcttcagaaggaaggtggcatttatgtttgagtagagcaaactgacatgtattaacatcatcagttgattagcatcctcatttcatttaatgttcacagtagtgtatggtcttcactttactatccccatttagcagatgaagaaactgaggcagaaaaggagattaagtaactggcccaaagccacccagctgtattgtggcagagttgtgattaagaggatgtctgtcaaccccctttcatccttttgtcttaaaaaatcgagtcagtaggccgggtgcggtggctcacgcctgtaatcccagcactttgggaggccgaggcaggcgaatcacctgaggtccggagttcgagaccagcctgaccaacatggtgaaaccccgtctctactaaaaatacaaaattagccgggtgtgctggcgcatgcctgtaatcccagctactccagaggctgaggcaggagaatggcttgaacctgggaggcggacgtgctgtgagccgagatcgtgccattgcactccagcctgggcaacaagagtgaaactccgtctcaaaaaaaaaaaaaaaaaaaatcgagtcagtagagagatgaggattgcaggattcctccctttccctcccctccactcccctccgctctttttttgagacagggtcttgctctgtcccccaggctggagtgcagtgcctcgatctcaggtcactgtaacctccgcctcctggactcaagctatcctctcacctcagcctcgtgagtacctgggatcacaggcatgcaccaccatgcccagctaatttttgtatttttttgtagagatggagttttgccatgttgtccaggctggtctcaaactcctgatctcaagtgatcctcctgcctcagcctcccaaactgttgggattacaggcgtaagccactgcacttggcccaggatatttcaggtgaagaagaccatcagtgccctggcacaacgaggtggaagtgccctgtgtacctgagaaacagcacagacttcggtggcgctggagcacagtgtcccttaatggcagcagtggaaaccgagcctgggatgacagcttgggattcgaggaggctttttattgtctgactacagggtctggtctttatttggcccagatggagactttgtgcagggtggagacatgatcagaggagtacatttcaggatgtttatgactctaagaccttcttatgattccaacatcctttcatgctcctaagctcttccatgtgatgctgaggaaactcccctcccctccccagatgtctcctgcagcctcagcccttgagcattttcatctctgggtttctgtgctaaggaactcagggccctggcttcccatcctaccattctgaacatcagcacctttaaaaaaaacccctctcaattcttgggattctgagaagaaaactccttcatcttcccctttctgctctttcctagattttaacctaacttcagctatttcagaacgttttctgttcaataaatgaataattagatcttcttgggctttgccagtgaaaaatataccataatatttagattaaaacagtgtaatgactacactagcaaaatacaccccggttacatgatgaattcctccttttcatttttatttgtggtatcctggggtggcctactggagaaaaaaatactatttgatcctccctgggtggtcagacaggacttgtaaagactcctgtttgttttgtgttgaggtttcaaaggcacgcaggcttttctacataaagatgttctaagaaaatacggatttttttttgaagttgctgtgtataaagggaaattcaaagcaaccgtcttcccttacaactaccagctaatgtgattagagcgtctcttttcaccaggcatctttgttgttaccatctctggtcattaccaccagtcttgaggggagatgtatgcttacaaaaaccacctccacctggctttatttttggcgcgatcacacaaacatgtgttttaattttaaagattatatttattgtcacatttagattttttttaaaaaaacactaagaaatctgagtgttgtgtgtgtgtgtgtgtggttcaggatgcactggaggtgtgtgctgccacaacaaatttcaggccacgtgttctgcagattccaattagcaaggccctcctgctgtggtgtgggagaaaagtttggagtggggttagggctggctgagtgtaggaggctttttaatgcaatctttgcagaactccctcattagcacctcgaggtcagtgggaactggtatacagagcacagttggcattttctgctatgcatggtgtgtgtcagccattttatttatccatgcttattttctccgtttcataaaattaattgtacttaatgggggaggggttgataatgctgaattattttaagcctggagggagctcagcagctgtgtcctagatcagaccaccgatctatctaataggttgtcttgctaccggatccactggacgaatgtgtttcgccaattagacgaatccctatatggagagaaaaatgaccttgagccccagaaagccagacagttgcttcgtgccatgtcttcacctactgaagctgcttcaccgccttggcctgataggagtgtagtatatatctaacctctagacaattaaatttctcctttaaaaaaatagccactcttatgtgaaatagtcaaatctttcatgacttgccaagatacttgcttttggaatcaggtgctttcgggtgtagcctctaaaaattttaaaggagagcaaatcttccaagcttccttcttgtatcaaggcataacctgctgaggtccaggctgcagtgatccatgatcatgccactgccctccagcctgggtgacaggctgagaccctgtcgcaaaaaaaaaaaaaaaaaaaaaaaaaagacataaccccctgctataaaatatatatatgtgtgtatgtgtgtgtgtttaagaggaatatcagagaaagataaatttttaagtaaaaggaaatattataagctaattttgttgggtattcttctgggcaattattttatcatcgaatacatttccacaaaatgccagaattcttttttttgagatggagtctcaccctgtcgcccaggctggagtgcaatggcgcgatctcagctcactgcaaactccgcctcccaggttcaagtgattctcctgcatcagcctcccaagtagctgggattacaggtgcgtgcctccacgcccagctaatttttgtatttttagtagagacggggtttcaccgtgttggccaggctggctcttaaactcttgacctcgtgatccatccgccttggcctcccaaagtgctgggattacaggcgtgagccacggcgcccggcccaaatgccagatttctttaaaagataagcctgggcacagaaaacaaacttgatgtatgatagaatcttgcactttttaagtcctggagttaaaatttactgtggctttggtgtgactctaccagcaacaggatggcactcagtagagggcacatggtatagtgggaaaacctcttgggggtcaaccaggtccagattttgatctgtgcctctgctgctactagctctgtgaccttaggcaagttactgcacacacttggccccagtctctttgtagccttctgctgctattgctgctagcttcacaaaatcgtttcaaaggttaaatgaagtaaactatataaaataaatatctagggctgggcacggtggctcatgcctgtaatcccaacactttgggaggcagaggtgggtggatcacctgaggtcgggagttcaagaccagcctgaccaacatggagaaaccccgtctctactaaaaatacaaaattagccgggcgtggtggcacatgcctgtaatcccagctactcaggagggtgaggcatgagagtcgcctgaacccgggaggtggaggttgcagtgagctgagatagcgccattgcactccagcctgggcaacaagagtgaaactcccatctcaaaaataaaataatatataatataataaaataaataacatctagcttatatattaatgttagttcattttcttttcttctcattacatccaaggactagtaattttccaagggtagtaatgttccattaattttgggagtcactctggagaatcctgtaaattttccagatactgaaatctaagcctacaaaggcttaatgactctcttgcaatgccttaggagtagcagagttggtgcccaaatcgtgcctcactgaatgcttccagctttactacaggtgtgaggacgacgtagaattctgcactgagtccctggcgtggctctaaaacagtcaagtgcagtgacggtcttaagtgtagaaaacactcgactttccagatcttctaggaaccttcaaaatacacagaaatgtgtagtgaaaccttaccctactgtgtcgccgtcagtttacttttacaacttttgactcagtttccctttctgtcccctagtaccctcaggtgactacagatgtgttaacacccagcatgttccggtaggagactttctggatggggaagatttccaggtaaaggaccaccctgattcccttcgtggctatagcctgctgcctgcccttccatgggctgccgcagacttcctgatggccactgctgccttcctccttctccttttttgcattgattgattggttccttatctatgctatttttctatgattttttggtattatttttaagtattcatacgtgtacactgttaatgatataaaacatgcatggagtggtaagccctaacttcaggataaggcttaccctctgaggagggaggctggggcacttggccaatgtcaattctgtctccaatgttttaaacttttttccccaatatgtatctcttaaaaagaagaatttctttccttttcatttctttctttctttctttttttttaagacagagtctcgctctgttgcccaggttggagtgcagtccagctcactgcactgcgatctcagctcactgcaacctccacctcccaggtttaagtgattctcctgcctcaatctcccaagtagctgggattacaggtgcgcaccaccatgccctgctaatttttgtattttttagtagagtcaggatttcgccatgttggccaggctggtcttgaactcctgacgtcagttgacccgccagccttagcctcccaaaatgcttgggattacaggtgtgagccaccacaccgggccagaactccttatttttatttaaaacataactgtagtgtcacttttgctcttaaaacagtagttaaggctagatgtggtagctcactgaaatcccagcactttgggaggccaaggtggaaagatcgcttgagcccaggagtttgagaaccagcctgggcaacacagcgagaaccccatctctaccaaaaaaaaaaaaaaaaaaaatatatatatatatatatatatatatataaaatttacatttttttttttagccaggcatggtggcacatgcctgtagttccagccacttggtgggctgaggcaggatcacttgagctcaggaatttgaggccatagtgagttgtgattatgccactgcactctggcctagacgacagagcaagaccctgtctcaaaaaacaaaacaaagaacaacaacaaaaacaacaacaaaattaccaagagctccccgccagccaaaacaaaaaaacatcctcaaacagtagttaagtccttcatatcaaatatccaactagtgttcagtattccaattataattggaatatatttatatagagagatagtaacaaaaccaaatttgtttggcatttcaaatgtttgaagatgccagaagtttaatctagagtagtggttctcaaaatttggtcctaagaccagcagcatcagcatcacttgcgaacttgccagagacggaaatcattagaccctacagctgactgaatcagtgattctgggagtgtagtgttttaacaagccttccaggtgattccaatgcgtggtagagttaagagaactactggtctaaaggaaagcaaaattttatgctctttacacaccctattttgcatttgtctttgtgtttaacatcacagcatgtgctgagatgatgtgcttacacacttgggtcaccaagatggagtccagccttctattgccttctagggcctgtgccaagccaccttccatttctagctgtggagggcagcacacacagactgctgctgcattaggaagtgtgtaggagagcagggaatggaagtggtgatcatgattttctggagcaggacagagagagtgaaaatagagatctgggtgtatttgatggggaaatcaccttcttttttaaaaagcatacttacaaagttgtggtcctcaactgctggcagcacagtcgaatcactccagagggctttgaaagacactggtgccctggcctgaccccaggaaattctggtttcaattgggttgtgggtggggttaggggtggtcccagcaacagcaagatttaaaggtgcttcaggtgattctaattgcagtcatggtccaaaaccactgggaaagacttgtgtttggtttgggattcagttgggaaactaagatgaaaatatcctgcaagaatgcactcgggggtcttacccttcaaacgagtaagtactttgcaaactctggttcttaagccattagcgacctggtttgggggagtttttttctgccatctctagctttttttgttgttttgagctactgctgactctttctgcagtatttccggctagtttttgtctaggtaaggagatttgaatatggtttgtctactcacttgtaggtgtcttgggcagaatatgcattttttaaagtatacaaatgacaccctctttcacctccttcattctctttcctgtaaatggctatagctccaggaaatgaactcgagagactgatactacattttgcaatgtgaggctttttaatttttctaagactatcaacgagaccagagccttccttgcagtctccgaaattatggaaaggaaaggttgggctgtatttgttggttgagtgttgaaatagtccatggaaaaaggaaagggaaacaagttctactactgattttcttggcagagtttatcacctgtcccccccaagtttctggcaagtgtgattagaaattgacttgcaggatttgctcacactggcttcccaagacagtttttgcttgcatgctgctgactagcagtagttaatttgctatctttcacatgtgttatccaaaaatcacagaactcattagaaataaacagcatgggctgggcgcggtggctcatgcctgtgatcccagcactttgggaggccgaggcgggtggatcccgaggtcaggagttcgagaccagcctggccaagatggtaaatccctgtctctactaaaaatacaaaaattagctgggcgtggtggtgggcacctgtaatcccagctacttgggaggctgaggcagagaattgcttgaacccaagaggtagaggtcgcagtgagccgagatcacgccactgcacttcagcctctgcaacagggcgagactctgtctcaaaaaaataaataaaataaacagcatgaatttggttggtcatatttgcaggattagccagatgtaaatctgagttgcacttgggaggtttggtgggcttcatttaaaaacaaatagaaccccagccttgagtagaagcagatttttttaaaaaatgaaatatcttactggaaaacaaaccttatttttccaatagaaaatatggggaagaagtaagctttttttggtgccaatatttattttatttcatgcccttcttgctgatggcagatgtggcagaaataaatacccaatttcattttccaaaatgggaaaaatttaatcaattcaagaatttatttattcttaatttatagcagaggtttgaaacctgactggttaaagtatttaatatgcctcttaggaaaataaacatacatttatgtatttcccaaaccattttgtggaataatcaccacacaatgggttattgaagaggtgtgttggccttgaggctgtctaattcttaggccttttgaaaagtgtttaagagatattgaaaaagttttttttcatgtgattacaatatacgatttgtgtgattggaaaatttctgttttctgttgatatgcaaactcactgccagcaataccaaatattcatatgccacctgcttccttttttttttttttgagatggagtctcgctctgtcacccaggctggcaccatctcggctcactgcaacctccgcctcctgggttcaagcgattcttctgcctcagcctcccgagtagctgggactacaggtgcgagccaccatgcttggctaatttttgtatttttagtagagacctggtgtcaccatattggccaggctggtctcgaactcctagaccttgtgatccacccagccttggcctcccaaagtgctgggattacaggcgtgagccaccatgcccggccatatgtcacctgtttctaatcccaacaaaacctgtactcagaatgaattaaacaaacaaacaaacaaaaaaaacccttacctttgaagaaccaaaaaaggaattcaaattttattgaaactttttgtgtttatccttttagatcacactaaatcagatgagtacacaaatgccaaggaattgactcttacaagtagagatgatgtttcatgcagacacatgagttaaaggtgtgctagaaacttcccatgagctgattttgatcattctttgctctagtacccccaaagcttagcttaatacttaattatatatcatactaccttctctctctctctctctctgtgtgtatgtattattttccaccaaaatggctatttgtaacctgccatagtaaaaggtctgcttattcaagaccaggacaagactttccattgtcttgtctttctgcccatgacaccattcatttttctcttcttcagcattgagatgagatttataatgcatcgtcctaccattttctaggcataaagataatttgcctggttagcttttatttagtgattcaaaagaaatagatgatcagatctggcagcgactgacttttcacgattcattgctgaaggctttattctatgaagacctttgttgctgaaggtatgaaggatgtggtagtaatggaaagtattttactgatcttttatttccttttaaattttttgagacagagtctcgctctgtcatccacgttggagtgtggtagcgtgatctcagctcactgcaacccctgcctcctgggtttaagcacttctcctgcctcagcctcccgagtagctgggactacaggcgtctgccacccatgtctggctaattttgtatttttagtagagacagggtttcaccatattggccaggctggtctcgaactcctgaccttgtgatctgcccacctcgacctcccagaatgctgggattacaggcatgagccactgcgcccggcactgatctttatttctaaagagcttttctccccttgcaggatctttggtgtcaagatactataaaattccagtaaatatggctgcaaggaagggtaaagagaaagaaagagagacaaaataaagtaccagaagcaaatagtcctttccatattcatgtcacgtccgtaagattcaagaaacggatattgaagtggaagaaccagactttctcttcattcctatgatctaattaaatgtattttcacttaaaaaaggataacaatattagatcttaatgggattaacctaactgaaatttatttgactttgccttgaccataaagattatgaaggatccaagtttcattttgtgatggtagtttcaggtctgtaatttttgctacattccattcctgttgctgttctacttaaaatatcagttatcggccgggtgtggtggctcacacctgtaatcccagcactttgggaggcaggggcgggggtggatcacctgaggtcaggagttcaagaccagcctggccaagatggtgaaaccccatctctactaaaaatataaaaattagctgggcgtggtggcaggtacctgtaatcccagctactcgggaggccgaggcaggagaattgcttgaacccgggaggcggaggtttcagggagcggagattgtgccactgcactccagcctgggggacatgagtgagactttgtctcaaaaaaaaaaaaaatcagttatcagacaaaacttgtgtgttgtatggcggagacttagaatagactagagtttgagtatttttcttttttaagttttggagatgttaactcttactgtttttatactgaagtgaagtctgttaagttaaagaggaacctttcttttattttctgtgttttttggtttcttttttcttttttttggtcagtttcttagggtttctcttgcttggaattatctagatgaactgtttcttgagtccagcttcagactagagtttgagtatttttccctttaactttttgagatgattaactcttactctgtttttatactgaaaggaatctctttagctaaaataaagaggaatctttcttttattttctgtgtttcttggtttcgtgtgtgtgtgtatgtgtgtgtgtgttgcgccagtttcttagggtttctcttgcttggaattgatgaaatgcttctgagtccaacttcattgataactacctactcctccctttcctttgtatgtgttacaggatttcagtaatacatattttttattgtggtgaagtatacataatataaaattatcatttaagccatttttaaatgtacacttcattggcattaaatacactcatattgttgtgtgcaattgttgccactattatcttttgaaagttttcatcttccctctcactcataagtgggagttgaacaatgagaacacatgagaggggaacatcacactccggggcctgtccggtggggtgggggtaggggagggatagcattaggagaaacacctaatgtagatgacaggttgatgggtgcagcaaaccaccatggcacgtgtatacctgtgtaacaaacctgcacgttctgcacacgtaccccagaacttaaagtataataaaaaaaaaaataaagtttttatcttcccaacctgaaactctgtacccattaaacactaactcttcattcttccctcccctcagcccctggctaccaccattccactttctgtgtctatgaatttgactgctctaggtacctcatgtaagtggaatcatgcggtatttttcttcttgtgactgattttttccacttagcgtaatgtcttcaaaattcatccatgttttggcatatgtcagaatttccttcctttgtaaggctgaataatattccattgtatgtatatatcacattttgtttattcattcatctgttgatggacacgggttacttccacctgttggctattgtgaatacctctatgaacatgggtatgtaaatatctggtcaagtccccatgaaaagtgtctttgtgattaattattattattttttgagacagagttttgctcttgttgcccaggctggagtgcaatggcacaatctcggctcactgcaacctctgcctcctgggttcaagtgattctcctgcctcagcctcccaagtagctgggattacaggcttgtgccaccacacctggctaattttgtatttttttaatagatatgaggtttcaccatgttggtcagactggtctggaactcctaacctcaagtgatccacccatctcagcctcccaaagtgctgggatcataggtgtgaatcactgcgcccagctgtctttgtgattaagtaaaacaccctgatgctgatttagataccgatttagcaactttaaatattatggtattaataataaccattaattaataataaagctttttatgtaaagtgattggaatgagtttgtcaggtatgagttataaaggcctccagaagcatatggggaagttaaacacatggcaatgagaactcttttaagaatgcacctggctggataccatgacctgcttaagatctgtgttttagaatcgtcattgaaaagaaatgttgcagccaggcacaatggctcatccctgtaatcccagcactttgggaggccgaggtgggcagatcacttaaggccaggaattcaagaccagcctggccaagatggtaaaaccccctctctactaaaaatacaaaaattagctggacgtggtggtgggcacctgtgatcccagctactcaggaggctgaggcaggagaatcacttaaacccgggaagcggagtttgcagtgagccgagatcacgccactgcacctcagcctgggtaagaaagtgagactctgtctcaaaaaaaaaaaaagaaaagaaaagttgctgcatgacagacatctggaaaagttaaactataaaatgacttgcaaaattaacatcctctggttaaccaaaatcctcaaagcagagggcaatctggtgtttgggatgtgagtcctctcctctagagggtcaggcttatcgcttggaaagcagattagcactgctagcacacaccacctaaagatacgcttcccatcctcacattcttggtgttttcagtgtttcgtcttatctgttgtattctttcaaattccttaagcttaaccacagacaagctccttcttggagttaacactatttatcaagtatataccgtatgaccaagctatatattactgctagctgatgtttattcatacttggcccatgttaggcactgttcagaagccctttacatgtgttgtaagttatttaattattccttatctctgtttgtttgatatcagcaaaacttcattttacaaatgatgaaaacgagacacagagaagttatcttgttcaaggacataggaattggcaaagccagaacttgaccccaggggtctgacttcagaccatgtatctttttcttttcttgttttctttttcttagagacagggtctcgctgtgttgcccaggctggagtgcagagcaatcttggctcactgtagcctcaaacttctgggctcaagatatcctcttgcctcagcctcccgagtaggtgtgtgccaccacacctagctaattttttttttaaataatttttttgtagacatggggtcttgctatgttgtccaggctggccttgaactcctgacctcgagcagtcctcctgccttggcctcccaaagtgttggaattataggcacgagccactgcacctggcccccatttacctttgactgccatggcatgctgacctgcattttactgttgatcaaacttatgaaaacactctctagaggatgaattctctttctttctttctttctttccttccttccttccttccttccttccttccttccttccttccttccttctttttctttctttctttctttttttttttgagacagagactcactctgtcacccaggctggagagcagtggcatgatcttggcccactgcaaactttgcctcctgggttcaagtgattcttctgcctcagccttctgagtagctgagattacagctgtgtgtcatcacacccggctaattttttatgtattttttgtagagacggggcttcaccattttggccaggctggtctcgaactcctgacctcaaatgatctgcccgcttaggcctcccaaagtgctgggattacaggcgtgagccaccgtgcctggcctctagaggacaaatctttttaaggtaaataacagagcttttaaagtcaggagttctctgtgtctctctaggaacccatgctgtattaaatggccacaaagtagtttggaagtttagcatcaaaggactaaggtttcttctgaacacagtgccctttattccactttttaaggtaaacacacttcaaagaaaaggaaattttaaaaagccatgcttttttaaggaatgtaatatattttttagaacggtattatcactctttatgaattcatatttggcaaagaattttctggaaatattaggaatcagccttactcagaaatttggtgttaaaggtttgtaaagaatatctacttatgcccattcataattaacagggattcttctttttcttttaaggttaaaaaaatttttctttttaattatttcagctttattcaggttgaataagggcattccagccaagcaaagtaaggtgaggggtgagaggggtttcaggcggagaaaaaaaacacgtaaaaggacaccaagttgtagcatggtctggccagcgaactttaaataggagggaagtccattatcatggaaggagcaggggcttcgggaaaggtttaaaaaattaattattcttgagttttggttttaccctctgtgaaaagaggtaattgttgctcttttgaggattagaaataattttatgtttgttttttgcttttgttttttttttttgaggcaaggtctcactcttgtcacccaggctggagtgcagtggtgcgatcacagctcactgcagcctcaaactcccaggctgacacaatcctcctgcctcagcttcccaagtaatgaggactacaggcatatgccaccatgctcagctaatttttaaaatttttttgtagagatggtgtcttggctatgttgcccgggttggtctagaactcctggccttatgcaatcctcccacttcggcctcccatattattgggattatatcagtacaggtttgagccactgtgcctggccagataatgtatttaagttgttcagcaaaggacctgacacgcaggtttccacattgatattatcattatgttgctatcagttttttctttttgacttttgatttgttttcctgaataatattacattacatggttcaaaacccaaaaagtgtaatgttctctctttcgtctttgtgcctcatctgtcaagtcccttcttccctgtccctgcaggtaaccactgtcctgtttctgatgtagcctgcattgtccactgatgctctgtgggaatatgagtatctcttctgtatttcctgcttttacacaaaaggtagcatattgtacgcatgcttcagtgtcttccttttggttttcacttaactatacatcttagaaatcttcccatatcagtttataaggggcttcctcttataagcgccatatatatatacacacatatatatatacacacatatataaatatatatatacatacacatatataatatatatacacatatatatatacacacatatataaatatatatatatacatatatatgtgtgtgtgtgtatatatatatatatatatttttttttttttttttttttttggacagagtctcactctgttgctcaggctggagtgcagtggcgcgatcttggctcactgcaacatccgcctcccaggttcaagcgattctcccgcctcagccttccaagtaactgggattacaggtgtccgccactgtgcccagctaatttatttttatattttaagattcaggtggccaggcacagtggctcatgcctgtaatcccagcactttgggaggccgagatggggagataacctgaggtcaggagttcaagaccatcctggccgaggtggtgaaacctcgtctctaccaaaataaaataaaataattagccaggcatggtggctgacacctgtaatcccagctacttgggaggctgaggcaggagaatttcttgaacctgggaggccgaggttgcagtgaaccaagatcatgccattgcacttcagcctgggagacaagaacaaaactcttgtctcaaaaaaaaaaaaagattcacaggtagttgcagtatagtccagacagttcccatgtgccttcactcagcatccaccaatgtaacaccttacataaccttagtacatagtcaaaactaggaaattggctgggtgtggtggctcacgcctgtaatcctagcactttgggaggccgaggcgggcggattgcctgagttcaggagttcgagaacagcctgggcaacacggtgaaaccccgtctctaataaaatacaaaaaattagctgggcgtggtggcatgtgcctgtagtctcagctactcaggaggctgaggtaggagaattgcttgaacccaggaggcagaggttgcagtgagccgagatcatgccactgcactccaccttgggtgacagagcgagactccatctcaaaacaaaaaaataaacaaaaacaaaacaaaaaaaaaaccactaggaaattgacattggcataatgccattaactcaggtaagagaccttatttagatttaaccgatttttacatgcattctttttttggaagggggtgtagatttttctttttttcttttttttttttccccttttctgtttggcttatgtaatgtagcatgtttttaaggttcatgcaaattacagcatgtttcagagcttcattcctttttatgtctgaattaatattcattatacatatatactatattttgcttatccattcatcagttgatagacacttgggttggttccacctttaactagtgtgaataatgctgctatgaacattggtggacaagtttctgtttgagtctctgttttcaagtattttgagtatataccactgaggagtgaaattgctgggtcatctagtaagtctatatttaagtttttgaggaaccaccaaactattttccacagcagcccaccattttatattcccaccagcaatgcccaagggttccaacttatccacattctaactaacactggttttctttcttttttttttttttttttttacagtttcaactattaattcaacaccttagtgaacacctgctcagtgcgggcattattatgtgttaactagaggttttttttaaattttttttatttttattttttttattgatcattcttgggtgtttttgggggatttggccgggtcacaggacaatagtggagggaaggtcagcagataaacaagtgaacaaaggtctctggttttcctaggcagaggaccctgcggccttccgcagtgtttgtgtccctgggtacttgagattagggagtggtgatgactcttaaggagcatgctgccttaaagcatctgtttaacaaagcacatcttgcaccgcccttaatccattcaaccctgagtggatacagcacatgtttcagagagcacagggttgggggtaaggtcactgatcaacaggatcccaaggcagaagaatttttcttagtacagaacaaaatgaaaagtctcccatgtctacctctttctacacagacacggcaaccatccgatttctcaatcttttccccacctttcccccctttctattccacaaaactgccactgtcatcatggcccgttctcaatgagctgttgggtacacctcccagacagggtggtggctgggcagaggggctcctcacttcccagtaggcgcggccgggcagaggcgcccctcacctcccggacggggcggcaggccggacggggggctgaccccccccacctccctcccggacggggcggctggccgggcagaggggctcctcacttcccagtaggcgcggccgggcagaggcgcccctcacctcccagacggggcggctggccgggtggggggctgacccccccacctccctcccggacgcggcggctggccgggcggggggctgactcccccacctccctcccggacggggcggctggccgggcagagtggctcctcacttcccataggggcggccgggcagaggcgcccctcacctcctggacgggcggctggccgggcggggggctgacccccccatctccctctctccccgacggggcggctagccgggcggggggctgacccccccacctccctcccggacggggtggctggctgggcagagtggctcctcacttcccagtaggggcggccgggcagaggcacccctcacctcctggacggggcggctggccgggcggggggctgacccccccacctccctctctcccggacggggcggctagccgggcggggggctgacccccccacctcccgcccggagggagcggctggccgggcagagaggctcctcacttcccagtaggggcggccgggcagaggcgcccctcacctgccggatggggcggctggccgggcggggggctgacccccccacctccctcctggactgagcggctggccgggcagaggggctcctcacttcccagtaggggcggccgggcagaggcgcccctcacctgccggacggggcggctggccgggcggggggctgacccccccacctccctcccggacgaggtggctgccggtaggagacgctcctcacttcccagacggggtggctgctgggcggaggggctcctcacttctcagacagggcggttgccaggcagagggtctcctcacttctcagacggggcggccggacagagatgctcctcacatcccagacggggcggcagggcagaggtgctccccacatctcagatgatgggcggccgggcagagatgctcctcacttcccagatgtgatggcggccgggaagaggcgctcctcacttcctagatgggatggcggccgggcagagacgctcctcactttccagactgggcagccaggcagaggggctcctcacatcccagacgatgggcggccaggcggagacgctcctcacttcccagacggggtggcggccgggcagaggctgcaatctcggcactttgggaggccaaggcaggctgctgggaggtggaggttgtagcgagccgagatcacgccactgcactccagcctgggcaccattgagcactgagtgaacgagactccgtctgcaatcccggcacctcgggaggccgaggctggcgggtcactcgcggttaggagctggagaccagcccagccaacacagcgaatccccgtctccaccaaaaaaatacgaaaacccgtcaggcgtggcggtgcgcgcctgcaatcgcaggcactcggcaagctgaggcaggagaatcaggcagggaggttgcagtgagccgagatggcagcagtactgtccagcttcggctcggcatcagagggagaccgtggaaagagagggagagggagaccgtggggagagggagagggagagggaggggggtgtagatttttctacaaaattttgttatccttgtagattcaagtagccatcactgcaattgggatacagaactgttccagcatgaccaagaaattcccttctgctactttttgtttgcatttttgagacaggatcttgctctgtcgcccagcctagagtgcaatggtgcgatcatggctcgctgcagcctgcagcctggaactgctggactcaagcaatcctcccatgtcagcctcccaaatagctagggctactgccaccacattcatctaattttctattttttatagagacagagtcttgctatgttgcccaggctgttcttgaactcctggcctcaagtgatcctcctgtctcagcctcccaatgtgctgagattacaggtgtgagccaccacacctgatcctcttctgctgctggttaatagttacacgcttttcctaatgctaatcactgacaactactgattaatccacacattttatgtgtgcctacttttagaaaacccagccaaacatcataccttcctaggtgcaagaatcctatttccaacttttaaaattccctatgggcctgagtacttaatgggtgcttaataatgactccttgaaacactaagtaaaaaaaaaaaaatagaactcagagctgaaaaacatatgaatcaagataatttacaaaacaataaaaaagttaagactactttcttaaatatgagctcttcaggttgactaagtgacgatttataatttcttttcagggagtcagtacacctaaaagtgctaatgatctgaaataaagcttctctaaaacataactttttttcaaagcaattctactaatatcttttcctttaatgacctctgtgatgttggtatgatgaagtttgttatccctagctgatagagtaggacactgagactaagagaggaaagaaaggccaggcgtggtggctcacacctgtaatcccagtactttgggaagccgaggcgggtggatcacctgaggtcaggagttcgagaccaacctggccaacatggtgaaatccccatctctactaaaaaaaaaaaaaaaaaaaagtacaaaaattaactgggcatggtggcaggtgcctataatcccagctacttgggagggtgacactggagaatcgcttgaacccaggaggtggaggttgcagtgagccgaggtcgcaccactgcgttccagcctgggtgacagagtgagactctgtctaaaaaaaaaaataagaagaaaaaataataaaaaaagagaagaaagaaagctaacagtgagtaccaaagatggctatttcagtaggttcttctaacagccatgtgaggtggacgttgttatttccatttcaaagaagagaatgtggactctctgaggttcaataacttgcctgtggtcagtttatatcagagacaagattccagatcccacattctcaccctcactccacaatgaatgttttcctcaagaataaaagtcaaataattcaggccaggcatagtggcttatgtctgtaatcccagtactttggaaggctgaggcaggattgcttgagcccaggagtttgagaccagcctgagcaatagagtgagatcttgtctccacaaaaaataagacaaattagttgggtgtggtggcacacgcctgtagtcccagctactccggacacaggaggattgattgagcctgggaggtagaggccgcagtgagctgtgatcacacgccactgcacttcagctcaggtaacagagagagaccctgtcttaaaaaataaagacagggtctttaaataagtaagttacgtaagaattcaggttgcttgtctctgccccctgtttttaaaaaagtgtcagtggtagtggtgttttagtacattacctacttataaaggataatatactataatagttcataaaagtggttgagggctttgaagttagccagacttctctccaagtaccagctcggccaccctctagctttgtggactatggatgtgttgttttatttattgaagcctcgtggactcatctataaaatagagaacctggttgttctccatcaggttgagggaattcaatggaatgaaacctggaaagcacttagcagagtgcctggtatgtaccagtcattcaataaacagcagccattagtgtatatgaatctttcattttatggactttccactgctgagatcaaaatacaagcaaataaatacttagattgtgttatgtgcaaagccacatactattgttggaattaatggagggacacagtgattttttttttggacttaaaaatacttgttgaaatttagaatgccatcttgtctataaatttttttaattcatcagttaagttactctattttcaaattgaaaggctgccaattttttttttttttcaaaattcctgattttggttttaaatgagtggattttccaaaaatgaaggatttgaattagatcttactaaggtgctggtgaccccatctctctttcatttacctgacatattcatttcctgagaaatggtcaggtggagaggcagctgatacggatttttgtgtgtgtggtgggagtgggggtgctcgctgcatacagcttttgctaatattaaaagataattgcgtacactcaacaggcattgcaattgcagtcacattctcctgtcgtccagggaatggcactcggctctgcctagcatgatgtttgtttgtttagggcgagactaatggttgaggtatttgtgagaagcatttgtatcatagtgacagactgcagggcgctctttcctgtgttacagattgctaggaaattggataggacctcctgagatattctatcccatgccttccctcaagacaagcctgtgacatacatgagaatagcggtgggggtggggtggagagtcagggaccctgtgggagtgagctgcgtatcccatacggcctggaacgtcctgtattcttaggaacagcctgcacatagcaatatagagcatccttggcactgcatggaaaatggactgatactctcttgagggcctcttggaaatctctaaagtgaagaaagaggaagaaagacagctttgcttgacagttctcatcagaagcctaaatgatacagtgcaatgctgaaagttggaggctggattggtgaggctggagtcagatgggggtaggatagtggttctcaactctagatgcaaattataacctcctggtggcccattgaagggtgttgtctttaacctcccagatgattctcctgtacatctgggattaagagccactgagatccacaccctgatgaaacagcaaagcaaaacaccaacaagggcaaataaaaaactggaaacaacccacaatggttgaataggtcccgtatttcctaatgaggccactggccttcccagttggctgaaatttctcttttcacattctgaaaatgggtccagtgggcaaatatcctgttgatagctgagtccacccaactgcattttgtagcatgtgggatgtggctactctgtttgctccagagtgagaagcaggaagttcactttggaatcattatttaaaggctctctgggacctcaggctttaaacagaaatatatagtgcattctaaggggtattgtgtttaactattaataattgttcctttcatatgagagatattactgtgtagggtggacagaaaccctctgagaacaccatgtgtttcatgtttaccatgaataagtctttccctctcaaaaatcataatttggaaatcattcttttcctgtgaaaaccagaaagttgctttttttttccttctgttctcttaataggaacagtaataaaagttcccattgggaaaagctttcattttgacgtggtgcagtcagtggcggtctctctaggaaagccctggaaaaggcattgctgcatttttctctgttgcatgtgtcttttctccccttagtgtcatgtccaagcatgatgtcactcacatgtcatctgcacatcccaggtccctttgcaaatggaaactacagaagaaacaaaaattgattgagtgcataaaatctatttcaggaacatcctaaagggtctatctcagaagcactgagttccaaaggatttgctgacatttattgttctgcttcagattattaaatgtctttctgatcacatgatgccatgttttgcatagtgtgacatatctgtcctgttttaaattcataggaattggcaacaagctcatttcactggtgggtttgctgaagcattatcacaagacagtcagaatgactgatgagtgctcttcaggtagggaaatgctgccagcctggtttgtattttgtcttaccaagagttttgctccttaattttctatttcagttatgaataatcccttttcatgctagtagccataatcacattataaaggatttaaaatttgtcatttcctggtagtatttcttacagcgtaagcatttttggttcatgtacgattattctccttttattttattttttaacatgaggagatatcataggccaatattaagatttcctaattttaatgttaagagctaagcacatattctggtcaagtagagaagttaaagagtgaccagactttatctgaaatggtaggaataggagacatgctgttccatgatgtaccttgacacggtttttaaaaagcaacatttatgcctgagaatctaatgagtttggttaaaaggagatctagtaagccaatattcattcatttctgcctctccccctagattcctccaatcatgtttgtttctgtgtcttcttttttttttttttttgagatggagtctcgctctgttgtccaggctggagtgcagtggcgcgatctcggctcactgcaagctccacctcctgggttcacgccattctcctgcctcagcctcccgagtagctgggactacaggctcctgccaccatgtgtggctaatttttttttgtattttagtagagacggggtttcaccgtgttagccaggatggtctcgatctcctaaccttgtgatccacccgcctcggcttcccagagtgctgggattacaggtgtgagccactgtgcccagacctgtttctgtgtcttcttaaatttagagaccgttagctttgtgtgtgtgtgtgtgtgtgtgtgtgtgtgtgtgtgagagatggagtctcactaggttgcccaggctggagtgcagtgcctattcacgggtgtgattatggcactctacaaccttgaccttctggcctcaagtgatcttccctcctcagcctcctgagtagctgggattaccagtgtgtgctaccatgctcagcaatctttaaatttttttggtagctatttttttttttttttgagacagagtctcactgtgttgcccaggctggagtgcagtggcgtgatcttggcccactgcaacctcctgggttcaagtgattctcctgcctcagtctcccaagtagctgggactataggtgcctgctaccatgcccagctaattttttttttgtatttttagtagagatgaggtttcactatattggccaggctggtcttgaactcctgacctcaggtgatctgctcacctcggcctcctaaagtgctgggattacaggcgtgagccaccgcgcccggccttggtagccattcttgtagagcactacacatctgtctctgactgaacaggcccagagatgtggacaagttggtctcatagaaacttattttcaagttcgtcatgtgagaagcccaagggagtggaggacagccgtatatctggaaagtgaaaacacgtagctgtactttttgggcaaacataaaactacatttgaatatagtaaattcttagataactgtgagccatggccaaccaaaagcatggcacatacaaggaacatgtgccgggtggaccttgaatgatcacatttaactttgtgtctgtagaacttgtgtttcattttatttttcccttccaaagttgttttttgtttgtttgtttgttttgttttttttgagacagagttttgctcttgtcatccaggctggagtgcagtggtacaacctcagctcactgcagcctccacttgccaggttcaagtgattctcctgcctcagcgtcccaagtagctgggattacagatacgtgccaccacgcctggctaatatgtttgtatttttagtaaagatggagtttcactgtgttggccagcctggtctcgaactcctaacctcagttgatcccccctgcctcagcctcccaaagtgctgggattacaggcgtgagccactgtgcccagcccctctcaaagtattttgagtggaacattgttcatagaagaagttacatcttttctggggttaggatgtacatttcattaggtccttccagatacttaaaaggttctccgcatgctggtagaatatgtggtaattctcagttgatgaattatatgattgtggcagtttgaatacgtagatattatagatgttgtaaatggttttgtcaggcagagtgagctactattttaaactagcaagaatattcactttaacaggcagtttcttattggtggctaaggctgttacagctatgtcagtactttttagaaaagataagctgaaagtattactcatttatatttataaatctaatcctatgcataaccaatgttgagcattccaagcattaatcccgtggtacttggcgtataaaggccatgtggagctagacctggaaacacaccgtatactcatctctttttgaatctatgggtatttttccccctttgggagttcatttttcctggttgttctgggggctcactgagatgtaagagtttcagattctggtttctttgcggaaagacagcagagttcaaattaggctcatagacattcttgcctagttgccaataattccttacacagtgacgatggaggtaaaagaacactgagcaagccaagagcagggaggggaagagaggaatctcaaagaattcagatgggcctacaaggcaattaatgtcaatacatttcctgtttcccacaacttggttagaggtggagcttgcagtgacctgagatcgcgctactgtcctctagcccgggagacagagtgagactctgtcccccaacaaaaaaagtacaatttttggccaggcgcggtggctcacgcctacaatcccagcactttgggaggccgagacgggcagatcacccgaggtcgggagttcgagaccagcctgaccaacatggagaaaccctgtctctactaaaaatacaaaattagcctggcgtagtggcacatacctgtaatcccagctactcgggaggctgaggcaggagaattgctataacccgggaggcggaggttgcagtgagccgagatcgtgccattgcactccagcctgggcaataagagtgaaactcagtctgaaaaaaattaaaataaaaagtacaatttttatactaacgatggctatgttatatatatatatatatatttatataatttttttagacggagtttcgctcttgttgcccaggctggagtgtaatggcacgttctcagctcactgaaacctctgcctcccgggttcaagcgattctcctgcctcagcctcccgagtagctgggattacaggcatacgccaccacgcccggctaattttgtattttttagtagagacggggtttctacatgttggtcaggctggtcgcgaactctcaaccttgggtgatccgcccgccttggcctcccagagtgctgggattacaggcgtgagccactgtgcccggcctttttaaaaaaacttttttttagatggagtttcactcttgttgctcaggagttgcacctggagtgcagtggtgcaatctcggctcactgcaacctctgtctcctgggttcaagtgattctcctgtttcagcctcctgagtagctgggatgataggagcatgccaccacgtccagctaattcttgtatttttagtagagatggggtttcatcatattggacaggctgatcttgaactcctgacctcagatgatccacctgcctcagcctcccaaagtggtgggattacaggcgtgagccaccacgcctggccagttatatctttttacctgacgaaaactgtaaacaacttttggcattctacgcctttcaaaacaattcaacttttttttttttttttaaatttaaatcatggaattcagatgagccttcaaggcaattaatgtgagttaggtcatattgaacctgtgtttagagatacgtaaggactttgattagtgcccatcttgtgccagcttgtatttcccgtttagagttggcaaaggacaacatgttgtagcattggtcttagatgaattattggtcttaggttttattacctaaaacctggatttatttatttttaacaattaaccgaactgtgacatcaatatcagttcccattctttggtcacagtttagtcatttgagaaagggttgagaggctttttaggagaaaaattcatgcacatgcagagtctactctaacacagaaccacctcacattgagttttgaagctaaatgatctttccacggtaattataattaagaccagtatattacaaagaatcagtttaccaaaaagaactttaaaaaccctgaagaactaggccacatgcctagttcacacctgtaatcccagcactttgggaggccaaggcaggcggatcacctgaggtcaggagttcgagaccagactgaccaacatggtgaaaccccatctctactaaaaatacaaaattatctgggcatggtggtgcatgcctgtaatcccagctatttgggaggctgaggctggagaatagcttgaatctgggattctgggaggtggaggttgcaataagccaagatcatgccattgcacaccagcctgggcaacaagagtgaaactgtctaaaaaaaaaaaggccagctggggactgaggagcaatttggggttatgttgatcttcttgggctggcagagtctctgggcaacagagttcatgcagctggattaaggttgcaccctgtagtttctctttccacttggacagaaatggaggtgttgggcctataatctggtccttgcccaaagccaagttagtgttatgcagtatttctgttttgaacacatttgtccttattttcccttttctcttcttgcccactagtagggaaaaaaataatccgagttatttgcttgggtggagccactctttgattgcaatgccccagggttttctaggttaacaaattggagctttccagccggctgagtaggggtgggctacagctcttctaccctgccttctcatattcctttccttccttcccactccagaagagaaagcagaggcctggttgctgagtgtggaggacatgctgttttggggagcctagggactgttgaccacagctgtgtctttttgtggagaggagtttcagcatattcttggaaggtgtgggatgcaaaatatacaccttttagttgagtacttttgtaatgcagccctgtgtgccttagagctcagaaacactggggaaggagggtggggtagttggacgtgagggtgaggatgggtggggaggaggcgtaaatctcctgggctccatcagggcaggaatcaacatcccaggaagcagagacaaaccctttggcttctgtccttgtgctccatgggtgaatcagaaaggaccgtggtcagttatgtgggagtgcagaaagccagccagccagcacgattcgccttggaggaatgacttctcatgctgccacctcctgcttctctgctgggggtgtggaagaaacagtatgggatgtgggcggttttctgctgcagtttattgaacaaacagctgccctcctccatttctctccctcccttacccccatcccgccacatccttcttcctggggcagggtataaccatgctgtaaactttggtagtgggagaatcttgccaatactttctgaaacagcaacttttttttttttttttggcttggaactgttagttcaaagctggaaacagagtaaataaaatttgatctagtcattctagaaatgatttgtatcagtccagaaaatggccagagtccagtagtttgaatctaaaagagctgaactaagataaggtaaggagccagttttttaacctggcaaccacatgccccaacttgaaagcctgtttgctgctcttcttttgttatcataacctcttgaacagaatacgccatttgaaacaacagtaaacgcttctcagtggataagtttatgacctagtttttgaccaagagcacttacgggattgaacggcgcggggaagagcaaaggaccttggacaccattcgccaggaagttctgtgcaaaccgggagctcggggctcattagaagccggagacattaagcagcagctgttttatggtgtgaacttttgcacagaggatttcaagaggctcattctcctcggaagtctgtttgcaaagtggttctttcttggctgttgcttcatccttcttcagaggcctattttcactccgagtgtgagcatttcatgccaaacccagccatgaccttgtggctgctgagctgcccgcatggcctgaccccacaggtcttgggatggtgtgcgcagcagagctaaaccaggaggggtgtctatctcagctctgctggctctggggctggtcgcaccctgcagacttggagttgaggaccagaaacgcagggggatgttacaaaaggagcgtgatcctgcagcccctttcctctctcataaactggatgcttggccctccatcctctctccagcttttttcgtgaactcttgcacccactctcagccttcccctctgcactctattaaatctgaacttgagttcttgttccgcttaacatgggaagatatgcttttcaaggagaagtatgagaaatgaattaaaatatatctacagtttactaatggtggtataggccttagaatatggttaacgaaatttcttcctcctttcttttctcttccttctctccttccttcctttgaaattgtttttctttttatcctcccacttgtatttgcttttacagtgaaactactcaacaaagcatacttagatgtgttttagaaagaaaaatcattctctctaaagagcactattaaaggcatgatgcagtctgggatccatgagaatataaaacacagaatttaaagggtcaaagttaacgttaattatctattaacatgattaatattagtaataaaacttactgaaatgattgggtcccatttttatatttcacatttcttttttagtaatgtacatcttgtatatcacaaaagatttacctatttctgttcttttatcattgacacatgaaatctatatacaaaaagatttttaaatggggggaggcaacattcctatcatctaatggagaaataattatatacatgaaagtgcatgagaaaataatattcaacattacaactgtttaggcagtgttttacatttaaatttaaatttaatttacatttgaaaatgtaaaaggaaaatacaagactgcatgtgcaatattatctatgcaaaagtacactgtcgagtgtttagaaggaaccatgccagagagtttatagtagttgaatatggattatgaacagttacttttatttttaattttttgggggacagaatcttgctctgtcacccaggctggagtgcagtggtgcgatctcagctcactgcagcctctgcctcctgggttcaagtgattctcctgcctcagcctcctgagtagctgggattacaggtgcccaccaccacacccggctaatttttgtatttttagtacagacaggatttcaccatattggccaggctggtctcaaactcctgacctcaagtgatccacccgccttggcctcccgaagtgctgggactacaggcgtgagctgccacgccagattatgagcatttaaaattgttttctttttacattctctttcctcagttttccacaatgagcaagcaaatcttttataattagaacatctaacctttattaaaatactttaataaggatatcttcctctctgttctacctatttttgtgacgtggttcatattaatataggaattacaaaacttcaaaaagttattcttgttttaggtctgttcatatttggaaggctttcaattttatgtatacctcaccccacttggggccagcctgggagctgtgggtttcctcccagagagctctacttagagaacagggcatttcttgcctactgtggtagtctccttcatcttctcctttttaaataattattttgctgggtgcaggggctcacacctgtagtttcagcactttagaggctgaggtaggaggatggcttgagcccaggagttctggaccagcctgggcaacatagtgagaccttgtctctattaaaacttttaaaatggccaggcacagtggctcacgcctgtaatcccagccagcattttgggaggccaaggcgggaagatgacctgaggtcaggagttcaagaccagcctgaccaacatggagaaaccccgtctctactaaaaatacaaaattctcatggcatggtggtatatgcctgtcatcccagctactcgggaggctgaggcaggagaattgcttgaacccaggaggcagaggttgcagtgagctgagatcatgccattgcactctagcctgggcaacaagagtgaaactccatctcaaaaaagaaaataaaagaaaaaaacattaaaattagttgagcctggtggcacgtgcctctagttccacctactcaggaggctgaggtgggaacattgcttgagtccaggaggttgaggctgcagcgagccgtgctcacactattgcactccagcctgggcgccagagagaccctgtcttaaaaaataaataagtaaatacataaataaaaattaataaataaataagtaaatctctcactgcattgctcagtgattctttttctttgacttaaaggacatactcttttaccctgctcatattatgtttctggtttttttccttctgggattttcctctcaccccattgtgttgtttctgcccgtgttcctttttcctccactgaggagatgatccctgaattactttattgaggatgactcacaatcagggagcaacaagtcgccaataaagttgacagtgcttcttagggaccccatttgtggcaataaaatttgcaactaggcaagagaaatttcaatttgcaatacagtgtttttaattgttcagatacgtctttaaaatacagtatggcaagttaaagtcacttacgaactgctgagatttttcttaccaaaaaaggtgctgcctagaaagaacttttcagcagtgatgctcagttgttggctcaaacatttgcagtctgaaatgatgaaactgtgcttgacacatagtacagagggacatgtttcttccatatcttgattgggagaacctttgaactagaagtggcactacccaggttggtgaattgagtagatcctttaggtactggtgcattttagccctggatccaccttttatgtgctacataatagaaatgaaatgaaaactatttaactttcccttgctgcctccacttttttttgtttgtttgtttctgagacagagtctcactctgtcacccaggctggagtgcggtggcacaatcacagctcattgcagcctcaactgcctggctcagacaatcctcctccccggcttttttttttttttttttgatggaatctcactctgtaacccaggctggagtgcagtggcacgatatcagctcaccgtaacctccacctcccaggttcaagcgattctcctgcctcagcctcccgagtagctgggattacaggtgcccgccaccacgcccggctaatttttgtatatttagtagaggcgaggtttcaccattttggccaggctggtcttgaactcctgaccttgtgatccacctgccttggcctcccacagtgctgagattacaggtgtgagccaccgcgcctggccttttttttttttttttttttttttgattctaaaggcacacatattagaaattagaatcttatgctggatagacatctctcccctttttcctgtttgcccagttttcaaaggttagggggaaaacagtctccagagtttttatgctttctcaatttgtaacatgtggtgggatagcatataatatgtcatttatatatttctgtttcttgcctatatttgcatttcttattttcttcctgttctgtcttggtatttccctccatctcctactctatccctaaatcctttccagggtgcaagtcaataaatatctgaaattattgcctatttctgatgtctttcattttgtgtcatgctttataagttcaaaattctgtaacagtgaccatcacttgttactcttgaacatatcagttatttccaaagtattctttgttattggatagtcagtgaatgtctggggctgaatgaagatattctgggtagaatatgcagtactttatacctaaaagtgaattgtaggaacactgaattactaactagatgaatagcatagcaaaccatccgctgaaacctaacaaaagtagctcatttggggagtgagttttggagagtcactctgcctctgttctgtagattgtggcaaataaacatgatatagtatacattgtgtgtgtgtgtgtgtgtgtgtgtgtgtgtaggtgtaatactatctatttgaaatgacaatgtaaaatgagcaggagaccttttaagaccaacaaggagcttcctttatcactactgattctcgtgtcgaaatagagcttagagaatctatgatgaaaacactgtgacccaagttcacactctaaggtcaaacttccaaagttcagcccttgtccttgtgaatcacttaacctttctgtaccttcgttgcctcgtctgtacaatgggaatgctgcatagggcaattgtaaattctccactctgaatgccatccgggtaagtcccacctgactgaacttgtcgatcttagagctgacctgtcccactggaggaagacctcagagaccattccccatacaaaatttggccttgccatcgtctgtcttgggcaagtcgttttaacctctctgacttcagtgacttcttgtgaaatgagatgatggtgctatgtgatcttttcccttaaacctcaagccaaacaataggtccaggcataagtcctgctttttttttttttttttgagacggagtcttgtcctgttgcccaggctggagtgcagtggcctgatctcggctcactgcaacctcctaagtagctgggattacaggcgcccgccaccacgcctggctaattttttttgtatctttagtagagacaagtttcaccatgttggccaggctggtctcgaactcctgacctcgtgatccatcgccttggcctcccaaagtgctgggattacaggtgtgagacactgtgcctggccgtaagtcctgctttctacatgaatagccctgttgaacgagtgagagcgagggacagggacacattgggcatctgcactgtgtggggtgttacctcattggctttcgcactgctaccaactagacagggatgggcaatacactgacttctttgattccagtcaccttcatccttcttatatcctatctaagtgatttacttgccaaaagcagaggacatttctggaagaaaaataatccattgtggctgggcgcgagccgagatcgcgccactgcactccagcccgggcaacagagcgagactccgtctcaaaaaaaaaaaaaaatccattgtaacataaaaataaaaacaacacccaagagggctatatgtgcttgttttccagcaggaaaacctcgctgccttccctgctcattctctctccagtccttgaaccttttctttccttaagacttttccccaggtcggacttaatgatggactccagcgttggcatggttttggttgggtctgcatactccggtaaggcagagaacaatgctcaatctgtcctggcttcctgaggctgaagggcaaccctctagtagtgcaccttgtgtctgagctgtttgttgagctatacttaatttgtgtgtgtgtgtgtgtgtgtgtgtgtgtgtgtgtgtgtgacagagtttagctcttgtcacccaggctggagtgcaatggtgcgttctcggctcactgcaaccttggcctgcctggttcaagtgattctcctgcctcagcctcctgagtagctgggattacaggcgcccggctaatttttgtatttttcgtagagacggggtttcaccatgttgggcaggctggtctccaattcctgacttcaggtggttcacctgtcttggcctccccaaatcctgggattacaggcatgagccaccatgcctggctgctatacttaatttttaaggaaagtaattgttcataaacacacagaaaagagcaaaaaaatctatttcttttctaccaagtgggtcttgatgtttccattcacatctttctcatgcaatacctaacttgccagtaacgagataaagagcttcagtggggagggaggagatttcctcaatccacctacatttgatcagattttctaacttaaagaattgaaaaactctattgtggtttttcagaagaaattacgatgatataatttatgttcagaatattttttgaatcaattcttttttttttttttgagacagagtcttgctctgtcacccaggctggagtacaacagcgctatctcggctcactgcagcctccacctcctgggttcaagtgagtctcccgcctaagccttctgagtaactgggattacaagcacccgccatcatgcctggccaatttttgtatttttagtagagacaaggtttctccatgttggccaggcaggtctggaactcctgacctcaagtgacccacccgcctcaacctcccaaagtgctgggattacaggcgtgagccaccacacccggccttgaatcagttctttatctgagtgctagattccctttgaaaaagaagattctgtttttttctcattttttttctgtagcatcttagaactgcagcatgtgcagagttgatgctcaagacataattaatgggttaatggataaatgaacatctccctaaaccttgtcctcccctctattttattatactcttggccagtgccattgttcttgagaatctctgctaaagccaagtgacttggtttgcgatctcttgcacacaatgtattagttttcagtttttactttgcacaaagtattctctctctccaggttgccctccttcccccatttagtgtttcacatttgtaatcattgacaaaatctaaccccatactcaaaccttcttgtagtcctcagcttgtggccctgtccacctcgagctcctcctcactcggcagctctccattttcaccttagtcatcagcagacactagactgacttgctgtgtttggagcacccagaagctgaggttttatccttggaaacggaggatctttactgtgatggaggatttgggagtgtaaaatttgagtgtgtggtggaagggacagttcatcttctgggacagaacacccggggcagacagatcccggaaagctggggcggtgctggtggcagtcccgacactgtgcctgcattgatgggttcacatgtacctgagatgaagcgtctttcaaggatgactctttcacaggccttctcctttctctgacactagtcattaagagattagatttcttgaaatatcagcagttgttggcccccttgctgaataaagcttggtagcctaaggaggaagggatttctgaatagattttcagccctgaaaaaatgctgagttttaaaaataaacattcatggtgtaatgtactcttttacctcctgcgaacgggcatatgcttttcaaaaatgtagttacagtcaagggcatttagaggtgtttgtaaagaggagggggagagagagaaagaaagagggaaaaaaagattcttttgtttctcctcctagtttgtggccatggcacagtgtgatttgaatactccaattcttatcatatataaactttgtgttgggaaggaatggctcaaattgcttcaagatttacacagggttttttgtttttgttttttttttgagatggcgtttcactctcgtcgcccaggctggagtgcaatggcgcgatctcggctcactgcaacctctgcctcccgggttcaagcgattctcctgccccagcctccgagtagctgggattacaggcgaccgccaccatgcctggctaattttttgtatttttagtagagatgtggttttaccatgttgggcaggctggtttcgaactcctgacctcaggtgatccccctgcctcagcctctcaaaatgctaggattacaggtgtgaaccactgcacccggccagttttttgttgttgttgttttgagacagagtcttgccctgttgcccaggctggagtgcagtggtgcaatctcagctcactgcaacctcatctcctgggttcaagcgattctcctgcctcagcctcccgagtggctgggattatacgcacgtgccaccatgcctggctgatttttgtgtttttagcagagacggggtttcaccatattggccaggctggtctcaaactcctaacttcgtggtctgcctgcctcggcctcccaaagtgctgagattacaggtgtgagccactgtgcccggccagtttttgttttttaaaccaatgtttatacaagaagagtttggaacttattcatgaataaagtcattctttggcctgttgtgtagcaacaaggagtgctggattttatggaagatggcttgtggtactgaagtatcaggagaaggaatgaataagggtgaagattcaaactggtagtaacatctagaagcaaactaggagaaaattatttcacgaagggaaggatgtgactattgatgggaaggctgtagccaccaatctgagaatactttaaaacaaaaacagagatagagcctggcatgagcagtttaggatcaaaatgaacagtaggccctagaaatttgtaacattgatgttatcttctctatgaatcgttggtggggtcaagaaataattttcatcagcgtcttgacttgtgtggccaattaagcaaacgtgtgtctgcagtgtaagcctgttaagtggaaaaggttgggcctactgggtataattgtaattgagaacagcccatcatctctcttttaattttacgaaaataaatgcatattctaagtagaataaaatcatggttaagaaaagaaaaatgttacatctgtatcagtatgtggatttcataggatttttttccttcttctgtgggacctgagattcatttgaagtaaccttggcagaaagaccttagttagtcagactctaaaggatattttgagctggaatataaaaagcacatgtaataattaatgtaacagcagctaaaagtgcctgaggtcagtagttgctacatctatattgcatgtaaacaaagtgttagccaaaactactttcagagagccctaattacgtctgttttaatttaatttagtttgatttaatgatactttttatatgaatttgcttcatggttactctgttgaatttcctttccctgagaagaacccataagagatttttttcccccaaatgatttagtttggtgactttggatacagccaaagcattgtatcttacggcatagcatcttcaagtggaagaatgtaccagatataaagtcagtaatttaagatgaattaaaattttgtttagtttttaaaatatgagatttacatacaatgaagtacaaatatcttattggtgtatttgtgtgtgtatgtgtgttttgtttttgtttgtttgttttttgagatggagttttgctcttgttgcccaggctggagtacaatggcgcgatcttggctcactgcaacttctgcctcccgggctcaagcgattctcctgcctcagtctcctgagtagctgggattacaggcacccatcactacacctggctaattttttgtatttttagtacagtggggtttcacgatgttggccaggctggtctcgaacccctgacctcaggtgatccacctgccttggcctcccaaagtgctgggattacgggcgtgagccaccgccccagccagtgcattccttgagttttgacacatgcatatccttgtgtccctgggactcctatcataatatggaacattgccatcacctagctagttttttcttgctccatcccgtcaaccactgccttaccacctccaagggcaacctgttttgtgttgttttgttttgtttttcttccccattgtccattcgatttgcctgttctagggcttcgtgtaaatgaagtctcataatctctgctcttttgtaaggcttctttcatgcgtaagcttaaatttaatagtttttcacaatgtatttaatggaagctatatcataagaagtggtgtagaaaaaagagtggtcctgtttcaaagaagaaagaaggtaacattcattgttattttgaaatggctaaagttgaaaatgttttttattgatctatttgctagttagaattttaattgtgataattgtagatttacatcagctgaagaaacaatgtagctttacctggtctcccctagtgataacatttagcaaaactgtagtacaatatcataactaggattgatattgatgtaatctaccaatcttactcagatttccatagttttacctgtactcatttgcgtgtgtgtgtgtgtgtgtgtgtatactcagttgtgtgcagttttatcacatatataggtttgtatatctaccactacagtaaagatgctgaactgttacagcatggatccctcctattgtttttttgtagctgtacccagtttcttctcaccagtctcctatccttatcccttggaaactacttattgggtctccatttctaataaacttcatatatgtaaatagaatcatatagttcataatcttttggaattggcttttttctttctttttttttttttcgatggggtctcgctctatcacccaggctggtgttcagtggcgctttctcagctcactgcaacttcggccctgccccaggctcaagccattctcctgcctcagcttcctgagtagctgggactatgggcacccatcaccacacctggctaatttttttttgtatttctagtaaagatggggttttgccatgatggccaggctggtctcaaactcctgacctcagatgatccacccacctcggccttccaaaatgttaggattacaggcgtgagccaccccacccagcctattttttattttaaccattctgatagatgtgaaggagtatcttattgtagctttaatttgtgtttccctgagagctaatgatgtcgaacatcttttcttggccatccatatatcatctttggtgaagtggctgttcatgtcttttccccattttctaattgaagttttaaaaatctatgtttaaagccgggcgcggtggctcacgcctgtaatcccagcactttgggaggctgaggtgggtggatcacctgaggttgggagtttgagaccagcctgaccaacatggagaaaccctgtctctactaaaaatacaaaaaaaatttagccgggtatggtggcacatgtctgtaatcccagctacttgggaggctgaggtaggagaattgcttgaacctgggaggcggaggttgcggtgagccgagatcgtgccattgcactccagcctgggtgacaagagcaaaactccatctcaaaaaaaaaaaaaaaaaaaaaaaaaaaatctatgtttaaaagaaagattatgcaaagcacaaccccagtaggtatcaataacatttgagaagagtacctcaaaaaagatctcactagacttgagagatactattagataaataaattgagccaattgatgggtgtaggtagatgctctgcaacaaatgggtaaaaagaggaactgtcaactttttgtcgatcccacagttgtcttgtcaatagcttgggcttccagttgttcccgcttacccaggttctgtgctcttcctctcttctgccctagaccttcgattctttccattccttttctttttctttttttattttccaagacggagtttcacttttgttgcccggcatgaagtacagtggtgcgatcttggctcactgcaacctccgcctcctgggttcaggtgattctccttcttcagcctcacgagtagctgggattacaggcgtgcaccgccatacccagctaatttttacatctttaatagagacgggttttcaccatgttggtcaggctggtcttgaactcctgatctcaggtgatccacctgccccagcctcccaaagtgctgggattacaggcatgagccgctgcacccggctccattccttttctctgcgacaaacctgcgtggtgataggtccactcccttgactagtttaattctgaagcttattgatggattcctcaaacagatcttgtggaccaaattattctatttttctgtagagcctggcgatttgagataatctatctgcacagttttgtagtgtttgcttccatcactcaagagtaagacaatatgtcagagttatcttgatggagggataagagagagatagtttggagacagagcagaaaacctttctagtgtacttggtaatgagtttactgcagactgacatataggggacatcagggcatttgcttagatgatgcatttctgtccaagtaatagggtgcacaggagcccaaggcttaaagacaaaataacctgtatttgtgtccttgttctgcccttacttagtgacactgggcagattacctaacctctctgagcctccacttaattaaaatgtagtgatacttcccatactacccaccacagtgggttactgcaaagatcaaatgggataatgtaatgcacttgtcagtgataaagctctatacaaatgtagagagtatgtttgtaataattatattcctcctctccacaaaagcaaacacaacctggaagagaaacaggcattttcatagaatgaggtcaaatgatcactataagtttcttgaaggagaggaaaaccctgaagcattattgttttctttttttcttttcttttcttttcttttttttttttttgaggtagagtctcactctgtcacccaagctggagtgcaatggcatggtctcacctcactgcaacctctgcctcctgggttcaagtggttctcccacctcagcctccctagtagctgggactacaggcgtctgccaccacacttggctaatttttgtattttttttttttttttagtagagatggggtttcactatgttggccgcgctggtctcgaactcctgacctcgtgatccacctgccttggcctcccgaagtgctgggattacaagcctgagccaccgcgcccggcacattattgttttcttagatgtgattttaattttgtttgctaggcaataaactgctgaaataattaaccagcaataattgctcttcagttaggctctaatatgaccactgagcagagcatctaagagacttaaaattgagttactttaggtgtataccattcttacccatttaaattgtagttttaaaggtgggttatgagttggcttgccagtcaaagccttgcttggggtcgtatttctctgtactttcatctttaatcatcagctagattagtcttctggttgagtatagaagccagagagacctaggtttatacaaggagtgctattaactgtgtgtgaccttggaccaaagattagatccctctctttatcagtaatatgaattcaagtgaaattgttaatttaccacctacactgtcaaattatttggatatctgcctttaagtagtaatgttacaatatatagtacacacaagagaattggtatccttgtctgtaaattgagaagttcacagaaaaggttgatgaaggtctgatcaggggcgaaattgttttgttctaaaatatatcattggtagcaagcagtttaggtttggatgaaaccaaaagccagttcgcatgtgtgtagttctataccccaggtcttagtttgggcaatgtacttttgtgacttaggataattataaggtctcaaggctactgtgaggatcagatgatactaactgtatgagaaaacgctttggaaattgtaatgttctgtgcaaactttgttgtcagttgtatagaccacagtggaggaggtggtggtagtagaaaggaaaggatgtgtttgtcaagcttgaaaacttgtgtttaggaatattttcagctagttactgggcagtgcttgtaaaaaaaattcttaaaaatttccttctagcggggtgcagtggctcacacctataatcccagcactttgggaggctgaggtgggcggatcaccaggttaggagatcgagaccatcctggctaacaccatgaaatcccgtctctccaaaaaaatataaaaaattagccaggcgtgatagtgcatgcctgtaatcccagctattcgggaggctgaggcaggagaatctcttgaacgcaggaggcagaggttgcggtgggccgagatcactccatcgcactccagcctgggtgacagagcgagactccttctcaaaaaaaattaaaaaaaaaaaaaattccttctagactgcatggatctcacactactccactcttggaacacacagccatgaattgaatcactgtctactttacattttagcaattcagttttatatggtgacatttacaaaattgtcccttaaatctgggagagccaatgcaatgacttcagatagcacaatggggagaatcttaatggaaacccagccaatgattagattaggtgacaggaagggggtcaaatggattaggggaaaatgaggaaggaagtgagttgagtcattatgcttttacttacagtatatttttacaattgattctgtgggtagtatgttgtttaattcattacagctttcaaggaccaattttagattaaaagcatgaatgattgaagctctaaccaaactctaatcctagatactagaaaccgatgactttttaatgtcttttaatctgaaatagattatggcttttctgtagctttggactgttcaaatgtttatttcctttaaaataccaacagcttacttcaccctctttgcaaacttctaaaggggttgcttcctgccgtttaatataggatattgactttctaaagagtgtgcatgttttaaagagacttacattagaaatttgatgtctgaagcttgtcactcttttattaagaatttaaacattgtatctgattacaattacaacgcataacctttgtaaaaccttattacttatgtttatcttacttgcatccaatgatatgtcaattactatattcagtcattgccctgaaaaataactccaaggaatttattaaatggtgctttttccttgatttccacattgcgccctttgtggctgatttcatgtagccctttacctggaagtcaggcttgggagtgatcttggccagctcttgtgagtggggccaggtgaaaggtacattcttctttctttccctctgcgtgcttggcggcttctggagcaggttagcctcacaagtttcttttgttcttgctctaaaatttgtggatgttcattaattcccatgtgtttaagcagcctgcagctttttctactgacccatgcgtggtggccactttgagagggaagttaatattattctcattttttgatttagtctataatttgactaagtcttcggagtagatttctctgtccaccctatttaaaatagcaatattgtccctccaatactttgtcattctctgtcccttttaccctgccttatttttcttcggagcgcttaaacgtatctgatgttatactaaatatttgtttgctgactggtttactgttggccggtctcctagaatgtaaacattgtaggcaacaactttgactctgttcattcagaagagcgctcggcctggcaaatacacaagtatttgttggattaattaattaattaaatttaatgccatgaaacacaccaatcaaggagatagatccccctaaggttaagcttattccaaattctaagtttggtatctttgaaaccttgctcctttctctccggcctcagtaacactatcttttgttgcatgagaaaaaaaaaactcccaaagaacattattttgggaggaagagaggcaaatgaatatgggtgtcaggttatcaagtaaatattggaacaatttatagcctatgattgggaatgtttattttgcttaaatgtgtatttggtctgaccttgcagttagagttactcaggaagttgcctaaatgttaatgaatgtttatgatgtggactataagctgaaagcacttaaaatataaatatttaagccatatgttaaaaaataaccagagcatttgcagctattttggattgtggagggaaattgcctgatttattgatagagctgggaatttggagtcctgggttctagttccattcctgcttttggcagcacttcacaaaatgtctatgtttaataaatgtttaataggacaatattaatccttttaaaaataatatctttgtatcgcttagactttttttgtgctccaatttctccagcttttttttttttttttgagatggagtctcactctgtcacccaggctggagtgcagtggcaggatcttggcttactgcaagctctacctcccgggttcaagcaattctcttgcctcagcttcctgagtagctgggattgcaggtgcatgtcaccacgcccggctaacttttgtatttttagtagagacgggatttcaccatgttggccaggctggtctcaaacccctgacctcaaatgatccacccgccttggcctcccaaagtgctgggattacaggcatgagccacctcacccggccccagtttctccaactttattgatattttgttagcttgctcctcagggttttctttaaacaaaaaaaaaagccagaagtttcccacgtgtgtgtgtgtgtgtgtgtgtgtgtgtgtgtgtgtgtgtgtgtgtgtatttgcagggagtttgattccgtcttctcattagtgccgcattaatacatttttctgcctcacatttgtttaagcttcacctgaaaaaacaaagtaatgtcgtacttaaaatagagtataactgtacctcatgtagtaaacgtaatttataaagaaccgaactagatgaattttgatggggaaaagggaatgttgtttccaatgaaggtaaccaaagatgagagctttgttatcccaagcacagaggctggacctggataaatcttgaaagcaagcaactaggcacaaaccaggtgcctatcgaaagaggtccctttaccaccattagtgttatcagggcttttatgtcaaacttctgtctgtactgtgctgggtgaatttttaactgaacaggctttacaattggagcaatggggctaaaaccacttcagaattccagaggccttactcagccccacctctcagttggctctttccatgcactcatctctctgcggggctttctcgaggtgtggtcctgggaccaccggcatccgatcacttgtggcacttgttaaagctgctaattcctggtttcgacggtagacctgctgaatcagaaactgttggggaagagtcttgaaatcttcatttttaacaagcacctatcaggtgattcttaggcacattaaaatttgagagcctgtgatatattcccagattagtactgtcacatctcttaaggtggcactttattttacttttattttttaacttttatttttatttatttatttatttttttgagaccgatcatactctgtctccaaggctggagtgcagtggcgcgatcttggctcactgtatcctgaggcgattctcctgcctcagctccttgagtagctcgaactacaggcaggcgccaccatgcctggctaatttttgtatatttagagagacagggtttcgccatattggccaagcttgtctcaaactactgacctcaggtgatctgcctgccttggcctcccaaaatgctgggattacaggtgtgagccgctgcacccagctggcacttgattttatatctttttctggactgtgctatgctatgagtggaggggagaaaactgaaatatggagaaagatctttgttctcctccagctccagttccttaataaagttcataggaggaacagagagcctatacactcatttcttcaatgtgcctgctctttagcgggatatcctatatctactagattttaacatactgatttacataagcaaggaacacttcgacagaccattgagaaaatctgtgagcttagcaagagcacgccactgatgcgcgtcaccgttgggtgaggatgttatctggctgaccaagccagatgcgtttaatatgcagggtgggttggggctaacatttcagtactgagtgacattgaggactggttaatgtgattgactgatgtggaatcttctcccacacggtatatggtgggtcttacgagagagttgggtaaaaatagtgtgctaaaggttcaaaaatggaacatatgtggtcaaacctctgtgatacttgtttatgaagactgtaagggttggagtttcctgatgtgtgaaatgcagccctactaatgtaagggtatagtctgcctgagtttttcaggagtgggctcagggaggatgctttcaaaccctttcgaacagttaggaattctggagctttcaactagtcatggaaaaattgagttttgttgtacattgagcacctgtgatgagaggggaaaaggcagtttcattggtttacttaagtcagcagagaaggctgctgtgcacagcttccattgcatcattcaaaaagagagtttgtgtgggaactttgcaagtcagtttccctgtatgaagtgatggagagagtgattaagatactgagctttctctgtgttcttgccgttaaccattgccggtttgtgggagattaagaagtcgatgcgttttatggagaattaatttattttgatatagacagatggacgggtcatgaaaatttgttgacatactttactaaactgctacattagatcaaatattccaaaaaaaaaaaaaaaggggtttgaagagacccagtgacttacagggtatgcttttatcactgatgtgagaagacatatgaacacattgaacttaaaacagtagcaaacccagagcatggctcagctgtttgcagaccagcagggcagacacagctgtgcttatacattatgcttgtaggagctgggggctgtgctcagtcctcatctcagaacccacccacgacatgtggatgcagggacgtctcacaattttagaagagattcacagtttttcttgggcccaatcctgacttaaattcctatagctgcttttggaatatacacctcttctcattcctgttcaaaatttggattctctacctattttgtaggcttgtgggaaggattaaaccagacaatatttataaagttcccatccacttaccgatgcacaataaattcttggcaaaatgagtcccctcccctccgtgaaaaaataaaacgtattgatagagggaaaggaatttgtccagagatgcaaagcactggtgctgtcagcggctttctcaggctttttccttccagcagttttcacccgagacaaccccaaagtgtccttttaccttttagtaggacatgcagttgtgagggagagtcaggttttccttgtttatgcttccatagtttttaccctgcagaccctgaatatttttgcccttagaacataaaaaggagagataatgaagcagcctgttgtcactaaggaatagaacctttacctgttgttcccatgacagtgtaacaatacacaggatcaacatgtgacaagaatctttttattccttgtaaaccaagaaacgaaaagtcatcttataagctgagacattttaagagaacaggcccatggtgttttcacccctttgctctgttgttttttggtttttgtttccaggatgggtaaagaaacaggttatagaggtttcctggaacacctgtgtgaggatctccctggatgctgggtgttggagagctaacgctgcacagcctgttggtgggaagagtgaacagacggttggttgcatgttgataggagctgtggacactctagtaaatacagagctctccttagggggaaaatgctttagctttagatgttttgactttagatcttattgctggggtttcagacttttagagaggcacagcttgactaagattagccaaagcagcatcttaattgaacgagtgacagctattgggacaaccagatataattaactctgatgttttagaattccttttccattctttgattggttcgcttgcgttttgatccttaatgatgtgtgctcagtgaattacactagaagagaaatgtctgtgtttatattcaatgttaccagattattctttttgtcgagggccagggcattttcacctcatggaaagatggattggtaaggaacaggctgtactctgctaagtatgttttcagtaacagctagtaacatcacaaattcagggtcagaataaactatcacagactagacaagtatttgtgatgttaggaaatggagtagagtatgcagatggactcataagataattagtaagtgaaaatgaacttatatcagtcttgaagcaaactcactacctccttatctgtgtgtagttttttgcatgtgatattcctgacttggggaatagttggaaatttaccagattttcatattgttacttccttctaatctctttatttctataaatttggagatgatataaaaatatggcctattactaagaaatcaaaagttatgtattgtgcctttctagtcacttgctctttgtgtcttctgggtaagtcatttaaatttcctgaacctcagtttttctcatctgtaaaggggatatgcctacttagtaaattgctatgggatcaaatgagataaatgtatgtggaaatgcctttgacactcggaagttctttataaatagaattctgttatgcacagagaatgaaagggcagtctagagtaagtgaagaacatacctgctgccttttcaaagtctaaccacttaccccccaaataggtacttgcaaaggaatgtttcctcttccaggcatgcacgcctcatatcagtcttcctttactcatcttatcactgcttctattattttggaaccttaggacattaggtgacagacactgttttatggagcatactgaagaactgtttgaaaagtatcggctaggcatggtggctcacgcctgtcatcccagcactttgggaggctgaggcgggtggatcacttgaggtcaggagtttgagaccagcctggacaatgtggtgaaaccccatctctactaaaaatacaaaaattagctgggtgtggtggcgggcgcctgtaatcccagctacttgtggggctgagccaggagaattgcttgagcccaggaagtggaggttgtggtgatccaagatcgtgccactgcactccaacctgggcaaaagagcaagactctgtctcaaaaagaaaaagaaaagaaaaggaaaattattgtgggctcaaataagactgggtcagttagtagaagcaaatagaactcccctctcctcccttcccctcccctctcctttctctttccttccctctccttcccctgtcctttctctctcctttccctctcctcttccttcttttttattgagacagggtcttgctctgttacccaggctgtagtgcagggatgtgatctctgctcactgcagccttgacctcccaggctcaagtgatcatcccacctcagcctcctgagtagctgggcccacaggtgcataccaccatgcccaactaattttttaaaattatttgtagagacaggatcttgccgtgttgctcagactggtctcaaactcctgggcttaagcagtcctcctgccttggcctctcaaagtggtgggattataggtgtgagccacggtgcccactcccttttttcttttatgttttttctgttttcctcttcccccacttttttgagcatatatactaaaattttgcatatcagcccagattttgagatcaaattgtgggtacaagaatttggatccattttatccaaaaaatgatattttacattttattttcaagatagatgagctggtttataaacatgtatctaatctattttttttttttggcctttgaagcttaagaagttgaataaatatcactatgcttattctgaccttgcacccattatgtttgttggaatcaggtcctcctgcagttttattttcatttttacacctttttgatcatcaccacactgcgagttagtttaggacggtgatttgaagcaattgcttctgttgagtttacttgatgatcttccttgcagacacgtccacttacttatcatgtaaaaattatttacctatcatacataacgacacaatccttgccataagtgcatgctaagtaagagattagcatgctggcatttagaaaggttcctcccccttgttcctttaaatgtattttgttgttctgtgtggcatcaaatttatacttgtccttttcttttaaagacaagttgtgggaaggaaaagacaagatcataacattaagattgaatgtgtttctcaatcttcgcatccttaactagtttctttgatgtattcgagtttgctataaaatgtgaggggaggaagaaaggcaaccagtgataatcaaaggggaagaaagatcagggtaggactcggtgacatttgagggtaagtttgggagctgttgcaagagttattgctgcctgtgactatttggcctggctacatgtcagagccattaacttcagaataacagaggctttaagagaatgtactcttttagaaaactcctcattaatttaatttatggaaggggaggggagttgaggagcagggagcgggaagcatgcggtttcaccggtgcctagagtttaagttaaaaaagaaacaaaaaaagtacaaaagctgagaatgctggattatatgaaagatttaaaaaaatcccctgctctgtctctggtggcctcagagcctgtcctgcttgagaaggaattgcctcctcagtgatggcttttggagctcaacccctaacatggatcccagctgggaaatcttcagctctaattaagcttggcttgttttgattctcttccagccttgtggttgaatagctttgtgtatgcagccttttgctaacaagttttcccacagtcaggaaaaccttcgtcttcagtgtcaatcattacctggaagtctttggctgccatctcacaggaagtggctaacttgtctacatgactctccctcttgccccctggcctcccccaacagatttcaccatattttgggagtggaaggaatacagctatcgttactcatagaagaacgggaaaagacagtgttgtctgggtccatggagccacaagaacacaccaggattgatcattcctctttctcttaattgtcttttgccttgccctcccctgctaggatagaagaggtaggataagatggatggggatggaatttattaaataaattattcaaaaatacttgttaaacctatctactgtttgccatatgctaagacccaaaggagggaagagtgtcatcatgccaagtcatgggatggcagtgatggtattgctatggtgctgtgtatacaagaccatgagagcaagaggaaggagcccagtgtgtggcctgggagggtcaagggaaactggattcaggaaatgccattttggctaagaactatagagtcaatacacatttgcaaggttttaaagtgaaaatggaggccaggcatggtggctcacgcttgtagtcccagcaatttttgaggccgaggcgggcggatcacctgaggtcaggagttcgagaccagcctggccaacatagtgaaaccctgtctctactaaaaatacaaaaattagccggacgtggtggcacgcatctgtaatcccagctactcagtaggctgaggcaggagaatcacttggacccaggaggtggaggttgcagtgagccgagattgcaccactgcctgggcgacagagcgagactctgtcttaaaaaaacacacacacacaaaaaactaaaattgttcatatgattgggctggatgctagattgtttgggagatgaagttgtacgctctgggggtgttttggaaactcatgcaatactttctttggtcacagtgattggaaggcgcttctggcattgaatgagcaaagcccaggcagcaggtacgatgcaatgtacaagatagttctgcacatgaagaattgtcctgtgtttaacacgattattctcaagcgtctcaacagatatttatgtaaagttaattacagaacctgtctataagagtttgagctagaacctaactttgttttacatataggtacaaagtatttgttgccaggcttaatgcacactgaattttccaggaataaaactactttgtcagttggggaaagattgcgcatcgttttatgtggacctttactaaatactgttcacaatttagagaaattgtgtcagccatggccacaccactttggaaatttgaatgatcgataaaacatactgtgtggatctgtgtttggagctgtattcacggtgattccatgcacacagctacttcatggtgtcttctgttggcagttttgtgccaatatgtaaaaacaaaagttatgttattatcaattccattcccccctttttcttctatacttaagatattatactgatttacttttaaaaattattacgcaggtaggttatatactacttacgatttttatttcaagacagaaaagtgtgttataaaaagggacttgggattgataggcttgaaaacccctgcctagatctcgaagtaccttgtatactattaaaaggagctatgtattttatagtccttgaagtatacccttcaaactatctacataagagtcacctggtgagcattttcaaacttcagggtcctgggcccattttagaactactgaattccttgtgggagacttgaatctatcttatgtcaccctctccccaacctacacgtgacttttttttttttctttctttcttttttttttttttgagacggagtcttgctctgttgcccaggctggagtgcagttgcatgatctcggctcactacagcctctgcctcccgggtcaagcaattctcctgcctcagcctcccaagtagctgggattacaggtgcccgccactacgcccagctaattttttgtatttttagtagagagggggtttcaccatgttggctaggcaggtctcaaactcatgacctcaggtgatctgcccacctcggcctcccaaagtgctgggattacaggtgtgagccaccatgcctggcccccaacctacacaggactcttatccctctaacatttgagaatgcactgctatagaatttctctaaatttaagaatttagagaaatggagggatataaacaggttttaaggttaaaaataatactctgggttgggcatggtgacttacacttgtaatcccagcactttgggaggccaggacaggtagatcacctgaggtcaggagttcaagaccagcctggccaacatagtgaaaccccgtctctactaaaaatacaaagattagccaggtgtggtggtgcgcatccataatcccagctacttgggaggctgaggcaggagaattgctggaacctgggaggcagaaattgcagtgagcccagatcgatccactgcactccagcctgggtgacatagtgagaccctgtatcaaaaaaacaaacaaaccccaaaaaacaaaactctaataggacttcaatggtagatggaaggagcttcagactcacagttgagaaccggtgaagtttctattgtaatgttctagttgaaaaattttgatgaaatacagcatggtatgtggtagacatgggtgagagaagttattatgaagtaaaatgatacaatgtagtgatagcattggcagaataaaagagaataaagctagattaaagataacaaaggatggtttttgctaggtaaatggtgttatcatttatcaagttggggatttcattggggtgggtggctagtctgtggtttctggtttgggcatgctgacatttagtttcctgtcatacctgtcagtggagattgggtatatacagatatgatttagtttaggagaaccatctcctagagataagcattagggaatcattcacatatggatggtagttgaagccattcaaatggtagagattttgcccagggagtacacagaatgtccacatacaggatgatatatatgtgggcttcttctccttgtttctaagtgaattttactcccataatattcaggactccttttagatatgatagttttaattattgaagataatgtagttccgttgtagctccatatctttgctgaataagcttaattgggatgtggtgtgggaaacccatacactttcagacatatagcatgccacttgtttttttttgtttggagacagagtcttgctcagtcgctcaggctggagtgcagtggcatgatcttggctcactgcagcctccacctccagggttcaagctattctccctgtctcagcctcctgagtagctgggattacaggcgtccaccaccacccggctaatttttgtatttttttagtagagacggggtttcaccatgttggccaggctggtcttgaactcctgacctcaggtgatctgcccaccttgacctctcaaggtgttggaattacagttgtgagccatggcacctggccaacatccctcttgttgtttagtccagcctcgggacaaaggatgtgcctggaaaagactaatgatatagtttatgatacggttaaaaaaaaaggttatagtgaaaacagctgccagtctacaaaattagtgtggtttatagaacttgcatcttacagatctattgattattaagaccccaaaccaattggtttttacttgcctctgcatttttttccttaaagaatacacataccctagtctttgaagtgtataatttatttgggttggggtatcttctctaaggagattctagcttcgttgtctgatagtcattttccgtgcagttccttcctttccaggcattcacatttaaattgacaaagacaggtaaaatttaacacaaatagactgatgtctttgtttagccattgacctctgagtgtcaaatatcacaggttctttctgtttttgtctttctctttctttcattatgacaagtggcactatcaagtttttccttacatgaacgcttcctatttctctccttcctctgataatttagaaacaagtttggcaagtgctttttcgaactttccgtcgtcaatactgaatgcctttagttagaagtctatgattccagtcttccctatggttttcactcttggcgatttcactttaatggtttaaaatcacaaagttctgggctctggggactgacttcataggggagagtctacgtatttaaaagcatttttgcagtgccagctgtggctaatgttgtgtcagcatttccatcatcataattcccaacattcgagggtttataacgagactgttaaatttcaccacaaaatgaagcttggtatgcaagaattgagcctgaagcaaactttttcattttaaaaaaaatgtagtttgtctataaagccactaataaagaagcaaagctagtgattattgttgttacactacccaaactgcttggtttacttaatacttcagggacattagactgtaatgtaaggcaatcactccaggagtctgcagaaaaaacagagtatgaatgtgggtgatatttaatttcggagggtgtctgaacattagaaaacattttcttctcaattttaggataattttctagccttgtttatctaaatgtcctgtggggaagcaaaaatgtttggggcccatgataatgaactcagtataaatatgcaaatgcttaaaacctcaagcaggtccctttcctccaacctcagagcaagagaaatgacaggcatgtcgatgagggtgcagtacagcatgggactggccattgagctgctacaatcttcatttaaaaatgttctttcattcccatgaaatgttgatccttaaggaccactgtagggagagcagatacctagagaatttttttttccttgcggtaatgatgattgatttctgcagatacctccccattctctggctccgacctcccttgtgactggcaggaagcatatgcaagatgctaatttgagttaagcacaaaatctatggccttgcaacagaaacagcatgattcacatatggatgaacccatggctctggcctctttagtgctccatacttaaatcacccaaatgacttagcccgcaggttaatggaatgaaagctaaagataaccttgtgagggtcaagtcggccagccttgtcttccctttacagtgttcagagatattcattctattgttcttcctctttttacctcatattggctcttttagccatattctctccattttcatcacctcttctgggtgtattttctttttctttctttttttttttcttttttttgagatggggtctcactctgtcacccaggctggagtgcagtggtgtgatatcagttcacggcagcctacgcctccaggactcaagtaatcctcccacttcagcgtcccgactagctgagaccaccacaggtgagcgccaccactgccggctaattttttgtattttggtagagagggttttaccatgttgcccaccctggtcttgaactcctgagctcaagtgatctgcccacctcggcctcccaaagtgctgggattacaggcgtgtgccgccgcgcctagccttctgggtgtattttcttctttcccttcttccttactccaaatagtccagactgaggaactgtttgtagagagtctgctaggtactaagtgaaaagctcggctttcacatacatgcactacaacatttgagcggatgggtgcagattgatagataatgaagtaatatataatttgtatatacatatgtgtgtgcatacatacacatatataatatatatacctgtatgtatatacatttataatctgactgcagacaccctcagcaactcagtaacaaacagttatgctgtttaggttacagagttgcaaaaaactgtaatgagttagaaaaaggtgttccttttggcctcagggtgtgtggtttggcaagcaggtgagggctggctgtgtgtccctactcccgccctgggttgggcatgattgtgtaggggacatcttgcacagccttatgagcagccctgagaatgtcattgattggcattaatatttctttcaatgtgtcagtttttcttttgttattcaaaaccgtcacaaatacttaatggataatgaagtattgttaatataatgtaagcttcttttattttatcttaatttactttatttttgagacaaggtctctgttgtccaggctggaatgtagtggtgccatcatagctcactgcagcctccaactcctgggctcaagtgttcctcctgcctcagcctcctgagtagatgggactacaggtgtgcatcaccatgcctagctaattatttatttatttttaattttttatagagacagggtcttgctatgttgcccaggtggatctagagctcttggccttaagcgatcctcctaccttggcctcccaaagtgctggaattacaggcataaaccaaagcacctagcttctttcactttatacttgagaatgtattaatatctgaatttttagactattagaagaggcaaatggttagaggaattgtttgtgcagacaactggctgttcgtattacagtgtgatgatttgtgggcaaacattagccaggcctctgagtgtaacctaggattatttttctccccctcagtaattcggaagataactttcaaacacagatatctttttggtactgaacaattaagttgtatgaatgccatgactaggtcttttagattcctacagtttgatggttgttagttgagattatatgcgtggataaataagtattttagtaattattttatgtttttatgaaattcacatcctaggctgggcgctgtggctcaggcttgtaatcccagcactttgggaggccgaggtgagtggatcacctgagtttaggagtttgagaccagcctggccaacatggtgaaacgccttctctattaaaaacacaaaaattagccaggtgtggtggcatgcacttgtaatcccagctacttgggaggctgagagaggagaatcgcttgaacccgggaggcggaggttgcagtgagcaagatcacaccattgcactccagcctgggtgacaagagtgaaactctgtctccaaaaaaaaaagaaaaaaaaaaagaaagaaattaatatcctagtcttttctccaaatttagtggcttaactataattagagaaaatgttagaaccaaagagcccagataacagggaaaccaggctggctttaggacattaaatttatggaccactgtatgcatgttaggaaatcagtgggctttttaacctgccttcaccatgctggtcaaaggactcacttttttttttttaaccattttattgagaaaaaaatgttttatgtatttcatgtagaacttgatgaattcggggagaagtgtatagccttgacaatcaaggcataaacttaacactttcagaagtttcctctgctgcttttattgatttagttttaaatttctttttgttttctttttttttttgagatggagtcttgctatgtcacgcaggctggagtgcaatggcacgatcttggctcactacaattatttttaaatttctaaaattttttttacttttgtggtaagaacatttaacgtaagttctattttcttagcaaaatgttaggtataataaaacattattgttaactagaggccctcttttgtccagaatttattcatcttgcatataaacactttgtaccttttgaatcactcctccccatttctcccttctccagcaactattctggaaaccacctttccactctttggttctaccactttgaatatttcagattccttataaaagtgggatcatgcaatatttgtgcttctgtgtctggcttgtttcactcagcttaatgtcttctaggtccatccatgttgttgcaaatggcaggctatccttcttttccagggttgaataatattccattcaaactcatttatttctgtcttcctcctgtgtgccaaaaacataatccatgatgctgacatagccatgtcctcctttaatctcagccataattgatgttgtagacgttctccgctgacacatacgggtaacggactacaagagagagaatatgaatctgctgctgccattatgagaccttatttttacatggaaaccaaatcatattgagtgagatgcaaactgcttagatgaaatgtttataagaaccaatttaggtcattataaacagaatgaataacttgattatctcgaagcatattgtttcagaataagaagttaactctcgagttctgtgtctttttcctttgaaaatgataaagtagttcctcagctctgtgattcacttcctgttttgggggacaggatgttggataaatggtaaggcccagacatgtctactcttctagctttgcaaatgggtcaaatttcccttgtttattcaaggaaccagggataaagttgcctcttgtcaaactagaggaaacttcttagaacagaaggccatgctttagggatgttttaatccatatattctttttattctgtggccttggctttactctgtttctataattttcccttttggtttgtcttctctatgtcttctttctgtaatgacgagtagcagttgatcatatgttgtctataagaagatgaatgattcacagtaactatgcatctcccctattcccttcctaacaaaattttggaggcatgcaaaaatgagtcttttaaatgagatttaaaacttttcaggccgggtgtggtggcttatgcctgtgatcccattactttgggaagccgaggcgggtggatcacttgaggtcaggagtttgagaccagcctggccaacgtggtgaaaccccgtctccactaaaaatacaaaaagtagccaagcgtggtggcacatgcctgtagttccagctactcaggaggctgaggcaggagaatcacttgaacctgggaggcagaggtttcagtgagccactgcactctagcctggtgaaagagagagactccatctcaaacaaaacaaaacaaattttctttcctaaagtctcaaagctttattcgtttccattgtacatttcaaatgaacaatgaaactaatacttgtatttgatttgactattgatttgtcacaaatcctactcttttcttgatggtgaggattataggaaattttacttgggctgggggcaggtaaagaaagacagttgttttttatgatattgttctaatatgcatatttccatatgcatacttttatttttttcttttcttttcttttctttttttgagatggaaccttgctctgttgcccagactggaatgcagtggtgtaatctcggctcactgcaatctccgactcttaggttcaagtttttctcctgcctcagcctcctgagtagctgggattacaggtgtgcaccaccatgcccagctaatttttgtatttttagtagagacggggtttcaccatgttggccaggttggtcgcgaactcttaacctcaagtgatcagcccgcctcaacctttcaaagtgctgagattacaagcgtgagccaccacgcctggccatactttcctttcctaaattttccttcatgaatttcagaggtatacaggattcttctgcattcttcacaagagattacatgaaaagaaaacataacattggattgatctgaatgaaaaaacaaaagcctgagatgaaaaagagtaaaaaagacactatgcaagatagcttacataccaactccttggtattacaggtttagcatcccaaagtggaaaatctaaaatgtaaaatgcttccaaaatccaaaactttttgagccctgacgtgatgctcaaaggaaatgctcatgggagcgttggtttttgtttgtttgtttgtttgtttttttgagatggaattttactcttatcgcccaggctgggttgcaatggcatgatcttggctcactgcaacctctgtctcctgggttcaagtgattctcctgcctcagcctcctgagtagctgagattacaggttcccgccaccacgcctggctaaatttttttgtttttttagtagatatggggttttgccatgttggccaggctggtctcgacctccggacctcaggtgatccacccgcctcggcctcccaaagtggtgggaggccactgcaccctgcctcgtgggagcattttggatttcaaattttctgacttgggatcctcatctagtaaatatataatgcaaatatccccaaatctgaaaaaatccaaaatctgaaacacttctagtcccaagcatttcagataagggatactcaacctgtgttgaagaaaaagagaatccataataaagatggcaaaggaagcagatcctatgatacctaaacagagacaatgagagatttctgtactttttctaaataatagaatcttagccctgattcacgtctactgggtccaatcactaggcagttagtctccaaatagccttgtgatttatgatatagtctaagtggaatcaaaattggagcctggattctccatgccatttctgacttttctgagtgtgggtgtgttgtaaatatgtaggttggatgggagttgaagatcctaagaaatgtaaacaacagccctgtctttgaagaactggaggaaggctcagggttatgaggatggaacatggagtaaggggtgtgattataatgagtgaaagacatctctttgatggatggtattccacccagtgggtctcacacctggccatacctcatcacacctttgtttgcacatacctgacatcattggcaaatctaggtctctggatgcttcccaacactggcaccctgagctgaagctaattctgtcaccatgattagctgtgtacagataacttatctatgacaattaaaaaaaaatccatgattggctttttgctgttgccagccagccactgtctgcagttgttacttggcttgtgtggagggaatataaaacttaaaattattctaaagtaaacttaattagggagggaaatttgtagccaacttaccaccctcatataatgcaaccaaaaccaaatgtaaatgatttttggatgatccaaattagttctcccttctgccagctcacatggagcaccaagattagagagtaataagaaggccttctaataggtaggttttggaacggatttcatttgcattaggaaagagcattgggaagagtgccctttagaaacacttgcccacatatttatttttggatttatgataccagcatactgcattttaatttgttcctttttgttgagtgctcagatttttatgtctggctttttattttgtcttgtgaatttgtataactttcaaaatgacaacacccattgcttagcataagggacaaaagaaactctttttttttttcctcccctcttgtgcctttttaaaataagctatctaacaaagacacaattttttccctccctctcctaagccccagatgacctaaggatttagaggtctgaggtcagatttctttcttctttgcttcacagacaactgtctcttctttatattgtgatctttctgatttgtatagggactcggcaggtagaagaatgtgtgtgtgtgggttgtgtgtaaaatatgtacgctttcacatgcggcgggggcatctttatgctttggctcagatggcgcatatgaaagaaattaggtgattctaattatatagcccccaaatagtgaggatcccaattcttctccttccctctttgaatctatttaatagtttacctttgaaccaagttaattaggaaaagggacaggctacagtcatttcatttggctgtttttggcatccaggaaagtgtggggtggggagctcatcagagggaaaccaagggaagctcgtagacattgaacttgctctgatcagattattaattttcttctccttgtacgttgttaaatctgtagaaaaggaacatcagctcaagatctgtcgctctggctccgggccagcatgccaaattctgtcatctttgcagcatggccaagcatctttattacatgttataattctggtttttgagcttgatccagtgatcctgctacagcatcagatggtttgggatgtggaaaaagaagagggctatattcatctgtagatgaggtttggggagaattgtaagagccagaaaggtggagtggttgtctagggcagggacttttcatggatgctacagacacctcctttgtgctgcctcgaatttgaaatgcattattaatttctgttcaatacagatcgttgatgtcaaaccaaaaataaatgtgggccctactcctgctctggccattacatctctcagcagcccagcaattagcaccaaccttgagaacagagtgccatcattgatgtgacagtttcgtccctattgtcctgttcctgggtgcatgggtgacccttgacctccattggtctcggagtgggaaactgaacttatgaactgttcgggctgcgctggcctcagattaacctgggcaaggttaactttctcactctcttcttcaaaagtgctttagagggtgaggaagtactaggagtaaataataattttaaaaaatggttgggaggggaaaaacaattgcatcaatttcctgagtacagacacccctaacctgccttttgcaaataatctcccttttgtctgctcttaggggttttgcagatgaagccttggctttggcttgtcaatgaggacttttcagaagctccagaatgcctttagcggctttgcaggaagcggtgacacaaagttccagccagtctccccctccttccacttattgtttcagaattgtcagaaaacaggctgggatgaggaggaagagctactgtgagggctttttttttgttgttagtttggctgctgaatgaaagcaagcactttatttagaagtgagtagggagggaaatgcagcttagggttgacacccttctggtgcttatccataaatatgaaatggtgttagaacaccagacaccagagagctttctgattggctgttggtgatgtcatcatgtcattaatactgtgctcagaaaataaactgatccgcctgttttccttctttctctctttctttctttctttctttctagctgaaatgtatgaaatccattttgtaatctaaaatgaggtgcttcagtcaggacatttcgaaagaattattatgtttctcatgtgttcagagtcattttggtattcacttgagcaaagcaatagtcacccacaagtattcagcctatcttgtcttattgcttaaaagtaaaggcagacgctattcaacacctgggtaccaacagttgacatttacccacattaagtgctaaggctgtagatgaggatttcttcttgtcggcctttaaacatcctagtaagcccagggccaacgctggcacaggggaaggtgagggatgtgggtgagtaataaggagtgctttcttttttattttcttataaactaattttgtttctctacctgtgataactctgcagtccaatttaaacctgcctgcttttccacttaatgcatgctcatctgatctgttagccttataattgtgtttcagcaggaggaatacacttgtggcatgtccaaggtgtgtgtgtgtgtgtgtgtgaaaaatccaatagcattcttgatatgcaggagtgaaattctcgggaggaaagccactgccaagcaacactctaacctctgcattgattttggatgcctagaggtctggaagatttgacagttctccattcctactgcttcactctcatccaagaaggaatactgtttcgattaatcattgggaagcattttggatagatatagctctgtgtgttttctttaaattaaatatagaactgtccttttgagggaaagccgtgattctttattgtcagaaagtttggctagaataaccttcccttttcttgtaatatttaactttgcttgtgagtaactataacaattcacttccttgcatgccagtgtcctcttgggtagaatctcctaataacatgtacaaatgttatgtaaatcccccctcccccacaagatgtttattgagtgaaaatgcctctaagattttattccattactgtcaaaatgtccaaggttattttacgcatgctgtggacatattatttggattagcaaaatgtctagcaagcaggtataactgattctggcatgcaactgtaatctcttgttacagggagacagtgcattccttttcaaggttaccctcatttttttgcaaggttataaaccatagatttaggaatcactggggtcaaagggaaaagggaaagacaatgagccccattcatccttatgagccctaatgagtatagagatagtatattttccaggttagagccccatctctgacaggctttaattatctatgagctgaaacaagaagcaatataaacatacaaaagcatttcaggaacaggtttttgaaggagatgaatcacccaagttggtgtcccactcagcccttttgcaaggggccagctccctccattctgcctgccacttgatcacgtgacagctgtttgcagactaaaggaaagaaacaatcattcactagcaggaaacccaatcccgggcaggtgcagtttgagtaacgactctaggcctgaaggtcagaatggctgcaaagacctaagcttttgcagatggtctgagtgggaggagccaggttcaataacccttctgtagcccccaggttggtccttcctcggggagggtgctaccacttctccagatactgctgaacttttgaacccaagtacagtacgctatttaggatgtttgtcatttatagcttttagataaagcagtagcggattttaaggaaacagtagacagatccattttccttttcctccagtgatgttagtgatctaattagaagtcagtgttttagcagcttcctctctatgtgctttgggttctttttttctaagagacgcctatggacatgaacaaaagccggatgttgcactagggcttctgaacaagtgctctgcattagatacgtctggagtttacacaccacgctttcctctgtgcagaccaaatgagagcctgccgggtgttacgactccctgtgtccattgtcaaagctgtattttcactgccttgaaaagtgcccttctgccacttcattttatatccattaccagtggccactttttctatttatattgcttggaactaattgagattccaggtgcacaagtgtgtcacacgcaagggcttgggtacttgggcaagtgtaacaatagttcaggaagagatgatcagcagccaccctttctgggttgaggaaacctccaaaaaaaccgaatagaaagtatcaaatacataaatttgaagggagaatatatgagcctggcatcttctcagctgcaacctgatttattgaaaaaaatggtgattgggggaaagtatagaatatttgcttgaaggaatccacttctctgaatagctccctcgtttctgtggcttggagactgagacttagaattccacaattatactgtatagatgagccttgttctatatttgggatgtaatctccacactcaggagctacatatggccgtgagcacccacttaagagctaaaaatgtaagttaccgcctactttgtcctgaattggaatcatacataattgctctatgctttaaaaaatcttcctttgaggaaagagttcaagatcaaattgttagtgggtaatcttatatgaagccaagtatcactagctgttgaaagaagctacataaatacttgttgttgaacaaataaaataaatgaaggaagaattcacatctctcattacttaatcagaaagtaacatggtgagtcaggaagctgtaggcttatcctagaagtaaatacccatcatgaaatgggcagagatctggaagcaggaaccgatggggtggactcctagaactaatgaaaatggaaagtatgcaaagtccagtggtttctaaatttggctgatcatcagagtcagcttatgagctcttaaaaacaaaaataggctgggtgcagtggctcatgcttgtaatcccagcattctgggaggctgaggtgggcggattgcttgagctgagaagttcaagaccaggctgggcaacatggcaaaaccctgtcccaacaggaaatacaaaaattagttagtcatggtggtgtgcacctgtagtcccagctacttgggaggctgaggtgggaggattgcttgagctcagggacgtagaggctgcggtgagctttgattgagccactgcactccagcctgggtgacacagcgagaccctgtctcaaaaaaaaaaaaaaaaaaaaaaaaaaaaagctggtgcagtggcttatgcttgtaatcccagcacttctggaggtcaagataggaggatgcttgaggccaggcgttcaagaccagcctgggcaacatagcatgaccccctctctgcaaaaaaattaaaaaacaagttagctaaatgtggtgatgtgcacctgtaatcctagctattcgggaggctgaggtgggaggatcacttgagcccagaagtttgaggctgcagtgaacgagactttgactctaaaaagcaaataaacaaccgaaaaaccccaaaagacaaaaataaaaacaaacacaacatcaatttcctggcctagactccgaaatctcttaatgcccagcctttgtccacagatcagaaatgccggggatgagaaggggatgtggaggtcgagggcatgaaccaaggaggtggccaggctttgccagcacagagcaaaggaaagataccattttgggggtttgtttttaaatggattccgcaaacatttttttgagcacaacacattgtatcacattttgtgatggaagtatacaaaacaaaactcacttctgctgacaggcccacagacagatttatcttgagcagaatgacagctccacttgctcagtgtattgtggccctctgagtatcattagtagaggaacgtagaggagggaggaataacaggttcgtagaagcctttgaggtgatctttaaactggtgttctgaagggtgggtagggtttttctaggagtacgaaggccagaggggagattaggaagatagaaaaaaaaaaaaaagggcaaagacaaggaaggaagaaagaacaaggtgtgtttgcagaatggtgaagaaggcaaaggatgattggaggtgagagctgagcctgtggccagtgccttcgtttgcaagactaaggtatctggagttcatagtatggttgaccttgaacaacatgcggttgaatggcaaaggcccacttataggcagattttcttcctcctctgccatccctgagaaagcaagaccacttcctcctcttccaccttctctgcctactcaatgtgaagatttctaagtttcagtctccaaggatgaagacctttataatgatgccctttcacttaaagagtagtaaatatactttttcttccttatgattttcttttctctagctttattgtaagaatacagtctataatacatatgagatacaaaatatgagtgcatcgactattttattggcaaggcttctggtcaacagtagttaagtttttggggagtcacagttatatgtgggtttttgactgtgcaaggtggtcagtgcctctcacccccacattgttttttgtttgtttttgagacagagttttgctcttgtcacccaggctggagtgcaatggtgcagtctcggttcactgcaacctctgcctcccgggttcaaacgattctcttgcctcagcctcctgagtagctgggattacaggcgcccaccaccacgcctggctaatttttgtatttttagtagagacaaggttttgccatgttggccaggctggtctggaacttctgacctcaggcgatccacctgcctccgcctctcgaagtgctgggattataggtgtgagtcaccgtgcctggcctacccccacattgtttaagggtcaattgtataatcaaccctgttccccccagaaagataagatgagatgcttttaggatgttagccttaccactctggagtgtaaaagaaactgggggggttgccctcaggcttaaaggagctgtggacagggagaggcacgttgggttttgtctctaaacagaatacaagccctctgaggatgggcaacttaacttccaaagattattctcatctctgcagcatgtggtaggcactaataccattctttggttaattaaaagatgtttaatatatgcctcattaagcagaataatcagtatctctgagatgcttatgtgctttatttttctccttttaataaaaacaaaaattagagggataagaaataattaggggcaggctgttagctctcacttcatttttttttctcccttgatgattctctttcattttttttccatagctcacatagctcactttctcccttgacctagtcctctgctgataacatcaaagttagcacagcttgcagacctaagtgggtttagaacacagctctcaagatggagccatgcagatatggaaattggattttaagcatctgtgatctctgcccacttcctctttaactaacacatgagacccctcacaatctctctaagatgtagaattgtccatatctgtagactcgaagtgctgtggctgaggacttttttttttttttttttttttttcccaaggcagaagaatttttcttagtacagaacaaaatgaaaagtctcccatgtctacctctatccacacagacccggcaaccatccgatttctcaattttttccccacccttcccgcctctctattccacaaaaccgccattgtcatcatagcccatccccaatgagccgctgggcacacctcccagacggggtcgtggccgggcagaggggctcctcacttcccagtaggggcggccgggcagaagcgcccctcacctcccggatggggcgtctggccgggcagaggggtcctcacttcccagtaggggcggccggccgggcggggggctgacccccccacctccctcccggacggggcggctggccgggcagaggggctcctcacttcccagtaggggcggccgggcagaggcgcccctcacctcccggacggggcggctggccaggcggggggctgatccccccacctccctcccggacggggcggctggccgggcagggggctgacccccccacctccctcccggatggggcggctggccaggtggggggctgacccccccacctccctcccggacggggcggctggccgggcagaggggctcctcacttcccagtaggggcggccgggcagaggtgcccctcacctcccggacggggcggccggccgggcggggggctgacccccccacctccctctcctcacttcccagtaggggcggccgggcagaggcgcccctcacctcccggacggggcggctggccaggcggggggctgatccctccacctccctcccggacggggcggctggccgggcagggggctgaccccccctcccccctcccggacggggcggctggccgggcggggggctgaccccccacctccctcccggactgggcggctggccgggcggggggctgacccccccacctccctcctggacggggcgactggccgggcagaggggctcctcacttaccagtaggggcggccgggcagaggagcccctcacctcccggacggggcggctggctgggcggggggctgaccccccccccacctccctcccggacggggtggctgctgggcggagaggctcctcacttcccagatggggtggctgccggacggaggggctcctcacttctcagacggggcggttgccaggcagagggtctcctcacttctcagacggggcggccgggcagagacgctcctcacctcccagacagggttgcggcccagcagaggcgctcctcacatcccagacagggcggcggggcagaggcgctccccactcagacgatgggcgggtcaggcagagatgctcctcacttcctagatgggatggcggcggggaagaggcgctcctcgcttcctagatgggctggcggccgggcagagacgctcctcactttccagactgggcagccaggcagaggggctcctcacctcccagacgatgggcggccaggcagagacgctccggctgaggactttctttgtgcttatttttatggctggtttatttgcatcgttgcagaatattcataaatcagaaaagaattttttttctttctcctttaaggataccaaatccaggtgggaagtaatgatcttggtgaattctagcacttgtcaatttgagagtgttcagggaaaacaaatgaaagagaaaggatgaatttgtttgtatgctatcgttcactaattcaaagctgcagacatttctttcttactatacttttgaagttaaggattggaactgaataatagacagccttccaacatgaaacatgaccaagcttgagggattttattggggtttttgatattgcattgttttctagtttccctttgtctttgatcaacttattccgatgacaagaatttggtcatgttattgcttttctctttccccaaagcttgtcttatgtcatgggaattctttctcttttttcttttctcagtaattttgttgattgcaaataaataaactaagtatttatctagacttagtttaaatataccagtcagttggaagtctgcttttatttttccttcaagtattttcagttttctatttaaatgtgttcatagtaaagaattttaaattctaaattatataaaacccattcatcctgaatattgggctaaggcttatctttgcttcgtaaacctttctcagtgctgcaaattaggagctaagtaatactgtcctagtggtggtggtggtggtggtggtcgtggtggtggtggtggtggtggtggtgtgttaaaaatcctggagtatgaactgttttcaagtgtcttcaagtacttcagaagtctccatttttatagtagcacttgatatggtaattatatatgattctcctgtgttcattaaaataggagcctagggcttctctgacaatttgttagcttcccataggttgcaagtaataaaattgccttgctctaaaaatctgtaattcattgctttcactaattcagatgggctttctctccattctttttcctggtagataatgagaggattttttttttctcattcctctgagaatatgagggtagtccagctatgttaggaaacagaagatatgggttatcttggaaggtgaatgtggctatttttattgctttggtcttaaaggacctgtaatttcaaaagcatgataattccctacctcttagttcctgcagttaactcctaggcccgtatttccagaaaggatgtatatttttttcctgaaaccaaaataaaagtttctatcatctcaataaggcagctttttaaaacgtggaaaaaaagtttaaaaacaaatccgcctaatagccaaaaggtagaaccaacccagaagtccatccatagatgaatggataaacaaaatgttgtatatacacacaatgggagattattcagctttaaaagatggaaattatgacacatgctacaacatggatggatctgaggacactgtgctaactcagataagccagacacagagggacagatatggtatgatctcaaaaatatgaaatatttcgaatatgcaaattcatagaaacggaaagtagcttagagcttacctggagcaggggtggaggaatggagttactgtttaatgggtacagagtttgttttgcaaattcaagagttctgtggcaggctgctggtgatagaaaaacaatgtgaacaaatgtgcttaatgccactgaattgtatacttaaaaatggctaaaatatggcgtgtgcctgtaatcctatctactagggaggctgaggcaggagaattgcttgaacctgggaggtggaggttgcatgagccgagattgtgccaccacactatagtgggagactgtgtctcaaaaaaaaaaaaaaaggctgaaatggtaaattttatgttatatatatatatatatatatatatatatatatacacacacacacacacacccacccacaattaaattttttttttttttttgagatggagtctcactctgtcaccaggctggagtgcagtggcatgatctcagctcactgctacctccgcctcccgggttcaagcgattctcctgcctcagcctcctgagtagctgggactacaggcgcccaccaccacgcctggctaatttttgtatttttagtagagacggggtttcaccatgttggtcaggctggtctcgaactcctgacctcatgatctgcccgcttaggcctcccaaagtgctgggattacaggcgtgagccactgcgcccggcacacaattaaaattttaaagaaatcttcagggaaagggagtactactaatactaagtttttagaacttacaagttatataatacaaattggtcatttgagctgattttcaatatgctgacacatgcaatataaattgcaaatatgtatgtcactaccacaacatctaaaagaagtcaaagatgtacacaatgtttatgacaaataaaactattgcatgtaatgtcagaaaaatatcccccaaaaaaaacccaattagatttgctaatttgtggtatttgtgtgtctcctgtacagacattttctcatttggattcctgacacttggtaaataaaattactattattgttctcttgtttctttgaatttggaattcctggaacacaggaaaatttgatacacgtcctaaaagaaaaagaggagaacaaactgagtgctacttaatatgggggcagcacagtggctcacaccaataattccagtgctttgggaggctgaggctggaggattgcttgaggccaggagttccagaccggcctgggcaacatagcaagatcccatctctaccaaaaaaataaaaattagccagggtggtggcatgagcctgtagttctagctacttaagtaggttgaggcgggaggattgcttgagcccaggagtttgaggctgcagtgagctatgatttcttcactgcactctagtctaggtgacagagtgagaccctgtctctaaaaaaagaaaaatataagtaaataaagtgagtatgcatgtctgaaatttgtttacctgaatgttctgatttagtgggtctggcgtggggcctgagagtctgctgtgctcacaagcttcacctgaatccctacttcggaggtcctgggaaggctttggatggttctgctttcatcactgctagtttaggatccacgctaaatcacgctggttacttaccatgaatcagttttctggctttcgtgatattgttgctgctgtcatctcagtcttcttgtccttgtagatttctgcattctgagaaactcctttagttttattttagtggagtattttgatagggcgaaatgaagggaactgaggtggcactcatttttaaaaggaagttcccaattctgttttcactttttttctggctaagtgctcattgttgggggaggggagaacactgactaatttagcagaatcagcagcatgtatcagcattcccctctgacctcaagtttatttgaatcaatgttgattgagcgctaagtatgtgctgggcattgtgcttatccttgatggttggtagatatggtccctgctataatgaaactagtgctatatgctttaacccaaaaaaggagggtggggcacacagatgacacaatcttgacggagcatgttcttacagtctgttgtatgtgacagttgtgaaagctgcttccttagaccccacccccactgtctcactcggcaatttcagtctcatccccagattgttctcctttatctgtttttatgatttctacccctttgctatcccggttgaagtggaaagttttaagccatagaatatgcttgtttctgtgaagggtctttctaaattgtgtccatgccactacatcattcttacttcagacagaataattgctttctaatttggcagagttaggggaaatataaacatgcccttattagcattgtgtggaagaagaattctgacatggcccccatgattcactcccagacccgtgttgcatacacaccctgagtaatccctggaactatgtctgtgatgaatttactcccttgactagttatgttctatggtataattgaccttaagatctggagaatatccaggtgagtctgacttaatcacaccagccctttaaaagcagagagttttgtcttgctgcttgaggaaagagaagctggagattcttagcatgaggaagattcaaatgcacctttgtgagctgaagatggagggggctgtgtggcaaggaatgccggcagccccaaggagctgacagccagcaaggaagtggggatgtcagtcctacaactgcaaggaactggattctattaatgacaagaatgagcttttaaggggctttttcctctagaggctttagatgagaactcagtccaacacctagatttcagccttgtgacacactgagcagagaacccagtcatgatgggctgggcttctgacttacgaaactgtgagctagtagatgcctgttgcctaagccactaagtttgtggtaatttgttatgcaccaataaaaaactaatatacatattagtgtgcaaatgcatttgaaaaagagtctacaagtacattcgaagaagactgtagaaggcttgcctgtgaaaaaccaagctaatgctgcttagccagctgggcaaagaaagtctagctaccttacacataataggaatgtaaaatgtcatcgatacataggaagtatcaaaccatggaaagggcatagatttagagagaagaaatatgagcaagtcttggctctcttacttcctagccaggggaggccattcctctgaatctcacctataaaatgaaggggttgaccagatgcatctcatcacaatgtaacccctggttttatttagcaagcgatgtactcatttccataactttctgtggtttagcctagccctgacccactgggtataggataagggttgttgtctgatggatgtcatttttgggtagtttttttaaaagcagcttaaaattttatgggtttttaaggatcagtccaaaatattcctgtctcagtacaataatctgatatttgcatcaaaaagctaccgcaaaatatattacttggggctgaggcaggtggatcacttgaggtcaggagtttgtgaccccagcctggccaacatggtgaaaccccgtctccgttaaaattactaaaatgccggcgtggtggctcacgcctataatcctagcactttgggaggctgaggcaggcagattacctgaggtcaggaattcaagaccagcctggccaacatggtgaaaccccatctctactaaaaaaaaaaaaaatacaaaaaattagcctggtgcagtggcgtgcgcctgtaatcacagctactcgggaggctgaggcaggagaattgcttgaacccaggaggcagaggttgcagcgagccgagatcgtgtcactgcattccagcctggacgacaagagcgaaactgcatctcaaaaacaaaaaacaaaaaacatgcacctagaaattgatctttaaaaatctgtttttgaaactcagggtgattctgactagaagcatttctctgcctggaacacctgctcatcagaactcattcttagtgtgcttccacagtgttttgggggtgggcacatagcccattcttgtgcatcactgtgcgttgagtctggtctgttgaacttagaattatgtttaaaaatctgtctgtgtgtctaagtactggtgttttacaagaagtggttgcatggagcatctgtgttgctagtctttttcctaggaaatgattcttctctgagcttaaggatcttgttcacactgcaaaataaaaatctgtagaaaattaaggacactcaagttataatatttcagggatataatgatatttcaatgggaaaatgctaattatggggagcttgctttcccccaacacctggagcttcttaacctgctaccaactagctgctgattttcataaataggactgtacgaggggaaaaaatccctcatcaactcagccaccaggaagatgctggaaagtgtctgtcagttgtttaaaagggagaaaaggaatacctcagccgcctcccaggatgcgtgaagcctccaggaatatcagccaacctgggctttccgcatggaaaacaaagctgcctgaatgggtatgttttaagactataacttctgagttgctctcctggatattttcaaacacatcttaaaaaggcaggtggacttagtggctcacacctgtaatttcaacactttgggaggctgaggtgggaggatcgcttgaagctaggagttcgaggtgcggtgaactatgattgtgcctcagcactccagcctgggcgacagagtgagatcctgattctaaaaaaaacaaaaaccaaaaaaaggccagaggcggaaatgcctcactgttgtggttcatgattccatcacagacattaatgaaaccttctatccacccaaggggcacaccactgtttccccctccatcacttttaattttgccccaacgttgccagccctcacttgacatctggcttgtgaggatgacttctgtggagctagctattgtttcttccgtcatttttaaacaatactagaggacagtggggaggggagagggaatcacagctcccacacaagcagatgcctatttgagagtgtgcaaaagcagtgtgacattctggaaatagtagtctcttttcacttccttgcccattcttctccatccatacaaatgacgtattttctgacattggttcagggtttgaaacctcaggctttcagagtctgcccacatttttgagaattctgtcttaatgaatgtatgccgtgaaaagcattaaccattactttcattctgttctagtgaaaccgcccaatgctctgcgcttgtacaaaatcctttggacttttaattgggcgataactttgcaagtggttaagcactatacaaattaaacttcagtcattcagcaatgttattgaacacttatatcttcccttaatttccttactcttcatatctatgttttatgaaattgagggcagcacaggttagcaaaagtggtttgatcttagaatgctttggtatttaattctgtgcagagtttctggtaattcactctcaccagcttagccatgtaatgccacaactccatagatggtggttgggcaccatgggtttaggcaccacctcctctcatttctgtttgatgttttcaagtgaagttaatttacagtaggatatagaaaggttaatgatttgggcagagaacttgctttccctctaccatataattgtgattttgactctactttttgttttgtgtgtgtgtgtgtgtgtgtgtgtgacgaagtctctgttgccctcgttggagtgtggtggcgttatctcggctcactgcaacctccacctcccaggttcaagcgattctcctgcctcagcttccctaatagctgggactacaggcatatgccaccacacctggctactttatgtagttttagtaaagacagggttttaccatgttggccaggctggtcttgaactcctgacctcaagtgatctgcccacctcagcctcccaaagcgctgggattacgtgcctggcttgattttgactctgttgaagtcaaagacaaatgatccagcagagacagtataaggtcttatcctgattctcaaattgtgtggaagacaaatatgacttaaaaatgacattaagacaaaagagtaagtagaggctgagaaatgggattggatgaggcatgtactccatgtggaatgcctattcagttaattgaagggtgaaaatcttgctttgtaaaacaaagtgctataaaaatggatacctggagaccatatcctacttctccctgcaattttcgaatattaatctgaaagggagaaataaatgacccaaaagggtcttggggtagagaaccatgctctagacgtttcttgttggtcatgtctccatctcagcaggaggatgagtggtgtcctgcacccatgcaagacttttaagttctggccaggcgcagtggctcatgcctataatcccatcactttgggaggccgaggcgggtggatcacatgaagtcaggagttggagaccagcctggacaacatggtgaaattccgtctctactaaaaatacaaaaattagccgggcacagtggcgggcagctatagtcccagctactcaggaggctgaggcaggagaatcacttgaacctgggaggcggaggttgcagtgagctgagattgcgccatcacactccagcttgggcaacagagtgagactccgtctcaaaaaaagagaagatttttaagttcctaagctgctgcttgaggtctgaagcctcaaatgatgcagctaatgagtaggtcaacatattccttttcttccccttataaatggagtaatacatttaaaatgtagaggctggttgccagcagtggcttaggtctgtgaggtccagggtgacgaagtgcacatgtgttgattaagtttcaatcctctgcctctagaaaggcctcgtccttcagcctggtgtcatggatggcgtgtccatggcctcttctgcctggatggaggtcccatgatctccatgctgccagctcctatcccatggccatgcttgggggctccctttgacatcttcagaggaccctgagaacttttcctgacgcctccgtctcccaatctgtcttagtctgttcctgctgctgcaacaggaaacctcagactgggtaatttttaaacaacagacatttatttctcatcattttagaggcagggaagtccaagatcaaggcatcagcaaattcacttgtctgttgaggactcagcctccgcttctaaaatggtgccttgttgctgtgtccttgcatgtcgaaggcaggagggcaaaaggggatgattgtgttggctgtgtcctcacatggtggaagagatggaagagggaggcagctctcctttttttttttttttttttttttttgagacacagtttcgctcttgttgcccaggctggagtgcaatggcgtaatcttggctcaccacaacctccacctcctgggttgaagtgattctcctgcctcagcctcccgagtagctgggattacaggcacccgccaccatagccagctaattttgtatttttttagtagagatggggtttctccatattggtgaggttggtctcgaactcctgacctcaggtaatctgcccacctcagcctcccaaagtgctgggattacagtcgtgagccactgtgcctggcctgaagcctcttttataaagccattaatcccattaatgatggtggcgcccccatggcctattacctaacaagggtcttgcttcttaatacattacatcaccttggaggttaatttccagcgcgtgaattttggaggaagacatacgtccaaaccatagcagtatctcattatgctttgagtctctctttgcttctggccaaggcgtttcagtttcttctttcttgcttcagagatgaatagtcttcctgggcccagcgctgcagtggtctcccttttcctgtggtgccttgttttttttgttttgttttgttttgtttttgtttttgagacggagtttcactcttgttgcccaggctggagtgcaatggcatgatcttggctcactgcaacctccacctccagagttcgagcaattctcctgcttcagcctcccaggtagctgggattacagatgcccgccaccacacctggctaattttttgtatttttagtagaaacagggttacaccatgttagccaggctggtcttgaactcctgacttcaggtgatctgcccgcctcagcctcccaaagtgctgggattacagatgtgagccaccgtgctcggccggtgccttctttttgtgtttaaatagctcaggtcttattttgccccttcctctcctcctccctactttccttctcttactgcctatgatcaggtagcaggaaaggtgggtgctttcatgtggactgtcaggttgatggactcttgggagtcaagtcaaggccttgtctaactcatcttccctcatcttaatttccttgttttcgactgggtgcagtggctcacccctgtaatcccaggactttgggaggccgaggcaggtggatcacaaggtcaggagttcaagaccagcctggccaacatggtgaaaccccatctctactaaaaaaaaaaaatacaaaaattagctgggcatggtggcatgtgccagtaatcccagctgcttgggaggctgacgcaggagaatcacttgaacctgggaggcgaaggttgtagtgagccgagattgtgctactgcactccatcctgggcaacagagcaagactctgtctcaaaaaaaaaaaaaaaaaattccttgttttcttgcatcaaaatttaagaacacaaatcgtaaaatgtggaaggtctgtgggacagtaggggtaaatttccactagagtagaagtcagaagcctggcctcaagtgccctctctgctattttctagttggaaaacctttgacaagtgagttaaccttttttgagcttcaatttcctcattttaaaaatagacatcgtattgatcttatctatagggccactaaaaaaatcaactgggataaggtatacctacaaactttgcaaattggctgggcatggtagctcaagcctgtaatcccaacaatttgggaagccaaggcgggtggattgcctgacctcaggagtttgagaccagcctggacaacatggcaaaactccgtctctacacaaaatacaaaaattagctgggcctggtggtgcacgcttgtagtcctagctacttgagggggtgaaggcggggggatcgcttgagcgcaggaggttgaggctgcagggagctgtgattgcaccactgcactccagcctgggtgttagcaagaccctgtctcaaacaaacaaacaaacaaacaaaaaatttatagataaatgaaaacaagaaaaagctttgcaagttctagaaagagcgagtaacctgtttcaggcaatatgctaagcaccgtaggacaatagtgagaacagtgcaggaagctgggcgcggtggctcacgcctgtaatcccagcactttgggtggccaagccgggggatcacttgaggtcaggagttcgagaccagcctggccaacatggtgaaaccccatctctactaaaaatacaaaaattagccgggcgtggtggtgcatgcctgtaatcctgcctataattttagttatttgggagattgaggtgggggaattgcttgaactcaggagttggaggttgcagtgagtagaggtagcaccatttcactccagcatgggcaataagagagaaacaacctctcaaaaaaaaaaaaagttaaaaaaaaaaaagaaaacagtgcaggattaaaagtgggaagactggtttgaatcccaaacatggcatttcctagctgtgtgactttggtaaattacttaatcactttgaagtttattttcatcatttctaaaatagggacaataacgtgaggtaaaatgtaatgctattgctagatatcaaaaattaccatgtgtcatacaaatgttagctgtttcattgttactctccaaaattatttagtgtagtgatacagagactaatttttggatatatttaaaagtaccatactgttagaatcctgggaaatgaaggagtatttcttgtgatccacgttgcaacctcttttggaatctagacatgaatgtaaggagcctggccaagtttctttatcttccacataaaataaagttcacttgattaattaagtgcattgttttatcttttttttttttttcaggatcttgagatacaagaaaagttttctatctcgtatttggcaaacctaattcactaactgtggtgtaacttttaaaacctttggtattttaatgtttatatttttaaaagggaggtaaaaaaatttgtcttactaggtgggatggccgtaaggtaaattgagataaattaaggatagattttggaaacctgaaagctaacatgttttactgccatcttttcaatatattttgaaacaaatataaagcttttgtccaaaagtgctttgtttaggacaggcttaaaattactaaaaaactaaaatgaattaggttctttcattatttaaaattatttcaatttaaaggtttgtttcattaaagtagccttgactttcacagttcaaaataatgttaatataaaatatagttgaaataatctttctaaataacagaaacagagacattaacaaagacacgcaattttttttttttttttttttttttttttttttttttttttgagacaaggtttccttctgtcacccaggctggagggcagtggcgcgatctcagctcactgcaacctccgcctcctgggttcaagcgattctattgcctcagcctccctagcagctgggactacaggtgcacgccactatgcccggtgaatttttgtatttttagtagagacagggtttcaccatattggccaggctggtctcgaattcctgaccttgtgatccacctgccttggcctcccaaggtgctgggattacaggcgtgagcaaccgtgcctggccaaaaccacgcaattttaaggagtactcagacatgccagtgtatcacaaatcaaacagataccaaataagaatgctaaggatttgatcaatgtaattaataagtagaattaagagatacattgtattttgcatgccactgagaatggaacctttcaaatgcacaagacatatttccaagagttcatcatatctttgtttccattatttttaaatgtctggataaattggtgactctttaccattaagtttaaaatagttgagttctactctcctactcttctattcttagaatagatgtgtagggctccagctaaaacaagaggctttgaacagccggctgtggtggctcatgcctgtaatcccagcacttcgggagcccgagatgagcagatcacttgaggtcaggagttagagaccagcctggccaacatggtgaaaccccgtctctactaaaaatacaaaatttagccaggtgtggtggcaggcacctgtaatccccgctactagggaggctgaggcaagagaatcgcatgaacccgggaggcggaggttgcagtgagccaagatcatgccactgcacttcagcctgggcaacagagcaagactgtctcaaaaaataaaataaaaaataaataaataaataaaaacaagaagctttgaatacttcttcaagtctaatgagactgaacttttgccaccagttaccacccctacccccacccccagccttttctagtctgcatagaactttggggaagggttgaggaggagaaggtctcttcagctttatagaggacatgagagagacaattcccagagacacttgccatgaggattggggtgcctgcaggaagacagcattagcattggattttctggttgagtgactgctcgggctgagttgccaacctgcccctgtgcctatctgggttgggaggagagaatggagaagaacagcaggaagaaggttgccaatggagcagcccacatatctccctttcagtttgtcaaggatatgcatggtctccaagggtgaaatggacactgggaatggtggttggtcctgagccatcttgctagaactttccctaagtggctggcttttgataatgggagccaaggcgtgggtggagaaggttgagccagacctatatcagggaagctgtgcagtgaggagctcccataagaccctcagaggaactcacatcccagccggcattatccagagacacgatcgtggccacttatgcagggagatatttgcctttctctctctaccagttcctcatgggaggaggatgcgctggaggccggggaacgagaaagaaatgtgtaaaaggctataacccagcccttcctgtttagaatccaagtaacagctttgcctgaccaaggcaggaacttacataaaaccaaaattgaatttgagaatagaaatgtaaattgatcaggctgggcatggtggctcacgcctgtaatcccagcactttgggaggctaaggtggttggaccacctgagttcgggaatttgagaccagcctgaccaacatggagaaaccctgtctctactaaaaatacaaaattagctgggcgtggtggtggatgcctgtaatcccagctactcaggaggctgaggcaggagaatcgcttgaacctgggaggcggaggttgcagtgagctgagatcgcgccattgcactccagcctgggtgacaaaagtgaaactccatctgaaaaaaaaaaaaaaaagtaaactgatcaagaatataatcacctaaagtatgacccccaaattaggagatcggtgtcattaaagatgagaaagaggtttataaatagcaatttggggccaggcatagtggctcatgccagcaatcccagcactttgggaggccgaggtgggtggatcacctgaagttgggagttcgagaccagcctggccaacatggtgaaaccctgtctactaaaaatacaaaaattagccgggtgtggagtcaggtgcctgtaatctcaattactcgggaggctgaggcaggagaatcgcctgaactgtagagacggaggttgcagatcgtgccattgcactccagcctgtgcaacaagagcaaaactaaaaaaaaaaaaaaaaaaaaaaaaaaaaaagtaatttgggggcggggcttgctggctcacacctgttatcccagcactttgggaggctgagatgggcagatctctggagtctaggagttagagatcagcctgcacaatatagagaaaccctgtctctacaaaaaatacaaaatttagctggacttggtggtgcatgcctgtagtcccagctacttgggaggctgaggcaggagaattgcttgagcctgaggggtgggggttgcagtgagccaagatcacaccacagcattccagcctggatggcacagtgagactttgtctcaagaaaagaaaaagtttggtagccttgacgtgattaaagtaagaccatttcatgttaattgcccactgagaggataacactcaaatgaacccagtttcagattctccttttcacatcattatgatatcaaatattcatcctctatccaaattcatcccagaagagttggtattaagtacttagcttctaggagcattgttattaggcctggagcccttgacattatgtatggtgtgaagtatatgtaaagatgaaaagatgactcaaggcagtaggtgtttgcttaagtgaattacttgtgataattgcatggcctctgtacacaaatggaaatatcttcattttaagaattgggtttgcattgtcaacggtgtgtgggacagctcctgagacacctaaaagatatataatagacaaagtaacactgagagatgctcaaaactactgagttgaaggagccatactctaaatagaagactgtaagcattatgataccatgtcaacacagcttaataaaaagctactttacaaagggagaaatatcgttcctaatgttttccatagagtcagtgaatgaattgagaagtggatccaggatttcatgtatcagcaccataggttttatcatttatataatccttttttctgtcactgtcaagattttaaaggggggattatggtttgacttaaagagagtaggcaattcaggcataccacacaaagctgttaaatctcagaggcttgagatttcttggctccttttaagttttggaagcagagcactcctagggaatgctattcggaattggcttcatggagaaaatgtagcttttgggcagttagcttttgaagctgagagaggataataggttggtgaacaagaaggcaaaagttgcttcaggtttgaaaaataaaggagtgaggaggtgatagtcttgtgaagactctcactgtaatagttctttgcaggaccaagtggttctccagatcgagctcaattttcccctgagtgcattttctgagttgtgataaagcccaggtaccctcttacggagcgacttatctctttgtgcccaattgctagggctgtgctatcatcttggccaactgcccatttcctttgggtctgagagaacatttcaatttaaatctgattgtatagatttaggacttgggggaaaaaaaggtatctggagtgactttttttttttttttttttttgagacggagtcttgctctttgcccaggctggattgcaatggtgcaatctcagctcactgcaacctctgcctcctgggttcaagtgattctcctgcctcagcctctgaatagctgggactacaggtgcgtgccaccacgctcggctaatttttttttgtatttttagtagagatggggtttcaccatgttggccaggatggtctcgatctcttgacctcgtgatccacctgcttcggcctcccaaagtgctgggattataggtgtgagccactgtgcccggccaacttttttctttctctgcctcctactatgagagttcccatctttgatggatgactcagaattcaaattacacctagaagcaaacacatcaggcttgagggtagagagggagagaaaagaacaactgtcccatctgtgtttcatcctgagtgggaggttcaaatctaggtattggcagaatgagataaaggaaggagagattgagaaagagtggaagtgggatggaaagttattaagggaagtcattccaggacagttttcacccactcagtagattacaggacgccatggaagaactgaactacctcggtaggctgcacctcaggctctgtgcagactaatgtttttattgcttaacaggtattgagtcaccttgttaaatgccatccctaatatagagatgggcttattccttgccccaaagctattgggagcctagttaggaagacacgtaacacacacaggtcccaacaccacacaagaatggtgctcctgtcattctattaagtggcttaccaggtggaatgaagttatcttgctgggagtcctctgccagcgagttcagtctgatgagaaatttgaaatttgatgcaaccacattgcatcaatagtaagggttttgggaaggcttcgctttgctatatgttgagagagacttgattcttggcaccgaggaggagagctaatggccctcaccctgcacgtgcttgagtgtgaagtggttaaaacaaaattttcttttactttttaattttaggtgatattttgatagggtcataagaatagtgtttcctacctaggcccattgctaataccactgtattaagtcttcttagaagcccatgaattctctggctaaaaagtcctgggggctccctgtgctagacgtagggggacatataaatggttttgaatttcagtttctatgtcagtgagaattctgtgccagaaaagagcatctgctctttattttacagatgaggaaatttagtcccagagagagcgtgatttgcctcttcccttgagattagccagcagagtcaataagaaaaatctaggtcttctgattcagtccagtgcctttctctgtatgtcgcactgtttccctcattatcttgagatttgctggagccacaggactgcacaatggttgtgcatatgtggatttgagtgccacagctgaattaactcatgtcaatctcagtcccaagcctgttcccacaacacgtggtaaatcgtcactccttgtggtctcagaattgggtgcctggaggatatcataatcaccagggatagttttttctgttgctgcctggtgcacacatctcctctgccttgacttgtctgaagtctttccctctttgaggcagggactgaaggggtggagcccagctgtgcaagtgcaaaggcatgcagccctaagctgagcctaatttgagcccattgagtagtactaattttgactcattatatttttgaaaattcagggcataggttttttgtttgttttttgagacagagtctcactctgctgctcaggctgaagtgcagtggcgtgatctctgctcactgcaacttccgcctccgagatttgagtgattctcttccctcagccccccgagtagctgggattacaggcacgtgccaccacacctagctaatttttatattttagtagagttggggtttcaccatgttgaccaggctggtcttgaactcctgacctcaggtgatgtacctgcctcagcctcccaaagtgctcggattacaagcgtgagccaccgtgcccagcccagggcatagttttaaggcaaacgtagttgtggttttaagaacgccggtttgaggtgcactgagactgagcagggaggggtatttgttactgtggacctggtgatgaggactcccttatgtcttctctgagctagaacttctcttttgaattggcttcatgcttcaaactcatgacctctcttaccttattggttggcaggttttgtgcaatggattttatcagtaaggaactgaatttaaatcttgcaattagataatgtgattacttaaggggactttcactattttaggccgggactccaatcaaataaatcccaggccctgcccaatctatgtgctcaaaattttcgagttttcagttgtgatgggtcaccctctgtatattcttactgtagtacacaatgcaaaatgtatcaagataattaactgatttaggtgttcacagtgctattatggaacattacttcttttagtgtgacacgcattaggctctatcacttgtgtcatgctagcctgattagcacctcttcctagggctgtacgctgactcttattttttttgagacggagtctcgctttgtcactcaggctggagtgcagtggcacaatcttggctcactgcaacctctgcctcctgggctccagcaattctcctgcctctgcctcccgagtagctgggatcacagccaccatgcccggctaatttttgtatttttagtagagacagggtttcaccatgttggccaggctggtcttgaactactgtcctcgagtgatccgcccaccttggcttcccaaagtgctgggattacaggtgtgagttaccgcacccggccccctgactcatttttagagaagaaatgttctgttttctagaagcattttctaacttctcaaggggccaaccgaagtttactttcgttgttcttctgtacgtgtgcctggtttcctaaagccctttgcttgggaacagctcactcagtgaggctgcctggggtgttgcagcctcaggtgttggtggtgtagggttttctgtgcttgcccttctgccacaacttctgcagtttctcatttcctgctctgctccctgggtcccaggtactggtcgctcatttggctttattgcctatgagaggcttgggcaggtggcattgcaacacctctgcctttgtttcttccttcttcccatgagggctgggagaacaggagggagagaaggcagaggggagcacgggtgctgatcgcccattaatttaaacacagagaagggtaactggaaacaggcttcctttctgcccctacaaagcctctttcctcctcttttctgctgcaggcccttaattcctctttcttgcttaggttctatatcttatgggattttttactttaggtatatagggactctctcaaaatgtttctataggctggtctggaaaactaattgctgtttatgatattgtttctatgtgaagctgtcttatgagatccagataaattgcaaacactccttaggaatatgaaccatctgcaagttttggtaagtaaacatatccttcgtttttgggtctttttaagtttgtctgcacttcattttggagtctagagttgtgacatgtagttttaaagatatcagagggcacaaagtgtattctttcctggcattaaatctcatttgccacctccccgcacttctaagatctctacgttttcctttccatgggtgtctttcagaggatcatattttggtctttggataattctgctttcggaatacagcatgtggctggggacttgctttaaagtgctatgcagagttttctccttttagagtgcattatttttcccccttggttgacttcactaaatactgcaaacccaagaagagtcccatggttgcagatctggtattgattatcattaattcttctctttatgactttgccacttaaatacacgtttagaaacaaactaaataaacattaaatggcataactagattttggacttgggtggtccagtgagtttcaacatatgcttagctttgaaaggtggttataaaaacactccatttaactaccccattaaatgattgggatatatttttaaagatttttaaatgtatgagttcagatatttttaaaaagaaagttggaattatttataatttattgtcatacaaattagctgaaaagggaaagtaaattttgcttatatggatgcttagtctctgtgtttcagtttggctggttgattgattggtctctagctgtgtggctttggtgaagtcactcaactctctgagctttggtctcttcagttgtaacagagaatatttcccagttgattcccaggctctgtcccactttggaaatgctagaactctgcaattctgtgaatttaaaagttgatatttaaaataatcatgtgaagcagaaggtatactgtctacttagccatggaagtggggagatggcaagttctggaatgatcaaaaaaggtttaggaatagtgtatgatcctgagccttgtctccaaagtcaatccttttttgttgccctgtttattgaactgtacgtacggttgggacaatagatggggcatctggaaaaaatattaaaaaaaaaaatgtatgggcagagacgatgcctcaggaccttaaatgtgctgtcatacagtgttcagtgatgttgctgttaaatgcagtgctctgtgactcagccctattagaagcattttggatttggcccaatggtgttttggcggtttttggattatgtgttaggagtcagagcgtctagagtaattcttggcattggatcatcatggcggacaggaagcaggactagattgcagctccagacagagcagcttgcggaaacttgcactacgaattttagctgcagatcgactgcaagaaaaaaccagcaatcccgagaggacccacagaccctctgaaggaagtggactgctcctgcaggagtcaggagacaccctaaatactgtgagtgctctaactgtggaagtgggaaagggagaccctcctctcctaaacacacccccgctggagctgaaggtctgtttgtgggagaagtttctgactttacctgcagctgagtcactttagagaactgagtgaaatacaggggtagaggaagcagcagaaaggccctgggagctcactgtatcccttagcaggccattcctgcctggcatcacagagatccattgggagggtgaccagaggagcagcaggtaaaactccacagggagaaggaactctccgagctgaactttgtaacaatttgaacaggaccagaagcctggtcagaacttgggggagggtgcaaaactagtgtgtagacaccacaggcgggggaagaaccaagctttttcttttgcagctgggaggtaggtagcccagggcaagttttcaagcccatcctgccctgcgcctggaaacagactcggggctgtttccagatatcagggcagggggcatgatgggagtgaggctggcccttcactttgtgtgggagctgggtaagacctgtgactgccggctttcccccacattcctgacaacctgcatgactcagcagagggagccatgatcctcctaggtacacaactccagtgacctgggaatctcatccccatccctcacagcagccacagcaagacctgcccaaggagagtctgagcttagacacacctagccctgcccccgcctgatgatccttccctacgcaggttggtagcagaagataaaggacatataagcttgggagttctagggctggtccctctctatgcaactatagctgatactgtctggaaagtgccacctgccagcaggaggccaaccagcaaaaaaacagagcattaaaccaccacagctaaggatccccacggagtccattgcaccctctaccacctccactggaacaggcgctggtatccaccgctgagagacccatagatggttcacatcacaagactctgtgcagacaacccccagtaccagcccagagccaggtagactcgctgggtggctagacccataagagagacaacaatccactgcagtttggctcacatggaaccacatccataggaaaagggggagaatactacatcaagggaacaccccgtgggacaaaagaatctgaacaatagccttcagccctagaccttccctctgacagagcctactcaaatgagaaggaaccagaaagccaaccttggtaatataataaaacaaggctcttcaacaccctcaaaaaaatcacactagttcaccagcaatggatccaaaccaagaagaaatccttaatttacctgaaaaagaattcaggaggttagttattaagctaatcagggaggggctagagaaaggggaagcccagtgcaaggaaatccaaaaaatgatacaagtgaagggagaaatattcaaggaaatagatagcttaaagaaaaaaaaaatcaaaaattcaggaaactttgacacacttttagaaatgtgaaatgctgtggaaagtctcagcaatagaattgaataagtagaagaaagaaattcagagctccaagacaaggtcttcgaattaacccaatctaacaaagacaaagaaaaaagaataagaaaatacgaataaagtctccaagaagtctgggattatgttaaatcactaaacttaagaataatcgatgttcctaaggaagaagagaattctaaaagcttggaaaacatatttaggggaataattgaggaaaacttccccggccttgctagagacctagacatccaaatacaagaagcacaaagaacacctggaaaattcgttgcaaaaagatcattgcctaggcacattgtcatcaggttatctaaaattaagacaaaggaaagaatcttaagagctgtgagacagaagcaccaggtaacctgtaaaggaaaacctatcagattaacagcagatttctcagcagaaaccctacaagctagaagggattggggccccatcttcagcctcctcaaacaaaacaatgaccagccaagaattttgtatccggtgaaacttagcatcatatatgaaggaaagatatagttgttttcagacaaacaaatactgagagaattcgccattaccaagtcacaactaaactgctaaaaggagctctaaatcttgaaacaaatcctggaaacacatcaaaacagaaccgctttaaagcataaatcacacaggacctataaaacaaaaatacatgttaaaaagtaaaaacaaagaacaaaaaagccaagtacacaggcaacaaaaagcacgatgaatgcaagggtaccccacatttcaatactgacattgaatgtaaatgtcctaaatgctccacttaaaaatacagaaccccagaatagataagaactcaccaaccaactttctgctgcctttaggagattcacacaacacataaggactcatacaaacttaaagtaaaggggtgaaaaaaggcatgtcatgcaaatggacaccgaaagtgagcaggggtagctatttttacatcagacaaaacaaattttaaagcaacagcagttaaaagaggcaaagagggacattatataatgataaaaggccttgtccaacaggaaaatatcacaatcctaaacatatatgcacctaatactggagtttccaaatttatgaaacaattactaatagacctaagaatgagatagacagcaacacagtaatagtggggggcttcagtattccactgatagcactagacaagtcatcaagacagaaagtcaacaaagaaagaatggatttaagctataccttggaacaaatgaacttaacagatatttacagaacatttcatctggcaaccgcagaatacacattttattcaacatcgcatgggattttctccaagacagatcatatgataggccacaaaacaagcctaaataaatttaagaaaattgaaactatatcaagcactctctcagaccacagtggaataaaactagaaatcaactccaaaaggaaccttcaaaaccatgcaaatacatggaaattaaataacctgctcctgaatgagcattgggtcaaaaacgaaatcaagatggaaatttaaaaattcttcaaactgaatgacaataatgacacaacctatcgaaacctctgtgatacagcaaaggcggtgctaagaggaaagttcatagccctaagtgccacatcaaaaagattgaaagagtacaaactgacatgctaacgtcacacctcaagcaactagagaaacaagaacaaaccaaacccaaacccagcagaagaaaggaaattaccaagatcagagcagaactaaatgaaactgaaacaaacaaacaaaaaatgcaaaagataaataaaacaaaaagctggttctttgaaaagataaataaaattgatagaacagcaaaattaaccaagaatagagaaaatccaaataactacactaagaaacgaaacaggagatattacaactgacaccactgaaatacaaaagatcattcaaggctactatgaacacctcgacacacataaactagtaaacctaggagagatgggcaaattcctggaaaaatacaaccctcctagcttaaatcaggaagaattagataccctgaacagaccaataacaagcagcgagattgaaatggtaattaaaagattaccaacaaaaaaaaagtccaggaccagacggattcagagcagaattctatcagacattcaaagaagaattggtaccaatccttttgacactattccacaagatagagaaagaaggaaccttccctaattcattttatgaagctaacatcaccctaataccaaaaccaggaaaggtcataatcataaaagaaaactgcagaccgatatccttgatgaacattgatgttaaaattcttaacaaaatactagctaactgaatccaacaacatatcaaaaagataattcaccatgatccaagtgggtttcataccaagggtacagggaaggtttatatatccaagtcaataaatgagatataccacataaacagaattaaaaacaacaatcacatgatcatctcaatagatgcagaaaaagcatttgacaaaatccagcatcctttatgattaaaactcaggccaagcacggtggctcacgcctgtaatcccagcactttgggaggctgaggtgagcagatcaccaggtcaggagttcgagaccagtctggccaacatagtgaaaccccacctctactaaaaagacaaaaaattagccaggtgtgatggcgtgtgcctgtaatcccagctactcaggaggctgaggcaggggaatcgcgtgaactcgggaggcagaggttgcagtgaaccaagattgcaccactgcactccagcctgggcaacagtgcgagattctgtctcaaacaaacaaacaaacaactctcagcaaaatcgctcatacaaaggacataccgtaatgtaatagaagccatcatgacaaaccaatagccagtataatactgaatggggaagagttgaaagcattcactctgagaactggaacaagacaaaaatgcccactctcaccactcctcttcaacataggaagtcctagccagagcaatcagacaagagaaagaaataaagggtatccaaattggtgaagaggaagtcaaactgtcactgtttgctgacgatatgatcatttaccttgaaaaccctaaggactcctctggaaagctcctgaaactgataaaagaattcagcaaggcctggcgtggtggttcacgcctataatcccagcactttgggaggccgaggtgggtggatcacgaggtcaagaggttgagaacatccttgccaacatggtggaacccaaaatgcaaaaattagctgggtgtggtggcgtgcacctgtagtctcagctactcaggaggctgaggcaggagaatcacttgaaccctggaggcaaaggttgcatgagcctaaattgagccactgcacttcagcctggcgacagagtaaggctctgtctaaaaaaaaaaaaaaaaaaaaattcagcaaagtttctggatataagattaatgtacacagatcagtagcaaccaagcagagaatcaaatcaagaactcaaccccttttacaatagctgcaaaaaaaacaaaaaaacaaaaccttaggaatgtacctgaccaaggagttgaaagacctctacaaggaaaactacaaaacactgctgaaagaaatcatacacaatacaaacaaatggaaacacatcccatgctcatggatgggtagaatcaatattgtgaaatgaccgtattgccaaaagcagtctacaaattcaccgcaatctccatcaaaataccaccatcacagaattcttcacagaattagaaaaaacaattgtaaaattcatatggaaccaagtaagagcacgcatagccaaagcaacactaagcaaaaagaacaaatctgggctgggcactcacgcctataatcctagcactttgggaggctgaggcaggtggaacactagaggtgaggagttcaagaccagcctggccaccatggcgaaacccccgtcactactaaaaatacaaaaattaaccgggcatgatggtgggcgcctgtaatcccagctacttaggaagctgaggcaggagaatcgcttgaacccaggaggtggaggttgcagtgatcagagatcgcaccactgtactccagcctgggtggcagagtgaaactccatctcaaaaacaaaaaacaaataacaaaacaaaaaacaagaacaaatttggaggcatcacgctacctgatttcaaactatactataaggccatagtcactaaaacaacaacatggtactggtataaaaataggcacatagaccaatggaagaaaatagagaacccagaaataaacacaaatacttacagccaactgatctttgacaaagcaaacaaaaacataaagtggggaaaggacacccttttcaacaaatggtgctggcataattgactagccacatgcaggagaaggaactggattctcatctctcaccctacacaaaaatcagctcaagatggatcaagaacttaaacctaagatctgaaactacagaaattctagaagataacactggaaaaacccttctagatgttggcttaggcaaggatttcatgaccaagaacccaaaagcaaatgcaataaagacaaagataaatagctgggacctaattaaactaaagagcttttgcatggcaaaaggaacagtcagcagagtaaacagacaacccacaaagtgggagaaaatcttcacaatctgtacatctgacaaaaaacctaatatctagaatctacaatgaactcaaatcggtaagaagaaaacaaacaataccataaaaaagtgggctaaggacatgaatagacaagtctcaaaagaagatgtacaaatggccaacaaacatatgaaaaaatgctaaaagtccctaatgatcagggaaatgcaaatcaaaatcacaatgtgataccatcttactcctgcaagaatggacataatcaaaaaaataaaaaaaacagtatagatgttggtgtggatgcggtgaacagggaacatttctacattgctggtgagaatgtaaacaaatacagccactatggaaaacagtgtgaagattccttaaataactaaaagtagagctaccattagatccagcaatcccactactgggtatctaccaagaggaaaagaagtcactattcgaaaaagatacttgcacacgaatgtttctaatggcagaattcataatagcaaaatcatggaaccaacccaaatgcccatcaatcaatgagtggataaagaaactgtggtatatatatacaatggaatgctatgtagcatttgcagtgacctggatgagattggagactattattccaagggaagtaactcaggaatggaaaaccaaacatcgtctgttctcactgatacgtgggcgttaaactatgaggacgtaaaggcataaaaatgatacaaaggactttggggaattggggggaagagtgggaggagggtgagagataaaagactaaaaatatggtgcaatgtatactgcttgggtgatatgtgcaccaaaatctcacaaatcaccactaaagaacttactcatgtaaccaaatactacctgtaccccattaacttatggaaaaaaaaatagagtaattatttcactcctgtaagttgacattttgcatgtaactccccaggagggagagagagtacttttccttttcatttttgtttcttttatgtcttttcatgatcgtctttgttctctttctctatgatccattctatcttttttttgttgtttttcaagatggagtcttgctctgttgtccaggctgaagtgcaatggtgcaatctcggctcactgcaacctctgcctcctaggttcaagcaattcttctgcctcagcctcccaagtagctgggattataggtgtccaccaccatgtccagctaattttttgtattattattattttttaaaatttcttcaagagatggagttttgctcttgttgcccaggctggagtgcaatggcatgatcttggctcactgcaacctccacttcctgggttcaagcgattctcctgcctcagcctccccagtagctgggataataggtatgcgccaccacacctggctaattttctatttttagaaaagatggagtttctccatgtgggtcaggctgcttttgaactcttgacctcaggtgatccacccacctcggcctcccaaaatgctgggattacaataggtggagccaccacgcctgaccattttcatatttttagtagagacagggtttcaccatgttggccaggctggtctcgaactcctggcctgaagttatctgctcgaaatcccaaagtgctgggattacaggtgtaagccactatgcccgaccaatccattgtattttgtgatccatttccccacagcaaagagttttttgggggtgattagttgtcctaggttacttccattgagggttcttaactggtttccttgagtaagaattagagattaggtggtgatctcatgaaaccactgtagagggggtggttatacagagaacaaatatattaaatgttaaagaaacttggcacttgaacttaagtgttctcaaaatcagaccttgactgttatttaagtctggttcctgcaagcagagcctggggcaagccatttggacttgtcacagaggtagcctttgggcagatgctaatggcacatgaagaaagagtgaccacagtgttttatgtaggttcctttgatcattcttaactggtttttaatattataccaacatttaatcagaaaccaacatagttctcagtactctaactctgggaatcatctctatatcccagccccaaaacctacagtggaagattggctgttttgtcaatatctcatgtaagaaactcttcctttgagaaaaactatagcagtgaggacttaggatttcttcgtgtttatcccagaatgctgagggaattcaggaatcatatctttcagtatctcagaaccctacacagtgcccgtctttttagtgtggtttttcagttggattgcgtttctgaggcccctgtaggaatcttcctttggaatctttataaaccagatagaatctaattggtgagagaagccagagaatccaataaaccttgtcccttctctcttactgtactatatccatctatacctattttttaggtttaagttgttttaaactctaaaggtagagtaaacattaaattgtatgttttactgttcacatttagcaatggtaaattgctaagagaattaaaaaaataagaaaccctacctttcagtaataggctggtgaagtatcattaaatccttagaaatcaaaaagaaatgggcaaaattcaagatattgtgagtaccttgttaggataatcgtggtagagacttctgtctgcctatatctatcccgattttctttcttttttcttttttctttttttttttttgagacagagtctcgctctgtctcccagtctatagtgcggtagcaccgtcttggctcactgcagcctctgcctccaaggttcaagtgattctcctgcctcagcctccctagtagctgggatcacaggcacgcgccacgaagactggctaatttttttgtatttttagtagagacagggtttcactgtgttggccaggctggtctcgaactcttggcctcaagtgatccacccgccttggcctcccaaagttttgggattacaggtgtgagccacatacccagccctgattgtttctttgtggatggttgggctgtttaagaaacatggatttttttttttactgtctccacttagaattttgttgttcaggtctttttctatgagttccatagcaatattttggccatgattcttgcttggacttgatatttttaggcttcgtgaggatttatcattctatcgtctaggcatcctgccttctgatcattctccttgttgcttccatgctggaagtgatgctagaggcacaggtctgtgcaattacttctacaccgtaggtacctggggtgcttaatggcagagactgtatttgtcagttggtggtttagacaagttacaggtaaaacactatgaaagcctctgtctagattcttatctctctttctctagcagaatcaaacagacagaaatgaagttgaatgctgggaagtctttgtttaaaaaagtggttgctgttgtctagaatcacagagacactcagaaggaattgggactggatgtggaggaaagacatcataaaactttacattgaaagccaaagatgtgaagttaggcctagtcaagtgttaattctgaaagatcaaaacacatcatcctggactgtgaaggtgtgccttctgtaagttaaatggaatgagatcttcttcagtgcacctgatgtcttgggaagggtgagttgaggcgtggtggatgtgaaacatgatctcattataaatgttcccatttgttttatgtgttcagtttgttttgtgctatctagataggaaatctaaaggctgagaaaatgtctgctgtagacatggcagtgattctttgatactaaatagttggaggggagccgagtgattgcgtgacttatttttagacaatatagggactcccttgcaaagggaggagttgggaagaatagacgtgttaggaaccaggttagcctggagatttctctggttacctgaagctggaaaaatattggaagaagaaattattcaatgagaactcatgcagacctgagtctccagttatgcctaagtggccatgtcagatctgtgaacctctctgctggcttcttaacaaacccatatttttacaaggaagatgatctgggttagaggaattattaattatatttcagctcacaaattcctctttactatcacccctttagccccatgtaaactctgttagggtttggttaagtgtagaaactgatatgtaagcaagagtaagaagatgaagtcacttatctggaaatttctttaaacctttaattattgtaaacaaaagatctggtctctttggagctggtagtaatgtcttagttttgtggctgttagttttttgactctatcagactgagtcattgttttatttgaagatctagaataacatcatctacaaagaaatgattacagtaattgatcttgatactgcctcctcctagttgtatttatataattatctaaaagggtttttaatagaattactgcaacaagcctgaaaaagtctgtgctaagtggtaacaccttgaaacaggatcaatatgatcccgccttcaaggggcttttggatttgtctagcctactatatggctgagtactagactcagttatcccattcctcagcaaaagaaactacagaagtttgagggaatatcagactcttggcacacaattgacatttagtaaacacttgataggcagttggtagtgggtggcagcattcacagatgaattctgaagtagatggtgaatgatgctgagattttctttaccagtcctggtgacactgcctgagctcacatgataagatcctggtagagtagcatttattcttcttttgcagactcagctaagaggactttgcagttgaggctgaatcttgatccatgtagtccattcccgatggtgctatttagaaggccttttgttgtctgagcaaagttgtcttcctggccttactactgaatcttggcaaaggatcaatgggtaagccccatcctccaaagatctcatataacataactggtatcaggacactgattacatgcaagcagttcccacatgaagagctttaaaattgagatttttctttgaaatttaaaagaaggtggaataaaaatgtgcttgctttccaacatagatcgattagctggcacggagagaacaccggcctttgaaatctataggcatcctgttgcaggcctgacccagctgaccctgggagattagtaatggtctgtgcagcctgctctgtcagcaagtctggcagggtgtgcacagatggtgccagttggagaaaatcactgccgaacagtgcactaaagcctctgccttggccattctgccttggaggaggagccgagagtgagactgggtggtttacagacgtgttcctgccaaatgccttggaagagacctcagaggataccagtccgggtttaggatgcatttgctgattattacttaagtaatgttttcttgtcatagcttaggccttcctgagttgttgggcatctgggatttttacagggtctgtggccttggggttgttctgaaagggaatttgaaatgagaactgatctcattccaaggagtcaagcataatgcaatacttgttttcctagagtcaatcagcctagggaaaatgcgagtaggctggaagcggggaggaggaggagtctgagagtttgagtaatcaacttaacccaggggtaaaaagaattttattatagaaagcagcacacatgacctctgtccttccagctgccaccagtttctgggttgtcgagtgataccctgaaagtttacagtcaacactccttgtgtggggtcagtcctagaaatggcgacgctgctctccgaagataggaaagaaaaggacctcattccattgagccattgaccgaaatattttctcaacaaagttgaactgagctgaaactgtaagcctgttcttcctaattagacattttattctttgaaaattctacttggagttgcgttgaaaagtcaaagttgaggaaatgcatctttctaaaatacttccctctgagctgtatttcaacaggttgaggacaggctgaaaaaatattaatgttgaatgaaagatgtgagggtgtctgggtgtctgtaattacagagggtaactgaatcagtgagtggacttttcccattcccaacttttttggtattcttcctgccacaactttgtcttttaagtctccatccaggttagttctggctttgtagttcgttactgtttaacagacttgtttgattccttttgtgttgttttatgaactgtggtgttgtttcactctggaagaattttccttggagatgctgctgctgtgaaatgagaacttctcttttgggtttttgaatgaccacccccacccaaagatacaaagaaacctatcgtgttcagtgcactctagtgcttttgaaattggtgtatgggagcatgctctggagggagagctgagagaatgaacagggcatttgccaacctcacacagtgagtgcagactgacacatacagcaatacttgctggaatctggaagagagagatagaaagcacacttaaatcagacagaagtgtaacttttcttgtttaatagagcatagctcaggcatgatagctttattgacaagatgggaggccgaagaaaggagagaagtcaaggatgactcaaagtatgagttaggagaaagcagtgggtactgaaatactttggcaagaggaagatgaggagttcagttttaagtagtttgtttttgaaatgtccattaggtctttggatatctgggtctgggtttgatcagagaggtctgggatggagatagtaatttcagagttgctgacacacagctggtgatgaagccacaagagtgaataaggtagcacagagaacgaagagaaatgggagtggatgaaatttggtatagaactaaaagcacactgtgatttctctcccgcgctggtatttgaacaatgacatgtatttgcctagagaagacaaataacaaaaatgactgggtgattgtgtgtggatcacgcttgttatatctttgatagggaaattcaaaacggtctgtggaagtgtagaaataaattcttgaaaatgaccctgaagtagatttttggagtgctttggtccgtttcacagatgctttaccatttgaagtagatgccaaaacaaacgagaagatagatagctcagggtttgtagtacatgaagccagcatctgctagtttatttagtagcaggagcaggaagagcagagggagaagagtgcagcagccgccaagaataaaacctggtcaagaggccacatcagcccagcttggcagacgggcctggtggctttggtaattatactggtgcctgctgtatgtgggccttttccactgagtttaaaaaaggctttcctctaactaccaggtctcccagcagttgggccacttttgccctcggtggtttttccctgtggaatatttgccgtgtctgtgctccgtggctgtgtttgctgactccagggtaatacccttggccctgctgtttcatgtggctcctgcccgtctccccctcctgacttagctcatagaaggtttgtgaggacatgcccttcgggaagagcccaggagaaaccacatgactgcatggctagaccagcacacgtggacttgaccaaagccttgtctttttccttctctccacctccctccctttttaatctattagtacttttgacataaataatatgtaactgactcagatctacagaaatatcatggcaaggcacatacctagtgatgagggcccattagcactgagacttcctttgggttaataatttcattatggatagaactcccttttgatactcacctttttttttaatttttattttttgagatggagttttgctcttgttgttcaggctggagtgcaatggcgcaatcttggctcactgcaacttccgcctcctgggttcaagcgattcttctgcctcagcctcccaagtagctaggattgcaggcatgcaccaccacgcccagctaattttttgtatttactagagacaggatttcccatgttggtcatgctggtctcgaactcctgacctcaggtaatccacccgacttggcctcccaaagtattgggattataggcgtgagtcattgcgcccggccttgacacccacatttgccaccaattctattttaagtatgctaactctgataatgacataggaagaaaacatactttaaaactgtagggaaatcaatcccaaaaagaattccatgctttttcctttgtgtacttccactatctatagtcccagagtacatctccaagaggcatttttgtttctatccacattgggggtattgctcgtatcactttatgggagaagaaatccataggtaccagttaataatgcattttgggcctcttgttatttgtattattcttcagaaggtgtcatagagtacattgagaccagggtatcctgaatatgtgcagttggaaacacttctggcatttgttgaagtttttgttgttgttttaagactccattctgctattcttaagtttgttttctctttttgctcccatcagtgttttcttttctttttaaaaatattcatccacagtctcctttatataaatatcagacagtaataaatagttaggtttagtctttcttttcttccccctgcctatcacgtactaagtactgtactgccttctggaaatggtctctgtcttcaaggaacttaagtgtccagcggtggtggttgcagggggttggtgggggtgggtggacataaataggtgcttttagtacagtatgatatgggctatgggggtataactaagccatttttgtcagggactgaaatcaggggccacttttgagaaaatgctctggccggatcttaaggaatgacctggagttaatcttttttttttttttttttttttttgagatggagtctcattctgttgcccaggctggagtgcagtggtgcgatctcggctcactgcaagctccacctcctgggttcacgccattcttctgcctcagcctcccaagtagctggaactacaggtgcctgccgcccacctgcccagctaattttttgtatttttagtagaaacagggtttcaccgtgttagccaggatggagttaatcttatctaggaagtagggcttgtttcctagccagaggggtgatctgggacttgaccatcatggggtagggcgatagctacaatagtttggtattggtgggttaaagggggtaggggtcaagtgctggaagacaaggctgcagagcaaagccaagatcaggtcttagactaagggtcatgtatgtagctggcgatgtgtattctatagtagactacttttccagctatgtggaggctggatggaattgggtaatgggaagagatgtgcagtagggaatccagttgagtggttattgccaaatggatgaaagatgagggtctgctgggcgtggtggctcacacctgtcatcccagcactttgggaagccgaggcaagtggatcacctgaggtcaggagttcgagaccagcctgaccaacatggcaaaaccccatctctgctaaattagccgggcgtggtggcacatgcctgtaatcccagctacttgggaggctgaggcaggagaattgcttgaactcaggaggcagaggttgcagtgagccaaggtcacgccattgcactccagcctgggcaacagagtgagatcccgtttaaaaaaaaaagaatctgggcgcctgtaatcccagcactttgggaggccaaggcgggtggatcacctgaggtcgggagttcgagaccagcctgaccaacatggagaaaccctgtctctactgaaaacacattagctgggcatggtggcggtcgcctgtaatcccagctacttgggaagctgaggcaggagaatcgcttgaacccaagaggcggaggttgcggtgagccaagattgtgccattgcactccagcctgggcaacaagagcgaaaactccatctttaaaaaaaaaaaaaaaaaaaagatgagggtctgaatggaggcaggtgtaggcactggggatagtcaggaggagacagatatgaggaatatttggagattaattcacaggacttcgtaacggttgtgatgtggtagttatggtgtgatgtgcgtagggggtggtagcaggtgagggatggggctcttaattttctagctgaaatgattggatagacgttaccagctaggattggaaacaagggaggaagaggggttaggaggtagggataccaattgcaagtttgttctattaacacatttcttaaacatttcttcaacttttaaactgcacctacggtcatgttttacttcttcctcataaaagttaaggtggccgggcgtggtggtgctcacacctgtaatcccagcactttgggaggccaaggtgggtggatcacttgatgtcaggagttcgagaccagcacggccaacatggagaaaccccatctctactaaaaatgcaaaaaatcagctggacatggtggggtgagcctgtagttccagctactcaggaggctgaggcaggagaatcgcatgaacctgggaggcagcggttgcagtgagccaagatcacaccattgcactccagcctgggtgacagagcaagactctgtctcaaacaaacaaacaaacaaacaaacaaacaaaaaaaccagttaagtatatgttcaggctaggcagtagctattttgaaaactcaggactaaaggaattcctgggagtatgtataggatgattagagttgcagtttccattgtcatgcagtagaacatcttgcgggggtaggtacacaatggtgagccatcagcaggcaacattgccagcagctggaggaataagggtcttggtcctgaatggttatccggatggtggacaaccgctgcctctacacatggcctgcaagaccttatatagcctgccttcttatgctaccacctctgggatctcattcctactgtttttcccttccctttgcttactttgctgtacccacattgtctttttttgcaaatgttgtttgaacatgtccaagcaaacatgctttagtttcaggcttctgtacttgctatctgattgactggccatttccttcctttctgttcaaatgccacctttaataaaggcctcactgagtgatttaatatagcacaccctgccttcaaactctctctatccctttatcctgcttttcttcatgaaacgcatccctctgacgttgcataaacatttagttgggtttttgcctatgttgctggtgggaatgtgaactctgggagggtagggactgcacgccattagtgtattatttgattgtgtatcttcaggggttttgaaagttgttcttggagaagatatcctgtaaagttgtgctttgctttagaaaaagttaacatagaaagattttattttatttttattttgagacagagtctcgctttgttgcccaggccggaatgcagtggtgtgatctcagctcactgcaacctccacctcctgggttcaagtgattctcatgcttcagcctctccagtagctgggattacaggcatgtgccaccatgcctggctaatttttgtatttttagtagagatgcagttttgccatgttggccaagctggtcttgaactcctggcttcaagtgtgccgcctgcaatggcctcccaaagtgctgggattacaggcatgagccactgcacccggcccaaagatttaagattgctagtgaatggccgggcatagtggctcacacctgtaatcccagcactttgggaggccgaggcgggtggatcacgaggtcaggagatcaagaccatcctggctaacacggtgaaaccccatctttactaaaaatacaaaaaattaactgggcgtggtggcgggcgcttatagtctcagctacacgggaggctgaggcaggaaaatggcgtgaacccgggaggtggaggttgcagtgagcctagagagcctagatcgtgccactgcactccagcctgggtgacagagtgaagctgcaactcttaaaaaaaaaaaaaaaagattgccagtaaaatataaacaaaggtagtagttgatattatgtattgcttattgtgggactcttagactggtgacttcacccagagcattttacatgtaacgagatttacaacaaagaccttctatgtacccctgttttcagcactgcatctattgtggaaaataatgtaaatgaattgcaccttctaagggtgtgctggtttgtcattacaatatactcttatcattggacaaacttcaattgaaataaatatgtatttatctgaaggcagaaattatgctattatcattaataattcagaagagttttcagttaagcattaacaacatcattgcctttggctgtgatctgactgcttgaactcatagtagtatcaaattatttttctcaatgaagacaaaattaaactccagataaccagaactcagaaatctcaactctttaatcagcatatgctcctttgagcatgtatcttataagaaagagatatataattgtaaaacatattaaggatttaacatttttgaagtgtcttttcctggagatatcctgggatctgtatccatttggcccagtgtcctatgacaacctcatctatagaacattaaagattctggttccaaacatgaccctgcacaatttgaaaatcccttgtcatcaaagaaagattaaattatgttcattacgtgaaaacatggactaattaatgtatatcctaaagacgtcagcgataactatagaaaggcttcctttcattgggtgggagatttaattggctgatctatgctgtccctgctaatgctgagattctctgattccctcacctcttaccgcactcagaaggctcaaagtataaatgggtttctggttaacctttagtgaatcagtaatttgatttatcaaaacacctcattcagtctaggagtctaataatatgtttagcgcatgtgcttttgtcagaagaatcttcataaaacatagtgatcgtagacaagagaatgcgtctttttgatttcctagaccaatagtggatgcttctctacattgcaagtcagcatagtgtgattctttaggctcccagtggtgttgaagttacttttgttacttgtcatgcttcctttattgcgtatgtgtgtgtgtttgtgtgtgtgtgtgcgtgtgtgtgtgtaaaaagcaataacagtggtgttacttttggagatttttatctacatgtattttttactctattaattttgcagtggaagtaatgtgtttccatctaatatacatcttgtaggccagtatcactctcagcacttcacattcacccctaattttttttgttaaaggcatgtttccacctcagacactaattattaaaatcgcatgatttgccagataaacacaaccaagtagtgtcatttgagcaacaaatcaatgagcaaatattgattcaacacacattccacatgagtatgacaccatctgcggttctgtacatgatttatacaggaagacacagagtgtctctgcctttaaatggctcaaagtcaaattagtggtagactatggagaaaacgcagaaaatcttaatgaaaactcttaaaccaattttcaacagctgctaacacagcagtgtggtcattcattgagtatctgctgagtgccctgctacaagttggaaggcgtgctgagggctggggttgcacagggatgtgacacagtcctggtcctctgggagtttaccgaatggagtttaccatctttgaccgtacagttagtaagatgaaatgatcaccttcagtaatccataagtgtgaatacagtaattatgttgattactcctaggtaaattgtctggaaggtctaatatctgttatagaaagagtagtcttcattgctagttactggtgaatttgcttgtggatctctaaattgtggggtgtgtgtatgagagagagagagtgagagagagagagagaagagagaatgtctgtagtaaatcatgttggatttgggagttctatatatttccaattctattttcagcctgtatcttttcttgtagatggtataatgcagttagaaagagcatgactgctgactttggagttcatagttctagttttaagtttgactttgcaacttaccaactgcatgcaattaggcaaataacataagctccatgagcctccacttatgcatctataaagaaaacacaataagaaaccctaacctatctatgtcatctgttatgtgagggctcaaatgagacaataaaaataaaatgaggggccgggtgcggtggctgacacgcctgtaatcccagcactttgggaggctgaggcgggcggatcctgaggtcaggagatcaagaccatcctggctaacatggtaaaacaccatctctactgaaaatacaaaaacaaaattagccgggcgtggtggcgggcgcctgtagtcccagctactcaggaggctgaggcaggagaatggcgtggacccaggagtcagagcttgcagtgagccgagattgtgctgctgcactgcaccctgggtgacggagtgagactgtgtctcaaaaaataaaaataaaataaaataaaatgagggccgggtgcaatggctcatgcctataatcccagcacttttggaggccaaggcagggcagatcacttcaggccaggagttcgagaccagcctgggcaacatagtgaaaccccgtctctactaaaaatacaaaaattaggtgggtgtggttgtgggtgcctgtaatcccaggtactcaggaggctgaggcatgagaattgcttgaacccgggaagtggaggttgcagtgagccgagaacgcaccactgcacttcagcctgggcaacagagcgagattttgtctcaaaataaataagtaaataaataaataaataaataaataagtgaaatgaaaggatttagaaaattagaaatactctatggaaatagtaatgggtggtggtgaaagactggttctcattaaatacctcttctatgaaagaggtgttttcatgaaacatggttttcagtttttgaagataattttggttgcatccaagggcaagttatagtttgtgggcctaatagtagtatgatggaaatttaaggactctggctcatgtccttgaacatttatcattgataaagggaaatccatgtgtcaagtgataattctaggattctaaatttcacttgcaaaccaggcttagacttaactttcgcaatgtgaaagaattatgtaaaagctggccatgtgcgtgttttgtttttgtttcactgagtaaagtttccgatctatcaagaagatgttggcgctctaatgttcattcatttatgtaaacactgcttcaatgtaagcttatgtttatgctgccgtatgttttgttcacgggtgtaaccccagtgcctagagcagggcctggtcacgaacagatgctcaatggatttttcttaaattaatgaccgtgttgagggactgttgtgttttaggcactctgcaaggcatttggaaatattgggaaagtagagtaaagatgtgtgacctgaagaacctcaaaatcgagcagggagaaagaaaaataaacagcaaatgacaactgtttaacaagtgaggagttatggggacctggatgtggggaaggtttgcagtcaggaagatttcatggaggcgatggtgacaattatgttccatgtaatctgttcttcttcgaagggcattgggggcggtgggagtgcttagctctctttacaggcaatgagagagttcactgtctgtaggaaatttaggaacaatagaccccgcatggtggctcatgcctgtaatcccagcactttcggaagccgaggtgggtggatgacgaagtcagcctgaccaacatagtgaaaccctgtctctactaaaaatacaaaaattagccgggaatgatggtccatgcctgtagtcccagctactgaggaggctgaggcaggagaatcacttgaaccctggaggcagagtttgcagtgagcctgagattgggctccagcctgggtgacagagcgaaactcagtctcaaaaaaaaaaaacaataataaaattgactattaaagtcagtctgtgcttttattatccctatgcaggggataattctgaagtaagactgtgataaaacactcgtggctgggtgtggtggctcacgcctgtaattccagcactttgggaggccgaggtgggcggatcacctgaggtaaggcaagaccagcctggccaacatggtgaaaccccatctctactaaaaatacaaaaattagccgggtgtgggggcaggtgcctgtcatcccagctactcgggaggctgaggcaggagaatcacttgaacccgggatgcagaggttgcagtgagctgagatcgcgcgattgcactctggcgacaagagcgagacttgtctcaaaaaacaaaacaaaacaaacaaaacaaaaaaaaaccacactcctttctccagtccctttcagatacttgaactccagagacaatcgtctctttgaaggtagagccttcctaggcacagtggctcatgcctgtaatctcagcactttgggaggctgaggtgggtgaatcagaaggtcaggagtttgagaccagcctggccaatatagtgaaactttatctctactaaaagtacagaaaattaggctgggcgtggtggcgggtgcctgtaatcccagcactttgggaggctgaggcaggcagatcacttgaggtcaggagttcacgaccagcctggccaacatggtgaaactctgtctttaaaaataaataaaaaataaaaaattagccaggtgtagtggcaggtggctgtaatcccagctactcaggaggctgaggcaggagaattgcttgaacccaggaggcggaggcaggagtgagctgagatggcgccactgcactccagcctgggcaacagagtgagactctgtctcaaaaaaaaaaaaaaaaaaggccgagtgcagtggctcatacctgtaatcccagcactttgggaggccgaggtgggtggatcatctgaggtcaggagttcaagactagcctgaccaacatggagaaaccccatctctactaaaatacaaaattagccgggcgtggtggcgcatgcctgtaatcctaagtactcgggagactgaggcaggagaattgcttgaaccccggaggtggaggttgcggtgagctgagatcatgccactgcactctagcctgggcaacaagagcaaaactccgtctcaaaaaaaaaaaaaaaagaaagtagagccttctggcttggtaataattttacagatgtgttgtattaaacaaaacaaaacactgaaaaaaaccttaactgtgaatacacatacgatccaagataaccccaggaaaaaagaaaatatgttttctctaactcttagaagtttagaaaagcttttcttttctcattctttcaaagcaagatgatctttttaaaaatctgctgcatcttaaaattgataccttcttgggtcagcctcatgtactatcacacttctattatcaaagaatgacctttcatttgttgaaagataatttttatgaaaaattgatgttgaattccaccatgtgccttttcaaagtcctagcttgatctaccaggggattattgttatatagtacttttattcctagacttaaacaaaacaaaaacctttcttgtaccagccaactgtgtcccaaaattcataactcagtactcatcattctctgttgaaattttatcttttcagtgttgtgcaatattttggatgttgtccatattataggctagtcaggatctgccaccttgctatttttcaggtatgtagaaggaggtggaaaattagtctcaatatctaaatcaaacaaaaaatccgtttatgaaagttctgaattccttaggataaatttttgttctttgaaggctatgacttatcaaatggtacctaatgctgtgtggatagccgtgcccgccaaagtagcttatttacccggcaggattgagaccactgatttttgtagagtaagtcataacagcctattaacattccgttatgctgagcatagaactaataggagaacatctgtgaggtcagagatcagaagtagacttcagaatgtactattcaaaaaaggatgcaatggagaacatttacagaggactgtgggtaaagcaaagtcttcaagggaagataacaaaggatgaaacaatggtgttgtgtgacttcctagtgagtgagatactgtgaatttaatctatagctaacttaatttactcttcatcaaaatttagctgactccaacatgcatacaccttttgagcttcctctaattttctgttattagggttttacatatttagctcaactaattgaattagaagatgcaggaacattgtcggaatgtttgaatctcatttaatgcttcatattgggacagacgaggcactccgaaggcagaaaggccagttgggacacaactgctggggaggggcaggaggctgtggccattcctataagacagttcagggggccgttccaagccagggagacctggcagggatctgagaaatacacaataagtgaaatggaacaatttttctactgttttagctattatctagaacccatgttagacccttaactggccttggcgtgaacttgacatttgaatcatttgggagctttaggcagtaaaaactggaagaatatacctggaaaagcaggtttgaatgcgaggattaagttatattaagattaaattggggccgattgcagtggctcacacctgtaatctcagcactttgggaggtggaggtgggtggatcccttgaggtcaggagttcgagaccaacctaaacaacgtggcgaaaccccgtctctactaaaaatacaaaaattagccaggcatgttggtgtatgcctgtaagcccagctacttgggaggctgaggcaggagaatcactcgaacccgggaggcggaggttgcagtgggccaagatgaggccattgcgctccagcctaggcaacaagagtgaggtttacattgtggtaggcattgagaggtgtaaagtaaataaaatagaaccctcactttcaagtgacagctctagagagcctatatcccgaaggctctagaacctgcaaacttcaaaagaaccccggcaatgtgtgaaataagtttaaagtaaatattacttaattgctcattcagtcatcgaatagccattgtttgggtggaaattggggaagaaaatgtgttgcttaagaacacgataaggaaggagtggtcagacaagtagaaggattgctgggaagaatcgtgtccagaaaacagagggaagagataatttccagaaggaaagggtgggtcaactgtatcacatgccacagagaagccaagtgaagataagcttacaaaagtgagtagtggtgatacggaggtaattggtgacctttaggagaactgattagtgggagtggtatgggggaaagcctgtttgcaggaagttaaggagtgaagccgactcttataagactctttagaaagagaaggggcgtgtatgagataaaggagggtgaaatatgggacaaattccctcagtttgtaattgtgtgattttgcaaaacttatttacttactctgtgcctcagtttccttgtctgtaaaacaatagatgatactagtagctcttatttgagagaagcaaatgagtcaacaccattatacgcagtagattcttattagattgatatcttaaaagaagtccagtaaaaatgcaattgtaatgtaaagagcaattccagtttatgggtttgaaagtatttctcttttttatgtatttttaattatgattaaaaaacaatgtgaaacttactgtctttactatttctaagtacactattcagcagtgttaagtatatcacatcatcgtgcagccaatctccataacctttcatcttgcaaaactgaaattctatatccactaaccaacagctcaccatttcccgctccccgcagctcctggcaaccaccatgctcctggcaaccaccatgctcctttctgtctctgagtttcagtactctggatactccatgtgatggaatcacaccctatttgtttttgtgtaactggcttatttcacttaacatgatgtcttccaagttcatccatgttgtagcctgcatcagacttcttttctttttaaaggctgaataatattccattgtatgtatatgtcacattgtgtttttccatttatccaatgatggacatttaggcagcttccaccttttggctattgtgactaacgctctgtgaggaagggtgtataaataactatttctcttttttaaactagtgatgtttactcttctgcatgtgtgtgagtcatggctggtttaaggccagcacaagaatggatcatgcaggggaggtggaagctctcaggagaaatctacaagaccacaggttggagacagagctcagagacagaaaagcatttttcctttagaacatagaagtaccattcacaagagtactgtgctcctggcggtattttccaacagagaagggaaagtcctgtcttcagttcgtttttaaacttaagctgctagaggacctcaggtgtgtctctcattgtgttgggatgtcaaaacattttgctttactgtgcaatttatttttccttgtattgtatagagcagtgataatgaggggcaggaagcctctagatagctgaagagcccattacagaagtcctactgtgagttaactgcaaaggttagatgaatctaggagctgagagtgggccccatcccctgctgtgggtggttaattcctggtggttttcggcatttgtcctatttaattattgttccttttccgagtaagaaatgacatcaggctgggtgtcatggctcacacctgtaatcccagcactttgggaggccgaggtggacggatcacctgaggtcgggagttcgagaccagcctggccagcatggtgaaagcccatctctactaaaaatagaaaaattagctgggcgtggtggcaggtgcctgtaatcccagctacttgggaagctgaggcaggagaatcgcttgaaccagggaggcagaggttgcagtgagccgagattgcgccactgcactctagcctggtgatagagtgagactctgtctcccaaaaaaaaaaaaaaaaaaaaaagaaaaaaaagtagaacagtattacccagtagagttgatgttccagaagtttcttcagaccagagcagagttcataacttacctgtaagggagcatggtaatgtcacagtttactcttcaactctcttaaggtttatttttattctttttcttgagacaaagtctcgccctgttgccaggctggagtgcagtggcacgatctcggctcactgcaacctccgcctcccaggttccagcgattctcctgcctcagcctcctgagtagctgggattacaggctcgtgccaccacacccagctaatttttgtatttttagtagagacgggatttcaccatgttggccaggatggtctcgatctcttgacctcgtgatccgcctgccttggcctcccaaagtgctgggattacaggcgtgagcaccgcgcccagcctcaaggtttatttttatgtttctaaagacagagtctctctgttgcccaggctggagtgctgtggcacaatcgtagctcactgcagccccaaattcctgggtccaaggggtcatcccgcctcagcttcctcagtagctgggaccacagttgcatgccactgagcccagctaatttatttttatttttagtagagatgaggtctcactatgtagcccaggctggtcttgaactcctggcctcaagtgatcctcctgcttcagccccccaaagtgctgggattataggcatgagccattgtgcccagcttctcttaaggttttatgaacaaattagctttgatttctcctaggtggcttgatgttgaataagctaatgcagaactgtgtgcaaagtagactgggactgccatttctagatgaaaagaaaggagggggaaaggagaatacatttttacagccacctttttctatggcctacttaatgatcataatggcttccaccccccggaactagatgctagtcttatggccccctctctcattcaaatgttttgggaacacctccgatgttctgctgcttccaccctggagtctcagggtcacctcccactctttcagatccccttccctggttgtcttcggccctatgcctcatcccaactcctttgaacttttgttttacccagttgctggttcctttagatgcacgaacagtgacagtctgctgagttatgtgaatgatgttgggtattactgccaccagcagttctaaagctccccctcttcacattctttgtcccagaaggggctctcaatgctgaaggtaaatcgcttcgtgtgagaatgcgggcctcttgtttgggagagtctgcttggcctctgaatacagaagcataaacttcaggacattacttaggccattacttgaggacattacttagggaagtatttttttgtcttggtaggtttttaaatgttggtttaaaaacctaaatagaagtgactttttcagaataataacttgtgaggaacaactggtcctggtggataaagcctagactcagaatcaatagaccaggattgtttttctccttgttcaaatatctgtgtggtctctgaagtaaacagagcaacactttccctaaatgtaaatattttcggcagatggggatttttaaaagcttgtggctcgcctggacaaaggatttttaattattctttctgaaattttatgaaagaatgggagaaaagaataagaaaaaaaaaaaatccggagcaattagaaagaagaagatcccagtgattataggcaggggaaggggacgttgagggctggcaggtacccagggcatggagggagagaagacagaattccagacaagaccaggaagcaagactttgcttctccagccagtgtatgttggttttacttgactggcagtgcagattatgaaaaaacaaacctagatatactggaaactagatcccagccttttcttgtttttttctttctttttttatttttatttttattttgagacagagtttccctcttgttgcccaggctggagtacagtagcgcagtctcggctcacctcaacccctgcctcctgggttcaagtgattctcctgcctcagccttcctagtagctgagattacagggatgcaccaccatgcctggctaattgtgtatttttagtagagatggggtttctccatgttggtcaggctggtctcgaactcttggcctcccaaagtgctgggatgacaggcgtgagccaccgcacctggcaatcccaacattttctacttcaaaatggtctaaagttctgtctggtctggtaggttttccctggacttttatctcttgtttcctccatcttcccactgcctttggtggcccagttcacactcattacaaacttttctccctaaatagaacttttcctctgcttccctctcctaccatggtttacctgttcaattgattatgtactttgagcattgaccaatagattcctgtatgaagtaaatttattctaaaggtttaatagctaggtattttatcaaggggctttggtgcctaagagaccaagctatggtggggatttgagtctttagacaagcagcccaggaagagattgttttgagagcagttcggcttcttggtgctcctgaacgtcttgtaggtatatatgcttcatgaggcaaaattgtgactctggacttactaaaatacgttccgtagtaagaattttttaaaaaatgcagttttctatgactcaactttagaggttttcattaaatattagagctggaaaggaccaatactggtcacactctaaagaagttttttcatgaattgatacatatctaatttgttgatacctcttaaagtgagagaaggcaaagaaagctcctgagattgtgcttgtcttgatcaatacaagcacaatgagttgctgagatgaatgagtttggcaattggctataatctgagaatgttccgaacttagtagattggggatgtgtttgtgttcccaggttaattgcttatttagctggcattcatttggggctgctagtccatttgttaattctgaaagttgttggacatttgtttaataaaaacaaatatatttggagaaatccagcatcccaagtagccacattagtaggaattaagtaggtacaaagtaatggtttaagaaatgatagtcttttgtatggcaaggtaaaagcaaaatgtcttttagaaggaaaatttcaaattgattaatttttaaagtctgttatcctgtttaatacttgtgtatctctgagaatataaatgaggtaaagaggtaattaagacatttaatatttgtatcacaactgtggaagatatgaaattgttattttccaattgatcattacgtaagagagatttgagaacattttgattagaatcacttagacttttctgtccctatatgaagcgtaccagattgaggcattttcctagtaattacaggaagtcttatttaattaaataaaactgtttctcatggtgtttctggccttcagtaactgaaggtttttattttgattatgtgttttttgttttcagagactgtatttaccatctagaagcatatcaagcccatcacaaaagtgtgtacaaaacaacagcttaatttaacttgagattcaatattggcccttttacctaaagcacctgatttttgaataccagttgtgaccatctattgacacatgctaggaatacatgctagtttttgtaacgagaagataaatgaaaaggctcttagaattattagaaaacaatattttctttttgactttttccagagaaaaatcaagacaagactttgttctatttcatcaagtccttgacgcctcctcccagctggtcaggttctttttatgtggcatttaagccttgagttgttgtgagtcaacaaatggacaacagcaaatgttcagccatcttattggtgttaagcctagcaaataggcaaattatatgaatacaccaaatgcataaacaagttttcatgagccaacgattccaaatgagcccagcagctgccagttatgtccttaagaatagaagtggccctactcatcctctaatctgttattgccccaagttgggaaatgtcagctgtaagatttatagatttagggctctggaataacaagttgcctcttagaacttttcagctctaaaagcttcttgttagccagctagacagagatatagaaacatatttatgctttccatatataattcttgaatcatttacaacatcagtggtgggctttaaaaatatatatatatatatatatatacacacacactataacatataaattacacacacacacattataacataaattacacacacacacacacacacacacacacgtctctctctatctgtatctccctaagacattgatacaagtactcatcagtaaaccatgataattttcagaagaggcttgctttgactggtaaactcatattggtacctggaacacaaaactcctacagctacgcttgttttgtagtctgagcttaataagcaatatccttaaggtaatgaaaatcagttcctcttctgctccctaataacatcagtcctttttgaatctgtacgatttttctcgtactcttctcccccaaatttcccccttaaaattgtggcattggatataatggttttatgatttggaggactgttaatttctaattgaaattgaatatctatggttcactattcagtgctgaacttgatatgagaaacatttcctggtaaatcagtaaaaccagctttatgtcttcccgcaaataatcaagtggcaggtagaacggacatctgacctagttgctccttggactgcttttggtcaaaagaaattggtaaaccactcagtctataaatttttctttctgtgattctgtagtgtcaggacaacattgccatgggtactttacttatacggagaaacaaaacctaaatctcaaaccaccatttataaaacccacaaactcttgggctgtcatttgggttacagacttgaagctccctttctggttgcgttctctggagtgggtgaatgcctgtctgatggggatgcatttttaaaggcaagacagatttaagggtataatttagtgacattttgctgactgcatttctctctatatacatgtctcttcatatatttcacaattttaccaatattcagttacctcttagcctacttgaagcaggccccacaattttgggactgtttcttatatacataatgactcaataaaggtgtctcattatgacattagtcattctgttaacttaagtgctattttttgactgtatgtataaatcagtgtatatttaacaagtgagctgaccaaatgccattaaatgagttgtccttattttggtttttttcctgctccaattttaagttttcaaagaaatccagcatgtaactaccacttttaagtctccactttttaattttgaataccaaatatggcagagttattcaggtggccaagtagactttttctgacctcgaatgtggtttactggtattacacttaaaaaaaaaaagacaaaaagtagatgtcagtatttgctgttttaggatagcataagcctttgagatttcccaaagatcattttaacagtctgatatgcagctgtttgacatctacgtttttagctaaaaggcgtcatccccatattcgtatttaagtggccctggaacataatgcggagataggtcactgtgggttaatctttggacacttcatatctgacaggcaccagcatctgtggtttattttgtggtgttccttaggtctagaaataaaattcttttaaacctgatgatagtcaggggaatgtttactaagatagttttccttccatttgcacagttttaaagctggagctaaaatataacacatgggattaaaaaaaataaaatctgtcatccataaagtaattcatggcactggtaaggttgaagtaacctcagggactcatgttctgtggtggagtgtacatcaaggtgtattccttttattaggaacgtattatatccatatactttaatatggatggcagatattagcagaggcttactggggaaaaagaataatttttgtgtgtgcatgtacatttaggctaaggcattataagttgtagatttccacagcacaacccaaaattcaaaggagatgccttttaaagaatatagtggtgatggagtctgggtaagaaaatcctgtgttgaaagttgagcagaccacaatcatttatatgcagtcaaagagcttttggtcctgcaatgtagggcatataatcttattacaaagccctttaaaatcaataaaaacatccctaaaagtgtggtagcattgagttcattctttttttaaaaaaaatctattttcaattacattattccatttaaatgtatcacaatggcttttatttcaaagatacttctagcctatgtatatattcacagctgtcagaaatacgtgtcattctttgtcttacaaatccctgttctcagccatttcagagcctaatccttgaggcggccattttgctgaaaggcagttaaagaaacagtctgtcagcctggtctgattcttgctgaaaaagcgtcatttctgtacccaatgtgagctttagttccagatttttgaatgatgtaaaaattaaggtcagggaatcaaatataaaaaatacatcttgcaggcagagccctcattagcatccagtcatcaatctcccaaatctaggagctgggagaccattgtactgttatcctgctgatattgagttgatagcaagtttaatggaacaggctggcagttgtgaagggcagctgataatgatggtgcaagctcaacgaaaaagttgggtaaaatctgcaggaggtgttttctctcatttggccttgttctgttggctgttggcatttgcttggcaagagggaggtgttcttatctccccagctagagaaattttaaatgtgcttaaaaataccgagtgtgcacttctgttactgcctcttcctaacaagaccagtggaagcagggcagttgtgtattgagtaggaaaatccactcaaactgataacattcaggtaaacctgaaaacagtttgcattttctggtaattaaattaaaagaaggcggttgactatcaaaagccctttttcctcatgtagtaaatgagcacataatcttaaaaaataaggtaacctcaaatatttttgtcttcaggattaatggtatgttttgatttttaaacacttctgggtaaagtttgatgagtgcttttatataattaggtagcatcttaaaacatatgattggttatgtttctgccttgcagagtttatgagacgaaagttggccaaacaacagggctaattttactaattaaagtcgtgctgcccaagtgggttaacatgatatagatgtttggttttaatagagcttggaaagggtacggagtcctaaaatgttctgtttggaaagctttggtctataaaatttgcctttaatacggctgacgacccttaattagaatgataaactgtacttgctggtgtgatgtctatttgagaagaagcaataccggtgtgcctaagtgtcattgtttttagtgtattaagatgcctttttttctgggcatggcatttctgagtacctgtcttctctgctctgtttcaggtgtgaatcatggcaatacagtgaaagacagtgatttactgcttttgagggcgtgcatgtatatgattaacggatggaagtgcaggactccaagatttacttccttccctttccagcagaattacctgagacgagtgagtaatgggataatttgtaataccacaggccccttttcaagggaccagtaatcaaaacaggaagatgaaactgagaagatttcaactggaagaatacaacttttgataatttctggatatacctcttaattgcaagcaggagagtcttcagagttttcctgtggtggtggttgttgttgttgttgttgttgttgtttgagatggaattttgctcttattacctgggctggagtgcagtggcatgatcttggctcactgcaacctccgccgccccaccccccgggttcaaccaattctcctgcctcagcctcctgagtagctgggattataggcgcccgccaccatacccggctaatttttgtatttttactagagatggggttttaccatgttggcctggctggtctcggactcctgacttcagatgatccacccgcctcagcctcccgaagtgctgggattacaggcatgagacgccacgcctggcaaacatgagccaccacacccggtggagattttcattaaaaacgttagtatgtcaatcctggtttcatcatgcagacaccctgctaaattttatacatctttcttccatgctttctgctcttgatattcttatatcaagacatcagagaaacttcgtggcttatttgtagaactcagtttctttttacaaggttaaagaattatcaagaattgggagttggctgggggcagtggctcatgcctgtaatcccagcgttttggatggccaaggcgggtggatcaggaggtcaagagatcgagaccatcctggccaacatggtgaaaccctgtctttgccaaaaaggcaaaaattagctgggcgtggtggcgcacacttgtagtaccagctactcggaaggctgaagcaggagaatcacttgaacccaggaggcagaggttgcagtgagctgagatcgcaccaccgcactccagcctgggtgacagagcaagactctgtctcaaaaaaaaaaaaaaaaaaaagaattaggagtgttggctgggtgcggtggtgactcacacctgtaatcccagcactctgggatgctgaggcaggtggatcacttgagcccaggagtttgagaccagcctgcgcagcatagcgagaccttgtctctgcaaataatacaaaaattagttggatgtggtgacgcatgcctgtgattccagcttctctgtagggtgaggtgggaggtgggaggatcacttgagcttgggaggttgaggctgcagtgagccgagattgcactccagtctgggtgacaaagtgggacactctcaaaaaaaaaaagaagtgtaatgataaatacagcaatatttttagggtggggtggagtgtacacaaaacgactagcctgtgttcatacttaaaaaaagtaacaaagaacaagaatttcatacttcataaaagtaaaaaaagaacaagaatctgaaggctgtatctgacatttagtgtatcatcatcactttggaattgcatgctgttcagagctttcctgttgcgcctaatgtgatggggtcttctgacttgtcattgttgataacattagattcatgaaaactgagtagcacccatgatatttttatgttacaaatattaatttcagctttgactttggtggtggcagtagacttctcatattagagattacaataaaatgttaatagttccaagctcttcctcctctcccatcatgtcaggtgactaaaacattcccacaaataactgatacctttttaatgggacctttgggttcataagaggtaaatattgatgaccttgacattttttcatatgtgtacagttcaggaggcacaatgtctccagataactaaaagcaggtgaacaagtaggtagacagccatgggctcccactgatccccgtaattcacaggggccctggccttgcttctggagcaaaagcataggcaaaggaatctataagtttaggtcctgtaggtatttctgtaggcaaatctcactggactgggtgtgttttagtctggcattttaataagatgttttctaaggcaaatatatgagtctcctcccttacccctgtgaaactaaggactctagtactaactaccagggtaatattgtatagtagctaagtgcttgggagccgaattcccaggtttaaatcccagttctgtcaccactagcaatgtgaccttaggtaaattatttaacctctttcagctttaatttcctcagctagaagatgaggataataataatacttaggttttcttttcttttttaaataattaaatgagagctatccaattgtgattagcatgttagtaaagatttctgaaatattattcattaaccagctttcaggtatcctgtgctcacagagactaacctacaaagctgatgaggtctacagcttaagaaaattttctatttggagtatacactcagttacatgaaaattgcgtatggaaaaagatgagaatgtagcactgattttgcaaaacgttttagaaagttttatttcgctgcttgtcttaaaagtaatttttctggttttatgtaatgtgtgtattagaaatgggaatattggaatacttacttcattgtattgtcaagcattattggtagccctaatttatatatccattgtgctgcagtttcagttgcagaactgccatctgcagggattattatagcacttgaggggatggaattactgcactctgttttggatacttttttcactaagaagtatgggcaccatgagatggtacttacccatctgtctgttgaagcatttgtatgtatattacctgagcacttaggcacaccaccgaggggggatttcaaatggaagggaaaaaggaaaaattgaaaataaaataacacgatggaaataacagaagcctctttgcaaagaatacctaaactattcttaaaagcagacttaacagccagtacaaaaccattcactattgtctttaagagacgaagctcaatccacaaagttgaaagtgaagtgtgaatctggaagttttccaggaaagtcaagcattacagacttctagggctcaaattcaagggagaaaaaaaagtccattttacaaagtaacttcttacattgattgtgagctgtcaatgtttgatgggtagatcctgaaacattaactgattaaattcttcaatgctatgcggtcatattggtggcctccgctgttctgagcttctaaatttgtgtatcgacacatgggaattcactaaatgtgcagcagagagcagagtggaacattgtggcatcagcttgaaatttcctaaagagaaccagtggaatgatgttgaaatcaattgaaatattatttattgattgcctatgttttatagcacctaataaattgtccaatcccttaaaaacactccatctgcctaattctccatttccagttgcagcagatacaaggatacaaagatactctgtactggtagagagggatgatttcaggttttcttcacagcaccgggctccctgacagctattcttcgtgcttgtgcacactcacagttttcaatttcagttgggacaagagaagtgtttttctcccatattcagttgtcttggtattttttaccctgacggcctcccctaccctccaacacatgtgcttcctcagagcttcttcatccatatgctaagagtggggtgtggcttctcagcattttgtgtttcactgcacacctggaaacctatgggctaatgaccctgtgagaatttgggtggtaaggaggctgcagagatcagcttccttttatagatgtagaaactgaggcctggagaggtgaagaaattcatctgagatcattcagccaacaaatatcaggacagcacctctaacgtcagtgcaatttcagcttttccactaaggtatactgggaggagtgcagtggtatgtaccgggctgagtcctggttaaggggttatagtggactgaccaaggagtgaaagaaaaagaatatagtggccgggtgcaatggttcatgcctgtaatccttgcattttgggaggctgaggtggacggatcacctgaggtcaagagtttgagaccagcctggctgacatggcaaaaccctgtctctactaagaatacaaaaattagtcgagtgtggtggcacatgcctgtaaccccagctacgtgggaggctgaggcaggagaatcgcttgaacctgggaggcagagactggtgagccgagatcgagccactgcactccagcctgggcaacagagtgactctgtctcaattaaaaaaaaaaaaaaaaaaaaaaaaagaacactgaatcagggtttgggtcagggtttgtttgaggttgtattagaagcatatctttcggtcaggaagcatgaatattctctctctgatataagcgaaaaggaagagattaaaggcatgacgaagatcaggtctttttaaataggtgtttactttctattgaaaccacggaacaatgaatatttattcatcatcaggtaatttggggtaatggagtatagacaatttctggttttaccttcttgcctctttgggtccgtgctgccttttgttttgcttaaaatgggctaaaagagaaagcaactgaaacactttccagatctgataacttccgagatctcaagtgaaacctctggctcgcgtccaagggtgaggtcacacagtctgatattagttggatttatgttggtgtgtccaccaaaatacagagcagcacactgccataattcttgacagccatttattaggtaggtaggaatggcacttgggtcagttgtatgctgtgtattgccacccagaagcatagccgatccatggccataggcatttcttttctttttcagttgatagttttaagttcatgtggaaaacgtgcctttggttttacctggttttatgcctttggccttatctttgctcactcatactcttgaattcagatctgtctggacacgtctggaggtctggtgttttggtctccaacagtttgttttcatgattgtctgaagtacctctgggaaagtcctcattctataggaagacagttgaattggataagaaatatctaaagcacaaatagacattgcttatgtctgtcaacagatgagaacctgaaaaagccaatttttcaagatggatcccaagtggctaagtgggcttagatttaacatagagtcaagcagccatttgctgacttgaggccccacacatactctgagttcccccaaaccctggaaacccccacatctttttaactttgggacgttgagaactcacctgaaccaaccaatcaaagctcagctgtattgaccaatcagggctcagctgtatcaaccaatcaacagaactcacttgtgtcaatcaataggaactaaacaagtttcagatctttgaattaacagactcgattggaaacttgggtgggaacatttgctgtaaaatccaaaccctcttgttgttctctggaatgcaccttccttttacaccaaagcgtatttctccagtttgcagactgttcactgaaataaagtctcttttctccaaattccttttcagagaacttttgttcacatcttatacaaaacagtaagtagctgttaagtatatagatatggatagtgacatttattagatgcttattgtatgctgtgtaccagacatttattagatgcttattgtatgctatgtaccattttaactgctttacagatcttcgcagcaacgctttgaagctcgtgctcttatgatttcattttacaaacaagaaactgagaaacagaaaagtgaataggagcttgtacagtctcaaagagcttacagtggagttagaaagttaatactcaactcattcattcaacaagctgaatgcctactagcaatttgagtttatgaaagtttatgtacctctttaaggcttgcccaaaggagctcacaatcgaatagagggatgtttatgtaaaccaaagttgaaaaatgtgttaatagacagaaagaggattccaagggaagcatgctgccaatcacttggattactttccagtcgaacagaatcatgttggaaacctagggagaatgggctgtgttaaaagtgaaagcaaaatctcaagatgactgatttaccaaaatctgtgtgccacattgagtatgttaagtggcatcagtaactacatcagggacagggttggcagtagaagagaaagtggcttgtgcagccttgggaagtgacatcactgggagctcagcagctaaatcagtatcttggccattagcacttttgacactggttctcactggcagataccactggatgggaccgagcaggagaggaggaaagtggcagatactatgtgatggctgagaagcagtgttgatgagcttattagtcatctcctggcaagtccatgacatttgcttatgttgatggggggtgtgtgggatgggaggaagagaactgacaattaaggaggcagaaaattcctagtaacataatcttgcacttcagttttgtatgtgttttgggacataaattccagacagtgtgagttagcagatgagtgttctaggcatattcctgtgcctcagctcctctgtagaatggtgctggcaatacagtttgcctcattgggctcttgtaagctttaaataggttattatacataaagagctaatagtgatgcctgtagccgttgtctaagtgctagctctgatgatggtgacaaagaagtaatagcaatcagtggtttagattaaaccattttaggcataaactgttctgctagaatccaaggggagattttttcccatcaaggagacatagcttgttgggaagataagacatacccaattgcagaagtaattaattaattcttttttttttttttttttttttttttgcgatggagtttcgctcttgttgcccaggctggagtgcaatagcatgatctcggctcaccacaacctctgcctcctgagttcaagtgattctcctgcctcagcctcccgagtagctgagattacaagcatgtgccactacacctggctaattttgtatttttagtagagacgggttttctccattttggtcagggttgtcttgaactcccaacctcaggtgatccacctgcctcagcctcccaaagtgctgggattacaggtgtgagccactgcgctggccgaataattaattcttaacatctaatttcctacctgtgcacacttatccagcccaggattaccttttagtacctcttcttatgcatcctcattctctctagccatgccagatgaccccagagacctagattaggttctcttatgtgttcatgcattcacataagccattgtaatcagtctagagttcctttctcctttgatctgcctgttgaaatggacatcctttctgcaaaatccttcatattacccgccctagaccctcagttaattcagctgtcactgcattgccatggtgccctgaacatgccttttggaaaattgttttacctgcgtatttctctactagattatgaactccctgggagaaatttatatatattttcatatttcagattcgatgtagttgccttatggaataaatgagtgaatatttttctaactccatggtaaactgttttgagactggatctgttaatttttctgaggctgtttttttttttttttggcctataaaatgggttatttataagcaggaagtacagtggttagaacaaaatgataactcactgaatgttggttatttctatgaacataactttcaaatatttgtattcagtccaaacattgtttggattacattaaggtaacaaaaatggctactttttatgttctgttcttcctgaactcttaacttccctgatttatgaaaggactcttcctccactcctctcagacatgcttccctggggccatttacctcccactaaaaatcaaatgaagctaatctccctggcttgatattgattccatctagtccagagagaatatgctaatcacctttgctaagtgctttctggctaaaggtgtaaaagcctgattccatttgaggggaaaaaattgaaatttctgtcttaaaatttgtgattatggaatttgcattttgaaaggcgatagtagctcaaatttaacgagccatttgtagtggattgagcataaattttcatggctcgtttggataaaaactacaccaaggcatagatttctatgactatagtatttaattttgttaaattcaatttaatgcctacaaaaatagtggaaatcccttttttctcctctatcagtggcatgttttttgtacatgtttaaagctactcattttcaaaaagcaaagaccattttaaagactgctacttaaggctgtcaggctgcctcagtttcttcgtcaatgagtctaacctaggccacctgcatacttccctggagtgtttagatgaatggctctgagcttgtaaagtactttgaatttcctggatgaaagggtccctgtaagtacaggtcttatgaaggtattatagctgggcttttaaaactgccgcacagcctgttttgcaagaacactaatgcacttctgggtttagagttgtaaaaagatgtgtgttcagaagcctcaggcttcgtcttgtgcggttcctgaggcatgtgccgctgcttgtttacttctagcatagattgtctccacactacagggatgtacaggtgtgcacttgcacagcgaccatctgggcttaggatcacctaggatcacatttggctgccgtggtattgaggagaaaacacaggttgcaaggagagaggacgggctgttcctggccccatggcctcaactcttgggatcctccaggatttctgtaatcacggtggggaagcacgcacaaaagtgctctgaagtggttgaagtgagggaggggttcgccctaggtaccgatgcttggattatgaagaactgggtttgggttctagctcttccagctcctagccctgtgccctcaggcaggtcagctgccctgagcctcagtttctctgatgggcagtcttgcccctaacatttgtggtgcccggggctagaatgtgaatgcaggaccacatactctgtatgtaaatatttaaaagttacaaatcaaacaaaaaagtgtcaaaacatgtttggaaatttttctgttctgacaaatacacctttataaccatcttgaagggcaggtttgaattttgagttttcagattcttagccaacttccatgcctgaccaggtagtgtgggtgggagcaggaatctagtcgtcatgcttgtggacagcgtggtctgtatgtctgctggacccacccttcaccctgtgggcctcgggattctatattgaggattgtctatcttgggggagtgtgtggagggaacatctgcacaggccttataaatgagcatgggctgttgggataaggaactctggggcccgagcacctggcacatgatccagaacaggatttttgggttccgatgggcaggtgactttagtcctcactctgtgggcaggggcattacagcataggggtcccttttgtcagggatttatgatggcatcacacgcaggattcagagagcattaattgaaaaatacatatgattggctgggcgtggaggcttatgcctgtaatcccagcactttgggaggctgaggtgggtggatcacctgaggtcgggagttcgagaccagtctgaccaacatggagaaaccctttctctactaaaaatacaaaattagccgggcgtggtggcacatgcctgtaatcccagctactagggaggctgaggcaggagaattgcttgaacctgggaggcggaggttgcagcgagccgagattgtgccactgcactccagcctggacaataagagcgaaactccatctcaaaaaaaaaaaaataaaaaaatacatatgattgtgcttttttttttttttttttttcctgagactgaatcttgctctgtcacccaggctggagtgcagtggcacggtctcggctcactgcaacctctgcctcttgggttgaagtgattctcctgtctcagcctcccaagtagctgggattacagatgtgtgccaccacacccggctaatttttgtattttttggtagagatggggttttaccatgttggtcaggctgttctcaaactcctgacctcgtgatccgcctgcctcggcctcccaaagtgctggtattacaggcgtgagccaccacgctgggcctgattgtgcttttgtagtgttactgtcacatatatgaaaataagttctttctatcagaaaggctttatccttaacatcagccttaatcacatcaacatttagcagtgcttggattgagttattttctgctgtataggatgatccatctctaggaccgagcacagaactctgttttcacttagcttttttgtttgtttgtttgagatggaatctcactctgtcacccaggctggagtgcagtggcacaatctcagctaactgcaacctctgccttccaggttcaaacaattctcatgcctcagcctcccaagtagctgagattacaggcatgtgcgaccaggcctggttaattttttgtatttttagtagagacggggttttgctatgttggccaggctggtctcgaactcctggcctcaagtgattcggctgcctcggcctccaaagtgctgggattacagtgttctcacttagcattttattcattcattcaataagataaatgcaataagtatttattgactattcctttttttcctaagcattattgtaggtaatagcagtaaacaaatagatacaacttcctgtcttcgtggaactaacactttagtaggaggaaacagaaataaaaaggataaatataaaaatgtgtagtttccttgaagatggcgtcctctctgttcactcatttgctccacaaatatatattatatatccctgccaaggactaggcactctgccttactcagaggtaaagatatggaaagagaaatgatcacaaaactagagtgtggcattactcagggtttgtgtgaagtactgttaactgcaggaaatccttatgctctttggaattaatgttctagaattttgtcttttccacttcaatcaaatgattattcaggccaggcacggtggctcacgcctgtaatcccagcactttgggaggccgaggcgggcggatcatgaggtcaggagatcaagaccatcctggccaacacggtgaaaccccgtctctactaaaaatacaaaaattatatttttgtattacaggcgtggtggtacatgcctgtaatcccagctactcagtaggctaagacaggagaattgcttgaaccagggagtcggaggttgcagtgaaccgagatcacgccacagcactccagcctgggcaacagagcgagactctgtctcaaaaaaaaaaaaaaaatgcttattcagtctctgctctatttaaggcattgtcctaagctttatgaggggtcgaacaagaattcataattcacaggaggtggtacagtcatgagtcacttaacgacagggatatgttctgagaaatgtaccactggataatttcttcattgtgcaaacatcatcgagtgtgcttacacaaacctagatggggtagcttactacacacctaagctagatggtacaacctattgctcttgggctacaaaccttatagcatgttactgtacaaaatattgtaggcaattatgacataatgctagatatgtatgtatctgaacatatctagacatagaaaagttacagtaaaaatataaaggataaaaagtagggccaggcacagtggctcacacctggaatcctggcactttgagaggctgaagcgggcagatcacgaggtcaggagttcgagaccagcctggctaatatgatgaaacccccgtctctactgaaaatacaaaaaattagctgggcatggtggcgggtgcctgtagtcccagctacttgggaggctgaggcaggagaatggcgtgaacccgggaagcggagcttgcagtgagccgacaagacgccactgcactccagcctgggcgacagagcaagactccgtctcaaaaaacaacaacaacaacaaaaaaaaacacaaacacattgtacagctatacaacattttctttccttatatctgcaagattttttccatttctaatttttttttgtaactttctaaacttttttgttgttgttaaaaactgagacacaaacacatatgttaccttaggtttacacaggtcaggatcatcaagacgtcattgggcaataggaattttcagctccattataatcttaagggaacacagacatatgcagtccgcgggctgaaacgttgattgtaaatacagaacctttagagtggttcttggcatattgtaagcatttgaatgttaactgttcttactacttatctgcctgtgtccctgtcaatgaagtgaaccctggtcctctcctttcccctctgctctgtcttcttcagtggggtagggagaaatcctgcctgcaccaagtcacacagtgggtgtgtcctgaaagaattcttttcatcatcttggaatgctgtccttgggattcagctgacttccctcaatcgggactcatacatcaagaggtcaggagtataattatctcagctactgtgaagccacagaaaagcacttgctgagtctggatgtaaatttattgtgaaatttaacaaagaaaaagtcacctccttctttccctttcttctcttcaactcaaattgcattttaaaaggtcttcgtttaggataaatagatgtcatttatctaccattaaagggcctatccttcttggtttgggacatgtaaataccttcctgaagcacatgagatgccttggctatttacacccttttctgggggcaagcatgctttcgttcttttctttgacaattaaaaataaaataaaacagctagaaagaaaagtataagaaattgtggtgagccataattttgattatcaggaatttctcactcagttgataaaggggtcaaccaatcttcactgtgtgtttatcataatttattacccatgatggtttatccctctaaatatggttcatctgtgatatttacaataattttatgcagatgtaggttactttttgcatataaactacaaaagatggtgaactttctcttttcaagaagaaattcaggaggtagttttaggggacttagtagagaggctggtaaaccctattttatgatttttaaaaaataaaaatttgaatgtagttttaaaaaatatgtttaaagcagaatattttggttctgtttctaactagctgtatgatcctgggcaagttaattaacacatttggttcttttttgtaaaagaagtgtgctagttttccaatatctaggatttcttccaatgataaagttcagtgattatataaaataaaaagactaatcaattgaagctacacagtgtttttaaccttgtgtatgtataatcatcatacattgaaagccttttacattgaaagccataattgaaagccttttaaaaaaagttatttaaaaaaattcatgtgcttgagttctgtctactaacattgtgatttagtttgtctagggcttggccttgggaagtgttttttttttttttttttttttgagatggagtctctctctgtgacccaggctggagtgcagtggcacgatctgggctcactgcaacctccgccttgcaggttcaagcgattctcctgcctcagcctcccgagtagctgggactacaggtgcccgccaccacgcctggctaattgttgtatttttggtagagacagggtttcaccatattggccaggctggccttgaactcatgacctagtgatctgcctgccttggcctcctgaagtgctgggattacaggtgtgagccactgtgcctggctgggaagtgtgttttttaatcaaagttcctcagagactcttctgatgtacagtaagaattgagagtgactaatttgctatcagtgattcttaaatggagagaacatgagtcccagagaatttaggaaacctctgggatttttccagagtaaactgtgtatttgcacaaattttgaaactgtaacttaaagatgtgcatgccctcctataattaataaatcttgggttaagagtctctgatccaggaatcccttccaggattctgtttttatgaacttctactaatcaaatttattatgtcaagtaggataggattataatgaccactatggccactgatgtgtctggtagaaaattccattgagagccagagacacagacatttatgttgaaactaggaaataatggaaataggggatttttgtgttttttttttggctttggccttgtttactgagatttgacctttccgataggtttcttgacatctttggaatgcaaaattggggatactaatatttgccaccaggtaatatttatttaatgatgtgagaacccagggtgttagttgactgtaactgtgattattaacaggaaaatgcgatcagaaataatggcacctttgttatcactgtgattttttttttccaatggcactgaaggaaaagtgatatttgttatcaaatcaggcagggaatttacaaatgataacgagttagagaggctgcattctttctagtatctcactctacttgtcacaagtatctttctcttatggaaagataaaaacacttgatttgggccataaattcactctgtcttctatcaccagggccctaggaatccttgaacaatcttgacctcttcctattcttctttgattgaaaggatgcttattatgtggtgatagctttaggagggcaaaggaaaaacagcaaatatatcagtacaatttcctaagaaaggaagcttctgtggccttttggagggcagaaatgcatactttttattgtgatggtgttgtggtggtggtgatgatgatggtgatggtgagggtggcggtgatggaggtgatggcagtggtgatgatggcatggtggtggtggtgatgatgaatggtgatagtgatgatggtgatggtgagggtgagggtggcggtgatggaggtgatggcagtggtgatgatggcgtggtggtggtggtgatgatgaatggtgatagtgatgatggtgatggtgatggtgagggtggcggtgatggaggtgatggcagtggtgatgatggcgtggtggtggtggtgatgatgaatggtgatagtgatgatggtgatggtgatggtgagggtgacggtgatggaggtgttggcagtggtgatgatggtgtggtggtggtggtgatgatgaatggtgatagtgatgatggtgatggtgattttcctccctccacccaacaacttacacaagagctttgtggatagacctaagtgttaattggtttggctaagagtaagcattaaaagcaaacactcccaattccccaatttttcaatgttagattctaatggatttcttctgtttgcagttgattatccttgccttgattacaagtcaatgttctagcagagtgaagtcattactggccttaattttcacagcctggcacggttggagactgcagtgatagaaatggagtggctaaaaagaatttaactttttttattttgaaagtgctgtgggaccctctcagctatagaatacttgacagaccagatatttccgtgtatatacacagcctagcttttgaaatagcagaattggatatacaaattactatctcactatccatagtggaaagtgttctttctgtaggttgggagcaagtctggcgattggtttaggggcgggtccagtgggctgggtcctgcttgtcttcagtcccaagcttcctgttgtactgtatttgacctgaaactagctgctgatatgacatcatcttgggtgttgctggcacattttttttttcttttctcagtagatgtacacttaattatttttccttttcaaaacataatataggatgggtgcacagtggctcatgcctgtaatcctagcactttgggaggccacctctggaaaattgcttgagcccaggagtttgagaccagcctgggcaatatggtcaaaccctgcctctacaaaaataaaaaataataaaaatagccagatgtggtggcacatacctatagtctcagctactaggaggctgaggtggaaggatctcttgagcctgctgtgagccgtgattatgccactgcagtccagcgtgggccacagagcaagaccctgtctcaaaaaatccgccccccccaaaaccacacaaaggagttttggcttgctttgcataccctataggtatgtctggctctttctgatgagtgaggtattgtcctcctgttttcctccttccaaagaagtatctgttgacataatatgcttttcaatcatcattattatagagcagtctgagaaacctttagggcaagtcaggaaacccccggcttccagagcaacttttcaacccctgaaagacaggcctaaccagacagcagcagttcatgtttctgtatttgtagagatttcgctagtgataatcaaagacctcacagaagagtgaaacattttatttagaattgtatgttaggtgaagtgagcaactctccaggtgtcattttccatccgtgcacatcagtcctgacacgccagtggtatagtgcgggagctctttgcttaatgcagaaatgaagtcaaattgctcaggtcagcctcagctatttggggctctcagactctgcttttttcccccatttcctggctcctcagtatcttttacaaccctctgctatgagaggtttctgctaagagggctactacttttcattttattgattgattgattgagatggagtcttgctctgttgcccaggctggagtgcagtggtgcgatcttagctcactgcaacctctgcctcctgggttcaagtgattctcctgcctcagactcccaagtagctgggattacaggtgcccaccaccacgcctgggtaattgttgtacttttagtagagatgggatttccccatgttggccaggctggtcttgaactcctgacctcaagtggtctgtctgactcggtactttacttttttttttttttgagaaagagccttactctgttgcccaggctggagtgcagtggtgtgatctcaggtcactgcaacctccatctcctgagttcaagcaattctccctgcctcagcctcttgagtagctggaattagaagcacttgccaccatgcctggctaatttttgtatttttagcagagacagggtttcgccatgttggccaggctggtctcgaactcctgacctcaggtgatgcacccgcctcggcctcccaaagtgctggaattacaggcatgagccaccgcgcccggcctcgtacttttcattttagatgcttggtagcattggtttttctggattctggcagtggtcaaatatttttctagagccctggctaggtgcctgtcataccttattttgtctgctgagcagctaaaatttggcggaatcctcctgtactttcccgctcttcacctcaatcctcctgccaggagttttacacacttgggtgtccaactctaatccaaagcaaggaaactatttgcttggatcttgtaattcctgccgtctttgttagttctaactcttctgttgccttctcacagatatcaaaaagcaatagaatttgtccttgccatatttactttttaactaatgtactgtattttacctttgcaccacccactctaagaagacttggtagcctatttgtggcatgcagatatattcacagaaaaacataggggaaggaagaggatgtgagtaggaaacaggagagaattgcatgtggttttgatgagaacttcacctgagaagagcctgctatctttgggctctgtttcatcagttgttggaatccttttcaggccggagcgggcaggaggcaggcctgtttctcatcctcccttccagaagtgaagttaaacgttgatggcagagcattgcatgagagccattgcatggctttcatgatgatcgctttagaacagttgtggacaaactttctgaaataagggaagctatgcatagttaaactttaagtcaatttccaatcagtgctccttgccagtgaagcatttcttataagatgacaagaatggtaagaatatgttttctatgtttgatttcttttatccccaggaacttcaacaactcttataaatcactgattcctatacctttaccttcagtctctttggtctcctaaaatccatgttgctgtttccaaaatttaatactgctttaagtctccatctagctgcctaggaggtatatcacattaaacatgaatgtgttcagagagaatctgttatttttactcaactttttaatcttgtcttctctacctttaaactgctgtctaagtgggaggatgggatccacccttgactcttcctcacagctaattggatcacagagtcttttttattgtatctaaatatccctagaatttgcccttcctatttctgtggctattgttttaaagttcagtccctttttattacttgctagagaactgcaacggatgctgccaataggcaagattttttttttttttttttttttttttgagacagaatcttgctctgtcacccaggctggagtgcagtggtgcgatttcggctaactgcaacatctgcctcccagattcaagctgttcttgtgcctcagcttcccgagtagctgggattacaggcacatgccatcatgcctggctaatttttgtatttttagtaaagatggggtttcaccatgttggccaggctggtcttgaacccctgacctgaagtgatccacctgcctcgacctcccaaggtgctgagattacaggcatgagccactgtgaccagcctaggcaggatttttgaggaaatttctgattacatctttcccctgcctcaaatcctccagggtatcttaagacccttcctaaactgtcttttctaagtccttctcccattttacctctcctcattctgtttaaggtgccctagttcaagtgttaagaaatcatgctgtttgattccgtatgaatggattcatccttctcttggctcctcctcttgtcacactccctcccggacactgtcctgctcactcagaagcctagctcaaagtcttctttgtgaagcatttgtcaatatacttctgtctgtggaccctttgttataaaatatcatattagattgtaattgttgtttatatggctgtcttccccactgaactgggtatttctcaagagcaatgaccgtgtaatgtctggcacctgatagacagtcaatatttgttgaatgaatgtcagttgaggatagaggctatgggtgttacacccttcttttttttttttaatgcagatcatggtgacaatgcataccttatgtatatcaataatgctcccacaatttagtttttagcatattttccttttacctttaaaataactacattgctacctgttggagatgagagtggaattttaaattagaaaatttggaaacactgatacaatacacacttaaaacattaaaataaaccataaccaacccctctttcattggacacatttaaaaggatatctctaccctgacctatgcccttattaagtcaactcttatatttcttgagattagaaagtcacctgtatgtctcaagtgtctaaaagttgttcatatctcagaaatggagagccttttaatcatagaatgtctaaacttatctaagggtaggaggaagctagacaaactagattagatcaaggcttttcaaatctcagcattgagttaattaggttttatagcgttgaattcttaaatgaatattgctgtttgtattagttcatttttacactgctgtaaagatactacctgagactgggtaatttataaagagaagacatttaattgactcacagttctgcatggctggggaggcctcaggaaatgcagtcatggcggaaggagaaggggaagcaagatacaagttacatggtagcaggagagagatatatctataacacacctatatatgtatacatatacatgtacacgtatacacacgtatacatatatatacatagagagagtgagagagagtgtgtgagtgtatgaggaagtgccacactttaaagccatcagcttttgtgagaactcactatcacgagaacagcgtgggggaaactgtccccctacccccgtgatccaatcacctccccccacgcccctccctcgacattgggtgggtgggattacagtttgagatgagatttgggtggggacacagagccaaaccatatcattgttattaacaaattgcaagatgattaacagaaaaacaggggaaagggaccctattaaaaattgtagttttaagtgacttataagcaactagttaaggaatagtcatttatttagtatgagattacagttgtagaatatggctcaaagggttccttaatgctccacaccaatattggcagcaccacagcgggcacaaactcagcctagcttctgatttccaaatgacttcagtagttccatagacttaattctctcctgatttttaatacacaatggacttaattacatataattttcacagtttcaaatataatacatataaatgaaactactttagaagtttacctattgattttcaatttctaaatatttggagactttcctattattgacttctaatttaattgaattataacctgagaacatgcattgtatgatcacaatcttttaaaattagttgaggtgtttatttttttttctcaaatgactcaacctatgatttctcttggtgtatgttccatttactctggaaaagaatatgtattttgctggtggtgttgggtggaatgttcaactagattcaattggttaacatgacattcagtgcttggctatccttgttggtcttctgtcaactagttctatctcttactgagaatagagtcttgaagcctacaattataactgcagatttatctattcttttcttttctttttttttttgagacggagtctcactgtgtcaccctggctggagtgcagtggtatgatctcggctcactgcaaccgctgcctcccaggttcaggtgattcttgtgcctcagactctcaagtagctgggattacagacacgtgccaccacgctcggctaatttttttgtattttagtagagatggggattcaccatgttggccaggtttgtctcaaactcctgacctcaggtgatccacctgttttggcctcccaaagtgcggggagtatagatgtgaagcatcactcccagtcagatttatctattcttaaaaaaatttttttaatcagttttatttgacgtattttaagctctgttgttaggtgcatatacatatataattgttgtatcttcttggtgaatcagttattttattatcatgttgtatctctttgttttttgtttattttgagacagagtcctgctgtgttgcccaggctggagtgcagtggcttgaatctcagctcactgcaacctccacctccttggttcaagctattctcttgccacagcctcctgagtagctggaattacaggcgcccaccaccatgcctggctaatctttttgtatttttagtagagatggagtttcgccatgttggccaggctggtcttgaactcctgacctcaggtgacccacccaccttggcctcccaaagtgcagggattacaggcgtgaaccatcatggccggccgagattctgtgaactttttacctaatttcccctgatggtaacatcttacacaatagagtataatatcacaaccaggaaattaacattgatataactcatggatattattcagatttcctcagttttacatacactgtgtgtgtgtatgtatttaaatgtgattttatcacacatgtagttttgtgtatctaaaaccaaggtcaaaatacagcacaattctattaccacaggcatttctcatgttgcccttttataaccacagtcattcccctgcctccagtccctgccctctagcaaccactaatctgttcttcaattgtgtaattttgccatttcaagaatgttatataaatggagtcacacagcatgtaacttgttgggattggccttttttcactcagtataattccatagtgattgatccaacttgttgtgtatatcagttttattgctgagtagtatcccaatgtttagctttaaagggaacttcctaaatgttttccagagtggctatatcattttatattccaccagcagtgtacaagcaatacagtttttctgcacttttaccggaattaggttttgtcactcttatgtgttaaccatcctgataggtatgttgtaacatctcattgtggtgtaatttgcatttctttgatggctaatgatgttgaacatttttgctggccgggtggctcgcatctgtaatcccagcactttgggaggctgaggcaggcagatcacaaagtcaggagttcgagaccagcctggccaacatagtgaaaccccgtgtctactaaaaatacaaaaaattagctgggcgtggtggtaggcacctgtaatcccagctacttgggaggctgaggcaggagaattgcttgaacctgggaggcagaggttgcagtgagccaagatcatgccattgcactccagcccgggcaacagtgcttgactccatctcaaaaaaaaaaaaaaaaaaaaaaaaattttgcatgtacttatttgccatctgcgtatcctctttggtgaaatgtctgttcatgtcttttgccttttttctgatatcgtttgcttttctagatttctaatttttgtttgccttatactttttgtagtttacttttaacctacctatataaatatatttgaagtcaatttcttataaatagactatattgagtcatagtttttagtccaatatgacaatctctgacttttaattgtgttttagaccatgtgcatttattgtaattattgatacatttggatttagatctaccatttcattatttcttgtttgtttctctttttttttttttttttttttttgagatagcatgtcgccttgtcacccaggctgacagtgcggtagcatgatcagggcttactgcagccttgacctcctgggctcaagcaatccttctacctcaacctcccgagtagctggaactacaggcgtgtaccaccatacttggctaacttttaatcttttgtagagatggagtctccctatttgccctggctggtctcaagctcctgggctcaagcggcctcccaaagtattgggattatagacgtgagccaccacatctggcttgtttctcttttttattgttgttttctttttttacttctgacttttttttatatttgagcatttttagtatggcctgttaatttattatgattttgacgatatctctttgtatagcttttttagtggttgctccatggattacaaaatacatatttaactgtttaacatctacttatagttagtattttattactttcttggggatgtaatacacttaccatcttataagttcctttccactccctcttttacatctttattgtctatgtgtaacatctgcatacattgaaaatctcattaggtactttttgcttttgactatcaaacacaatgtaaagagttgaagagtaatatattttattcagatactcatcatttctgtcactcttcctttgttcctgttactcatgtttccttctattgtcattttccttctgtctgaagaacttcctttagtaattcttttagagcaagtttgctgactatacagtgtgaaagtttcccttaatccacaaatgcctttattttatcattattcctgatagatgctttcactggatacaaaatctaggatgacagttcattactttattttattattattattattattattattattattttgagacggaatcttgctctctctcccaggctggagtgcagtggcgcgatcttggctcactgcaagctccgtctcccgggttcaggccattctcttgcctcagcctccagagtagctaggactacaggcacctgccaccacgcccggctaattttttaatatttttagtagagatggagtttcaccttgttagccaggatggtctccatctcctgcccacttcggcctcccagagtgctgggattacaggtgtgagccaccgcacctggccaacagttcattattttagattgacaagtatttactttaaaagatgacagttctttaaaagttttttgctacttccttctggtcttgatagtttatgttaaagatccataatcattctaatcattgttttctaatcaatgttactttgatgtaatgtatctgtcattctactctgctttgaagatcattttctgtcttgagttttttaaaatattgtggtaattttaccattttaaccattttacaatgtgtaattcagtggtgttaattacattcacaatgttgtgtaactatcagcattctctggttttagaatattttcatcacccaaaacagaatgtccttagtttttagcagtttatcttagcatgaatttgtttgaatttacgctatttaggatttgcatagattcttgaaactgtaggtttatcttcgcaatacctggcaaattttccactcctacttcttttttttttttttttttttttttaagacagagttttgccctgtcacccaggctggagtgcagtggcgcaatctcgacccacttcaacctccgcctcccgggttcaagcaattttcctgcctcagcctcccgagtagctgggattacaggcatgcgccaccacacccagctaattttgtgggtttttctttttttttttttgagatggagtctcgctctgtcacccaggctggagtgcagtggtgcgatctctgctcactgcaacctccgcctcccaggttcaagcgattctactgcctcagcctctgaagtagctgggattacaggcatgcgccactatgcccagctaatgtttgtgtttttagtagagatggggtttcaccatattggccagactggtctcgaactcctgacctcaggtgcttcacctgcctcagcttcccagactgctgggattgcaggtgtgagctactgcacccggcctcttacttctttaaacataattctagcacgcattattgcccatctcctttagggacttcaaggacctgaatgttagaccttcagttattcagtcatatatttctgaagttctgctcatataattcttaacctgtttcttcctgttattcagagtaggtaatgtctattgatttatcttcaagtccaataaccttttcccctgtcatctccactctgcttttgagttcatccagtgaatttaaaattttgattttcatttccagttctaagatttccattcatttcttttttgtattttctatttcattgctaagactttattttaacatttgtttcaagagtgtttatgattgctcattcaaacataaaagaagtgctctatcatatagtagctgccttaaagtctttttcacataacttcagcatctgtattatgttgcattgatatgtgtatctttttctgtgtgagttgaaattttcatggttgttggtatgagttgaaattctcatggttcttggtatgttgagtaattttggagtctctcctagatattttgatgattatgttatgagtctctgggttgtgtttaatcccatggaaatttttttttttttttttctctaagcaggcaattgatctggttaggttcaggctccaagttccaacctaacttcagggggttggatactcaagggagtatcagtttacttttcaaagtccttgaagtactcttcggttctagtctgtgagtgtgccaccttgtggtcagtctgtgacctgtgcagtgcgtctatctgttagttccattctctgagcctttggtatgctaattacaattgatgcaaacatttaagggttggtgatgatccctggaattcatgagcaactctatggtgtcactttcctgaactactcctctgtattctccttggaactttttagctccttagggctccccctttcagtcttttaggagctactgtgaacttccttatttgggactttctctgggcccaagcaagagaaggatggtgagagttaaaaaagcaatagaggtcggcctcatcacacctccactaaatggagagaaaggttcccctccctcagttttccttcttgctgaccgctttactggtcattgccctcactgtcctggaattgcctggaagcaacctcatgaatgacagacacaaaagagcagaaacaacagagaacaaagtcaaggatttcacaccgtccatgagtgttaggagccctcttgtttgtccatgagccataactagagggcttctggagcattctccttcactgcagcagtgctcatttctaggtttccagcttgattaagttcaggcctgaggctactaggagaaaataaatggtaaacccactagtagtttgattgcaactttgattccagtggtcttccatgatttccctgatgctattcactttctagaattttttccagtagttgctttatatctgttcaggttgtatgcttctgttcagtgggagaaatgagtgaagtgtttttatgccatttcacccagaaccagaagtctgacctaatccatattgattttgtacataggaggtggccgctgttcctttccacgttaaagcagtcgtgcatgtaaattctggggactatagtcacttctacattgtacatgagtcctgtgaggctttaggtagtctgaattatcatgtaatataattaggttatatgtatatggaattatgatgggaatctaggtaaggagacaaaaaattaagacggcatatgaggccaggtaaggtggctgatgcctgtaatcccagcactttgggagaccaaagcaggagggttgtttgagtccaggagtttgagaccagcctgggcaacatagtgagatactgtgtctacaaaaaaatacaaaacttagcctggcgtggtggtgcacacctgtagtcccagtcccagctactctggaggccaagatgggaagatgcagtgggtcatgattacaccactgtattgcagccttggtgaaagagggagaccttgtcttaaaaaaaaagaaaagaaaaagaaggcatacaatatgtatgtatagatttgcgtgcacacacataatgatacttttgataagcttaattaataacaggctaagcctccagtgattatattattgtcctcaaggagcatccctctacttaatatgtcattactattctaaaggataaacatatctaattcaagagaatattaatctttgtcaaatgtttgatataaaaacattaattttcctgtatcatcattctccatatttttggcaattaagagagaaagctcataatgatggtcaaaaaatagctttaaaaagttggtggtagagttagaagactatgttttgtacactaggatttagcctttttccaaaagagaccagaagaagagattctgccatttcctgactgagtcatgggtcactcgaagaaactgaacctatttatctattaatatttcaagcagggtaggagtcaatacagggaattaggttgtaactgttaaaaggactagagcagcaaatgaatggtggaggtgtcggtgtttcctagaccagtaactgcaggaaactattacttctaatgccagagtatgtcttcgtcgccccaccacggcctactcagtcactacaggagaccagcgcctagagcttgtgttacaagactctgtacaaatctgctgctgctattgctgccagagtcaaagacaaatggattctgccatcttccagttttgtataagtgcctttgaaagaacctaaacctagaaccttgctggccaaggaatctgagaaatatagtttccagacttagaacccctgtgatcgtgttagatcttagagaaaaataaggatggctctaattaacataagtattcattgacatctttgtatttggtttacataatattgtgtgctgtctgatagtgaagactctaagctgcttgaaggtaggaataggtctcatatacttttataatcccacaaagcgtagcacagtgccttatgcttgtgcagttttcttctacataattatttcatataactgtaacccaaacactaagcatgccttcaaatgaaagatcaatcttctttatcactggtcagttccagagccatcaattaaagaatctgaggccttcttctcattagtccctgaggcaaaagtcaaggaaacttaagactgtattccgtaggattcctgagctaggtcatcagtatattacatttttctacttaaagaatagtattagatttcttacaagatgagggctttggaggcataagtatatgcaggtacgtcaattaatagttgcccaagtgaggccgggaacggtggctcacgcctgtaatcccagcactttgggaggccgaggcgggcggatcacgaggtcaggagttcgagaccagcctggccaatatgatgacaccccatctctactaaaaatacaaaaattagccgggcgtgatggcacacgcctgtagtgccagctactctggaggctgaggcagaagaatctcttgaacccaggaggcagaggttgcagtgagctgagatcatgccactgcactccagcctgggtgatagagtgagactccgtctcaaaacagaaaaagtaaaaaaaaagttgcccaagtgatttcacacttactgtttagagaactgttttgtggtggtgtggtgcattctgtgcttggtgaaacagaggagaaatttctgactcaccctcccagatgtagtggaaaaaaaaaagatcaaaacattctgtaatattaagtaataataataacttcttattttttctagtctaacaaatgatgaaatttttttttgagatggagtttcactcttgttgcccaggctggagttcaatggtgcgagctcagctcactgcaacctccgcctcctgggttcaaggaattctcctgtctcagcctcccgagtagctgggattagaggcatgcaccaccacccccggctaattttgtatttttagtagagatggggtttctccatgttggtcaggctggtcttgaactcccgacctcaggtgatcgcccgccttggcttcccaaagtgctgggattataggtgtgagccaccatgtccagccatgaagacaattttttaagagaagcaaaaaaaaaaaaaaaaaaaaagttacataaaacccagttacttgaatactgtactgaatgattttggcatatttccaactggctcactttcagtcattccttgtcttttttttgtgtgtggggggatggagttttgctgtgttgcccaggctggagtgcaatggcgcgatctcagctcactgcaacctccaccttccaggttcaagttattctcctgcctcagcctcccaagtagccaggattaccggcgcccaccactacgcctggctagtttttgtatttttactagagacgaggttttacttattggccaggctggtctggaactcaagttatccactgcctcagcctaccaaagtgctgggattacaggcgtgagccaccgtgcccccacctgttctttgtcttttgtgagtgtttttgcatagatcattgggtcatgagtatacttctttctctttttctttttttttttgagatggagtttttgctctgttccccagtctgcagtgcaatggcgtgattttggctcactgcaacctccgcctcccaggttgtagcaatttcctgcctcagcctcctgagtagctgtgattacaggcacctgccaccatgctggactaatttttctatttttagtagagatggagtttcaccatgttggcctggctggtctcgaactcctgatgacctcaggtgatccacccgcctgggcctcccaaagttctaggattacagatgttagccactgtacctggccatgagtatactttttattgctaggtaatattttgtaatattttactaattaggtccgccatagtttacatttccttatcgttgaacactcctcatttgccattacaaataatgctgcctgacatattgtgcctaaaatttttcaggcttttgatcatttccttaagctgaagctttaggaccagacctttttgggttaagtaaattaaggatttatttttctttatatttcaaataattttttaaaattaaagtataacacacatgtggaaagtacacaaatcatacgtataaagctcagctcaatgaatatttataaattctttcacataggcagcatttgattaattgccagcacctcggaaactattgtcatgccttctcttggattagttttgccaaatttataactttatataaatgaaatattactgcatatatgtttttgagttgggcggtttattttcccctcaacatcatgtttgaaaggttcaaagatgttactatcactattttgttatatgaatatactttatccaccctaccatttttgtttgtttgtttgttttgagactgagttttgctcgtatagcccaggctggagtgcaatagcacaatctcggctcactgcaacctccgcctcctggtttcaagcgattcttctgcctcagcctcctgagtagctgagattacaggcacccgccaccacccctggctaatgattgtatttttagtagaaacggggtttcaccatgttggccagtctggtctcgaactcctgacctcaggcgatccacctgctttggcctcccaaagtgctgggattacaggcatgagccaccacaccctgcccatgcattcggttttaataggaatcaccaaacagatcgtgaaactagttgtacgtttttatactactactaaaattgcatgaaattgggtctctctctgtgacccaggctgaagtgcaggggcgtgatcatatctcactgcagcctcaacctcaagtgatcctctctccttagccttcagagtagctaggactactggcacacaccaccatgcctggctaatttttaaattttttgtagaaagatggggtcttgctatgttgcctaggctgatcttgaactcttggcctcaaccattactactccctcggcctctcagagtgctggggttatagtcatgagccactgtgtctggccttatcgtaattttaatttgcatttccttctaatgactaatgaagttgacagccttttcttatgcttagtagacatttggatatcctctttttttacatttatttattttttatgggcagataatagatgtacatattttcaaggtaaatgtgataatttgatacattcatataataaaatcagggtggatatccttttgaaggacttattcaagtttcttacccatttttaaatggattatgtttttcttcttggcatctaagagttcttttttttttttttttgagtcggagtcttgctctatcacccaggctggagtgcagtggcgtgatctcggctcactgcaagctctgcctcccaggttcatgccattcttctgcctcagcctccctagcagctgggactacggtgcccgccacccgcccggctaatttttttgtatttttagtagagacgggttttcaccgtgttagtcaggatggtctcgatctcctgacctcgtgatccgcccgccttggcatcccaaagtgctgggattacaggcgtgagccacagcgcccggtcggcatctaagagttctttgtatactttggaaatgagccctttgagggttatgtgagttacaaatatctttgcccactctctgctttgtcttttggctctcataatggtggctattatgaatagaagatattaatattcatttagtcaaattcatcttttcatttatgatttatgtcatttgtgttctgatcaagaagttgttttttttttttaatcaccaaattatggagacattctcctacattattttctggaagttttattgttttgtctttcacatgtagatctagattccacccagaattaacttttatttatgctgtgaggtaaagggccacttttcttttatttccaaattactatggaaattaagtcagccatttgtttaaaataccatcttttcccaaatgccctgcagggctgccttcatcttaagtcaagttcccatgtatgcgggctcctttttaacatcttagggtagagcacagatccctatttctgagtggcttctccatgggctgggtatctccatcacctctgctcccctctgactgggctccacaccctgcttggcttcacagccttttatttattgcatgattttagttggaacaccggtaggtacctctcagaccaaaactgtgcagtgttaccatttctacctgatgttttatgaattaggcatgtgagttatgtctccatatgtcgaaaaagactaacatgatgggcttcctcagcatttccaaaaagcttgcatgctgggattttcttttcattattcactgtgcttatattgactcacaaataatttcaagccttctttttagctgttagttctttcttcctcctcctaaactttcatcagagctgtgcaaaaatagagagatggattaatttagtagatttttgtcttcccattacctctttttactgtttgtttggcacagggagttcacaatcaataaaatcatcaaaagtaaaagagctggtgagtaaaaggagcagaagatttgactaatccacaaagtaactgacctcttcttaaatcatttggagccagatttgagagtggattttgagtgctaaggggggtttattttaggaaattgactttaaaatatccattttcccttgctatatttgtatcatctaattttgcttttggaatccttcagatggcctctctcaccagcaagcattagtgtttcctttcttctcatatcctgagatgaacttgcagaaaacaacgcttcatcaaaaaaccgtcttgagtctactgcatttaaaaaataattaggaacaataaaaagaaagaaggataaacattgcacataatgcttcaacaggaagcattaacatcttttaactctgcgctagtcagcatgtgtgcatgcatatttttgctaaaggttaactaaattgtttagtcatttctaatgggtggacatccgtctgctgtacccagctgattaatgtgctagatttctggagagaatggctttaattacttatgatgaaccgagagtggctaatattgtgaaagaaaattgctgtacgaagttcttgacaacccagggagttaacaaatatcaatctatacaagaaaaaagagctcttgattctttgaaatgcagtggaacttagttctataactactattggtataacactagcaatttacacagccatttttccttttattttcttccaaaccatgcagcaaatgttatgaagacaggcatattatgttttaaaaagaagaaagcagagactcagggatttcaaggacttgggcccaaaggcattcaactagaaagctggtaataataacagcgacagtttattgagtcttagtgtttctgagaacttttctaagtactttacacatattaaatttttaaatcttcacattagtcctgtgaggaaggtactattgttatgtctgtattacccatggggatactgacgcacaaagaagtcaagtaatgtatttaagattctagtaagtgcagagcccaggtgcatgcagtgcctgggctctgccacccatgcagtgctgactagggcttccacccatggattttttttttttttttttttttttgagacagagtttcgctcttgttgcccaggctggagtgcaatggcatgatctcggctcaccacaacctccgcctctcgggttcaagcaattctcctgcctcagcctcccgagtagctgggattacaggcatgcgccaccacgcctggctaattttgtatttttagtagagatgagatttctccatgttggtcaggctggtctcaaactcctgacctcaggtgatctgcctgcctcggcctcccaaagtgctgggattacaggcatgagccaccgcgcctggcccttccacctgtgtttttggcttcaggtgtgggactcttgctgcttttcaacagtgccacacaataatatagctaatgaggatgtctgcggattgaggtagcctatgcttcagtcatgggtcctcaagtgctgtgtttctgctcagtgaataacagtggtggggattgaaagattccttgagttaatttgaattcaaatccagttctattccccaccccgctttgtttccgctctaccagtgcagtattttttgttgttgttgttgagacgcagtctcactctgtcgcccaggctggagtgcagtggctcaatcttggctcactgcaacctctgcctcccagcttcaagcagttctcctgcctgtagcgcccgccaccaggcccagctaatttttgtatttttagtagagatgggttttcaccatgttggccaggctggtcttgacctcctgaccttgtgattcacccgcctcggcctcccaaagtgctgggattacaggtgtgagccaacgcacctggccaatttttttttttttggagacagagtctcacttagtcacccaggctggaatgcaatggtgcgatctccactcactgcagcctccacttcccgggttcaagcaattctcatgcctcagcctcctgagtagctgggattacaggtgcctgccaccatgcccatctaatttttgtatttttagtagagatggggttttaccatcttggccaggctggtcttgaactcctgaccttgtgatccacctgcctcagcctcccaaagtgctgggattataggtgtgagccactgtgcccggcgtcttcctgattataaaaaggactttagcatgccttaactctccattaaacagcctcctcatcttgtttttgttgcctggaattttaatggcccacccacctcctttttttttgagacagggtcttgctctgtcacctaggctagaatgcactggcacaatcatggctcactcagccttgacctcctgggctcaggtgatcctcccacctcagcccctcaagtagctgggactacaggtgcatgcctccacacccagctaatttttgtattttatgtaaagacagagtttcgccatgttggccaggctggtctcgaaatgctgggctcaagcagtctgcccacctcagcctctaagtgctgggattacaggcataagccactgtacccagccaactttcccctttttaacataaaaagttggttattaatttttaaatcaatcaaatgacatctggtattttactgatttatttgcttctggtttcttatatcccataactgttctttggcttcaccttttagtttattgaaatacatcctttaatatttacttttgttttcagtttaccatcatttttcttaggtctttttttctttttcctggaagaaaaattataaaattgttatataatatttgatacatatgaaggtgcacaaatacacacacatgaacatacacctacaaactgtaggtatgttatgaaccataatagtaagtgaattcaccatagacatttccaatagagttcactctacatgtataaaaacctcctacttccttcccagaggtaaccactagtctgaatatagtgtttctcattcttttgccttcaaaaacatacatactaggttttcaaaaataggtttcaataggttttttttttttttgagacagagtcttgctctgtcacccaggctggagtgccgtggcacaatctcggctcactgcaacctccgcctcccagattcaagcaattctcctgcctcagcctcctgagtagctgggattacaggcacgtgccaccgtgcctggctaattttcgtatttttttttttagtagagacggggtttcaccatgttggtcaggctggtctcaacctcctaaccttgtgatccacccgcctcagcctcccaaagtgctgggattacaggtgtgagccaccacgcccggcttcagtaggtttttaaaataactgtaataggtttaagatttgcttatgtttaacttcataaaaaatactgtcaccttgtgacttgccctttattcagaatcatgtttctaagacttagtgttaccggtagcagcagtttttctactacagctgtggataatattacatcatttgcatatactacaatatatttactcattctcccataagtagacttttggtcatttagatttttcctatcagtagcagtgtcattatgaacactgttgtttgtgtatgccaactgatgtgcttcacgagtttctctaaggcatgcaccctggagtgaagctgcttggtgtaaattatacccacgggcccatcaggtatcaaactccaggcaccattggctcatagctctggattccagcagcctgtggcttagctcctcctgccagttggcctttgtggtctgtttctggtccatgatgaggtttataatttttgtcccttgggatttcccttttaccctttgcaataggtttggaacaacagggtctgccacttgtgaactcaaggcatattcatgaaatgaagtcaccatcatttacttcttcaaatatttagtggtcagaacagaggccgtttctggaattataaggttgaattcttcatacgatgatgtagctagattttttacaacttggtttgtgtgtaaggaagcaggttcttttccctgagtgtaatgtatatcagcacttttcagtgagggtgattttttttttttacccaggggacatttgtcaatgcctagagacatttttggttgtcatgaatggggtaggtgaaggtaaaactagcatctagtgggtagaggctatagatacagctaaacattctacaggacattgaacagggcagccccccacaacaaagaattattgagtcctatattcatagtattagggtaaaaccacaaccaaaaccctacaatgtataggacagcattgcacaaaaaagaattattgggtccaacatttcaatagcgctagggcaccctgatgtatgtgaagatgatcagtcattgtgttctgaacgtatgattctaacactaaaatttgggccaggcgtggtggcgcatgcatgtcattccagcactttaggaggctgaggcaggaggattacttgagcccaggagtttgagaccggcctgagcaacatgataaaactgtttctacaaaagataaaagaaatcagctgggcgtggtgacatgtgcctgtagtctcagctactcgggaggctgaggtgggaggatcacttgagccctggaagtcaagcctgcagtgagctgtgaccatgccattgcactccagcctgggcaacagagtgagaccctgtctcaaaataaattcatatttaatagagtcacaacattttttgctttttcccccatgccatgtctttggaagtgtgtgtttggaatgcccaggtaatacagctagtgaattacttgcctaatttagatcaaagtatacaattagtgtgaaaagaaagatgaattatcaagaagtaacgcaggctatatgaaaaatagcagggtttaatttctatttctgtctgtcagtggaattctgtaaacgctagtggacattcttcctgtcctagcacgacttctcttcccagccatctcaagctttgatcaggaaggagaagggaggcattcctacacgcaccagaacagtgcagtggggagttggtctgtggatttcgtggaattttagaaaaaaaaacaaaaagcaacaaaaaaaaaaaccagagcacatctcccactacttactgggcccggctcagcaatagcattacccagtaaatatggatgaatggatgatcaagagtttccgcagtctggtttgcttcccttcctgttccaggtctttctttgtccatgaactgctgaaacctgagtgggggcttccacaaagggagagaaagggggatggagaaggagggaaaggcagataacagccgaatgtaatcagcattttattactgtcctcaggaagtaggaataggaaaaaagaagtaggttggagcaaggaaagttaattatgtgaggttatttgacaggaaattactaaatacaaacagacagaagaaacacattttaaagcaggataggaaatctcaagttactccactctgtgcattcaaaacccccaaagcaaattctgaaaatagcagtttaaacaaaagctatcttatctgataaaagtatttcaaacacaaagggaaatttatatattgggcaggcaatcttaaaataaaccgattttgttgatagcactgcaaatgtaattgtgggaaacccccttctgatgtctgaatttatcttgtagatgttttgaatttggcatttcagttctataaaggtatatgtgtgtgtgtatttcaccttggaaaattatatatatgtgaaataaaatgaaaagtttattatgtttgtgttttttttcagtattacaaaattttgggggagttaggtattattaatagttccagaagactgttacatcagtacagccagagaactgaggtgttctctaaaatctttatttctggaggtcatatattttaaatgttttaattgatgtatttgattaacataatttttttttattgcttttcagccattggcaaaattcgtagaatctttgtaaattatccaaacatatttggtgttgttttaaagactaagtgattaaggagtaggaccttttcctaccctgaatgatttctggttctttaatggcctatgctaaatagtcagtgttgcagacatagaaaggagggtcagaagtggctgttcagtaatctgacccttttaattaaggttgtcatcctaagaaaaaagacccaaataacaaaaaacaccaacaaaatacatacatatatgcataaaggggcacacacacacacacacccatatttatatgtagcttttccaaagaaaaaaggaagaaactttattttctagatcttgatagtaggattctctaaggattttttaaaatagttgagatattgaagagtcatatcatagaaattgggtggctgtaaaattgcacagtctgtggataaagttacacattccatgttagttcaaagaaaaagcaatattttgaaaacataaatggagctcaaagtctgcattccttttaaaaggccaacacctgtggaaggaatgcaggttgttcccacttgaccttcaactgtggagctgggctaggtacttcagatgttatggtggtcaagtaggaacctctctctgcagcagtgtctcctgggacagcacctgtcctgtctgttgtcaggaagccaacatatggcgacagctaggaataatcagagagtagatcctaacccttgctttgaggagcttgctttgtataccacgaagtctcacagtgatggatgagtgggtgtagataatgtgcaataagccataacctctctaagcaatcaggcttacattttgcaagtcctgggaaaacctgggcagacagtattagcacactcagactgagtcctctgtgtgtagtagttgaagataaagacatcattgatgttccagacagattctcatcatgcataaataattccttaggacggaattaccatagttgccttgagtggcacttcccctcctttaggccactcacattagttcagcagtttattgtggcgtctgaagaatcaaatgcacaattcaacctcaagaagaaaattacaaatagcatattctttttgaaccgtgaatgtattcgtccacacaatatttgatgggaaagagatctggctcatttttgcttttttcattaattctttgtttattcagtcaatatttcttaattccttgatatattccaggagctgtggtggaggcagagaatgcaatgtgaaaagcaatgcattagcaggcaaggttgctacttcttagaactaatagtttactgtcatatggtcatgcctcctctatgccctagctttgtgatcttgggcaagtgacaattcctctgtacctcaatttctttggatacattagagtgttttttcccccaggtggcccttaagatcttgttcagtgctagtctttttcggatatatactttagttgttaaattttttttttttttttttgagacggagtcttgctctgttgcccaggctggagtgcagtggcgtgatcttggctcactgtaacctccacctcccaggtttaagcgattcttctgcctcagcctcccgagtagctgggactacaggtgcccgctaccacgcccggctaagttttgtatttttagtagagacggtttcaccatgttggccaggatggtctcgatctcctgaccttgtgatgcccccgcctcggcctcccaaagtgctgggattaaaggcatgagccaccgtgcccggccagttgttaaatatttttatctccatatctcgcttggtgttctagtgagtgactgaatatggtggaactgggtagatcagcttagatgtttatatgcaggttagaatcattgctttgatttctaactgaactagttaccttacttgagtctataccacctgggtatctccagcctgtttgactggcttacatacatatgccgtttcctaagactcaagctcactttaaagagaaagcatgcatttccttctattgatgctggaaacttttcaagcagttctgaggcatggtcttcaagacacaaaagatcattgttacatgtgctcctttgctgagacactagcccatggcaattgagttgtttttagctcaacttcagtgctagcagacaaaactatgcttaagacaggattattgaaacctggaccttccacaatttaataatattggtaatgttgatgaattcaactcctgcttatatcatctgtttttgtaaataaagttttgttggaacacagccaggtccagccttttctgtactgtctatggctgcttttgagctgtaagtgtgtgactgagcagctgaaacagagactgtacggcccacaaaactgaaagtatttgccatcctgcccttaacagaaacatttgctgacacctcaattataggataagcaaagcccccaaccctagaatttaaggtgtgtggaaccataacacacacacacacacacacacacacacacacacacacgtatttttttttttcaggaaacagcttatttgccttttttttgcaaaatgcttctgagaaattagccttgttaatgtgtaacttttttgatgccatgctattgagatagcagcattggatactaactacatacctcacagattttactcttttgaaggagtttcagtttccgtgggctggattcgtaagtgaactgatctgatgagaactctaagttattgctaaggcattttttattctgttaaatatgatcctgtggagcctgaggtcctagctttctttacacttgagctgtgaggagagatgtgacaacatttcagagacatgtaagctcttggagacatatttataaccttcctccacctttgttctgtgtttatagtggacagaggtttagggctggtaggttgtgcctgcaggagtgctgaacttgaacttagagaaagctggggtcagtcaaagaaagtctaaggtcagaggaaatgaaggttaatgaggccgggttcctgccctctaggggcttacatgctattgggagtgactgattcttttcctaaaagagtgataaatgccctcaataagacatgcacgtggaatatgagaacatggtgtggaggaggagagtggagatggggccattcacacggggagccacagccaaggcttacatgagcttatgtgcaatgtcatagaactacaaaagctgagaacaagcgagtgtcagggtggcaagtggacaacatggagggaacatggggcatttggcctttggcattttctcaggggctcagaattggtttgcacggatgggtcagtttcactttaaagggtttaaaggtgaggaatagagctactcagtaaatgtttacaacaaccaaatacattaagggggagataaataggttttaggaccaagcagggctacttttatgggttcaaaggacctatgatgaccagtcctagcacataataatttctaaataaacattggttgatttaatacataagctctttggtatttgaaatgaactactgaaaaattggcatttttgacatgaggcttcatgtttgcagccaaatgactggaaattctgtttctccacatgtatcgaccatatgctagatactgcgctaaggtcgggggaatggaggtgaacagggctcatttcctgccctttggggacttacatgctgttgggaatgactgatactttcctaaaaaggtgataaatgccccgaataaagcatgtacatggaacacaagcacatggtgtggagggacgcttatttggaggaggagagtagggacaaggccttcagaaaggactcctggaggaggagaccgccttatcctgctctgccttttggtgctattgcctgaatgtgtccctccaaaagtcatgtgttggaacctaatacccaatgtggtagtacggtattaagaggtggggcctttgggggaaatgataaggtcacaggagttttggcctcatgctcttacaaaagaggctgaagggagctgccttgcatcttgtgagatgctgccatgtgagaacgcaacaaggaggcccatctgtgaagtggagagccagccctgacctgacgctgaatctgttggctccttgatcttggacttcccagcctcaggaagtgcgataaatcaatttcttattaatttaattaattttattcactttattgtatttagagacagggtcttattctgtcactcaggctggagtgcagtgatcgtggctcactgtggccttgacctcctggggtaaagtgatcctcccacctcagtctcctgagtagctggggccacaggcacatgccaccacacctggctaactttttaattttttcatagacatcaggtctcactgtgttgcatgggtttgtcttgaattcctgggcccaaacaatgctctgcctcggcctccaaagtgctgggattacaggtatgagccaccatgcctggccaatttctattatgtataaagtattcagtctagttattttgtgatagcagcaggaatgggctaagacactagggatgtccttttccttagaaagggaggtatatgggaagcctgcgtacaggcctctgaggatggaccttgggacagaagctcagacaagggatgttggggaagcctttgcccaccatagtctgactttacctgctgacagtctatccctaagctcagtcctttctgaaagagaagagagcccaactgtgtaagacaagcagcttccattctaagagcaagacagtgtaagttctgtggaattgtgaaaagcgaatgcagccccgtcggcagtcaaccagacagaccactgaagctggggtgcagcccacaacccctccttcctcagaacctggcccagctttccatgatgggttctgttcctttctttcatagaatccttccctttttcccaagagattttataattaatagagatgaagaaaggcaggaaatctgtgatagagtacaaacttccacacaggccagattaaacacacacacacgcacatacacacacagcagcccacaaagtaactcagtctggtgggaagagatcaaagggcagccatatgactgggctggcaaagggctcctttcccaggcagtccacatcctgccccttagtagatgagacaagtcaaaggaggaagtgtgcagtacagtgagtgagtgcagttctcagggatatggtcttagttcaagggctccaggagtgtgctgtgagcatgggaatgataagctcacatctgcttgtattcataaacagctccaggaggtgcggttttaaattaccaccctaccactgctaaacctcctctgtaatcctataaagatgtcaggtacagatagaccttggaagggcagagccctatctgacaaccctgtatcaaatagctggagagcctgaggattgggttgcaacaggaataccctaatcttgatttcattgtttttcctctccctaaaagggtgggattggatttggaggtgggaggagaatctgcaatggagttaccgacaccatgtaaggaaaaccttggaggctgctattcccatttggagggatcagcaaaaaggccagcagacaagcctgccactattcgtaatccttcttgcttctgctggcgaatccttccaaggcaggcaggcaggcagcagcagctggggtggagggactgctgtcctgatgaaggggagctgagtgctggctttgctgtgctctggaattattacctgtaagtgcaagcagccaggtgactgcagctgtgatggggggtgtggagaccccgcccatgccagctgtcagagccccaaacagccaggacagcgcacgggatttatgcttcctctccggcctttcaatgcttctgtagatatacttagcaattacaatgctggtttgggaatttccctcggatgagacaggacttgtttccaaaataacacctttcaaagcatgcagagacttttagaaattagataattgtgtgatatttataaagtgaattacgttgtgctaacaaagtctgggcagatggttctgatgctgaagtaaataacaccttatgattcattaaggttgggaaaaaaaggatttttaaaaagttgctactttacagctgagtctttgcaagaaacttagacaactcaccaagtaggcaatacattttcaaggtaaaatgttaatgtctgggtgtgcgtggcatggttaagttgtcctgtttcactcataacacttagtgagcatttaaaatatgcttatccctggatgcagagagacacaaagatgatactttattgctcttgtcctccatggattctcagtctagtgagggagacagatgtataaacagataattgcaatacagtgagctaagtgctaacagaaggatagaagaaatgccataatggtgggagggatatcaatttacagtgtgaatggagaagagagaacagcctcacagaggagttacatttgagcagtatgtgaaggaagaggaaggattttgaaaggagagaaggatgttgcctctttgtggctcctcattcaccagcatcttcataccccagggcctttgcacattcgtattcacctttggttcctcttttttaccagctccttcttacctagggccctctgcctggaaaacttctttcatctctcttacctggttcaatcccttagaagttacatcccatgttaactctttcagggaggtcggacttctctaagtcaactctattataaacgttcactcatcaagtatctcatctttagagcagttatcccagctgcacttttacattattggcatgactatttgaatgatatctgtttttcccactaggcagagcctgtctctttttatttgactttgtttcttgactaaataaacgttcgttgaatgaattagacgaagggcgttccaggtgtgaaaacacatggtatgttcagagaacagcaagtattatgttggatcttggtgtatgtgaattaggggaggccgaagattaagccatttaaggaactttgaagatctaaacttctgtttatatactagctcagctaatatttttaagtattaagaggcatttcaaagatctgcctcttcgttattatattatcagtatcagatagtttaagtcaaagatgaagtgttaaaaatgttttttaaagttttttttggcatatggttttggggctcaaatatatgtactttaaaaatgtgattcaagtataacatacatatagaaaaacgcacagcacataattgtacgactggatggattatcacaaagcaaacatatgtgtaactctcatgcaagtcaaggaattgggatacttcctagagcctgaattgtgaaattcagcacgtgtactgcatcagaaatggaagcggatgagctagaagattctctgccagcctctaagaaagtttaagctttggctgggtgcggtggctcacgcctgtaattccagcaccttgggaggccgaggtgggtggatcaactgaggtccggagtttgagaccagcctgaccaacatggagaaactccatcactactaaaaatacaaagttagccaggcgtggtggtgcatgcctgtaatcccagctacttgggaggctgaggcaggagaatcgcttgaacccaggaggtggaggttgcggtgagctgagatcgtgccattgcactccagcctgggaaacaagagtgaaactccatctcaaaacaacaacaacagcaacaacaacaaaaaacccaccaaaaaacaaacagcaacaaccaaaaaaaaaaaaaaaaacaaggacagtttaaactttctgaggaatagaggagagggattctcatataaggtagcccccagttgcttccagactcactcatgagcttaagaaagtggtgtgagagaaatgcaaacctcactagcccctcatccatccccaggcagggctggagcctgaagggtggagggtgtgctgtgttgcagagagacacaagggggaattttttcagaggaacattgaatcctttctctgtcctcaccaggaacactgcctcattggtgtggagcctgggggctgagatcttgtcatcccagtattgtgcaggggacattgacgacttaaccagcttctaagcaactttggggttgcatataagacaatggtgctgagtataagaatgtaagacttgggactgaacgcctgctctgtcacctattagctgggtgtcctttagtcacttttagttaatttctctgtgtctcactttccttattcattacatgcggataataatgtacctcatgtggtggttaggatttaatgcattcgtggatgtaaagtacttacaatatgacctagcagagagtaagcactcggtaaaaaagaaaagctctctagttgaaaaaaccttgtttttgccttataggaatgtggtcgtccctaatgggctaccacagtaatgaggacttttgagagagagactttttggtataataaaataatttcctactgaaatggactgtgggactttgcttgtaaatgactccgccctaatgtatctgccgtatagtatttacaagtttgggatttcatgctattaatagaacaaaccataacatttttccttatttaaaatccagtttctccattttctcgtagcatgtgagcaggataggtagaagaaaaccaccagatttccctcaatatactattttaaaatacttatcaggtccagattacagtggcttttgctgtaatctcagtgcttcaggaggcgaacacaggaggatcgcttgaggccaggagttccagaccgcatggacaatatagtgagagccccatctctacaaaaaattaaaaaattagccagtcatggtggcacatgtctgtagccctggctacttaggaggctaacgcaggaggatcgcttgagcccaagagtttgaggccacagtaagctgattgtactacggcattcagcctgggctacaaagaccctgtctctgtaaacaaacaaacagaccaaaaaaaaaaaaacaacaaaaacccttattgtgtagttttaattgtagcactgaaatttgagggaattatttaaaaatagatcttgacttgctactctttgaattggttgttgtggcattgttttgctagctgttaaactccataaatagtttatacatgattacaacttgatcacatttgtcctataatttcaaggcttctatgattttctgactctaggcaccattaagcctcttcccatggtgatgaccaagactgggggtatgtgtgtatgtataaggattgatggttcacagttctaagtccccactctgtgataggtggtgcacagaacatctcagtacctgtgctgtctgtacttgatccttggcaatgtcgctttttttttttcccctgtcccccaggctggaatgcagtggtgtgatcagctcactgcagccttgaactcctgggctcaagcagtcttcctgcctcagcctcccaagtagctgggattacaagtgcgtgccactatacccagctaattaattttttttttttttttaagaaatagagcctgtctcattttgcccaggctggtcttgagctcctaggctcaagtgatcttcctgcctcagctttccaaagcactggggttctaggtgtgagccactgcacttgcccaagctcactttttaaacaagataggagagtcaatattgtaactttgatagaggacaaaggatgtataaaaggaacaactgcctttgtaaatgatgccaagaacaggatatgattttatagaccaggactttgtatataaaagtgacagagtcatggatatggatgggatgcatctcaggaaaaaacaggaagcatgcatgttggaagggaatgtcactttaatcctcaaggttataagcgcacatttgtgtatatttcgtggggaagggaggctgtgagaaaactgcaagagtgggaaggtaacaagaatgatctctggacagccgccataggacatgtacaaaactgctagaagaaatgtcaaggggaaagagatgaggtcactgcaacctctgcctcctgggttcaagcaattctcctgcctcagcctcccaagtagctgggattacaggcatgcaccaccacacccagctaattttgtatttttagtagagacggggtttcaccatgttggtcaggctggtctcgaactcctgacctcaggtgatccacccacctcggcctcccaaagtgctgggattacaggcgtgagccacctcacccggtctgtgactcagatatttaagccaaatgcagggcttggcttttagaaagggaatttgaaattaatatagagaggtaaatttaattgcttagaaagcactgataccgaggtactccttcttggtaatgaaagagcctatagaagggtacacacatgtatgtatatatatatgtacaaatgtatgtaagtacctatttttctaccatatcagataccatgtacagagatttcaatttattatttaggtctattctgaaaacaatcctgagtatttaatattattagccccacttcagagataaggaaactgagaccaggaaagctaagtatcttggcaacgtgcttaacaccatatagacatctaacagtggtaatgtggattagacctaaggctgtgtaactttaaaccccagattctgtctgttctcttacagtgactctcatttatgaggaggaatgcacctacattaaaaatacaacaacaggctgggcgcggtggctcacacctataatcccagcactttgggaggatgaggcgggcgggtcatgaggtcaggagatcgagaccatcctggttaaaacggtgaaaccccgctctactaaaaatataaaaaaattagccggggtggtggcgggcgcctgtagtctcagctactcgggaggctgaggcaggagaatggcgtgaacccgggaggcggagcttgcagtgagcagagatcgcgccactgcactccagccagggcgacggagcaagactccatctcaaaaaaacaacaacaacaacaacataaatctgaagggagaagcactgagaacagcatttggggaggaataaaagggcaagagaaagaagtgatattatagtagtcatgtcccagaaaaccaagtcagatggagtggttgttgtctgatgttttttttaaagcttgaattacaaacttaacatagtaaaatgagactaaggaggtgagacctccaatgtccagaccattgcaatgaatctcttttcttgctaaaaacagcatgtagtaaaacctggacttgctattcaaacagttttatctcccgaagtttaagtagataacccagaaagtagagcacaaagtttaattttaacaaagaaaatttagaactggttgggaagtggcaggaacctgggcaaaagtagcattatttcaaaaatcagaatgaaaggaaagaagagtaggcataggatgatgtagacctcagatgccgaatgactaagagattttctattgagtaccatttctcatcgggtgtagctttgccttcagtgctcttttgagaagtcttttgagaccacgtccaaactgcataggtaaagttagtttctatgggtgtttgaataaaaaaatggctttatgtgagctaattctgttctaagccattagaagtgagattcaacctaaagaacctaaagaatacatttgagggccaggtgcggtgggtcacgcctgtaatccctgcactttgagaggccgagatgggtggatcacctgaggtcaggagttcgagaccagcctggccaacatgataaaaccccgctctactaaaaatacaaaaaattagccggatgtggtggcaggcgcctgtaatcccagctacttgggaggctgaggcaggagaattgcttgaacctgggaggcggaggttgcagggcgccgagatcgtgccactgcactccagcctgggcgacagagcgagactccgtctcaaaaaaaaaaaaaaaaaaaaaaaaatatatatatatatatatatatatatatatgaaatatattgagctttttagctgaaatgttgaggtattttttttttctttatcacaagccagagctttcccatccgatgcttatgtcattcatttttttttgatactgggtctcactctgttgcccaggctgaagtgtagtagtgtgatcatatctcactgccacctaaaactcctgggctcaagcagttctccctgctcagcctcttgagtagctgggactacagcatgtggcaacatgcccagctaactttttaattttttgtagagatggagtcttgctatgttacttaggctggcctcgaactcctgggctccagcaatccttccatgttggcctcccaaagtgctaggtttataggtgtgagccactgtgccccagccatgtggctcattctcaaacacttgaatgaggaattttccatttgtctctattaaaccccattgtgtgagttggggcttattgttcccttctgtcaagatttgattcagtggttctgacgtgcacagtacggtgctaagtggtgtagatagatcatcaatgcctgagtctcagggaggttgtggtgtagagatgagattaaaaaaccaacaagcaaaataaatgaccataatgggcgttctaggagtcagagaggactagaatacattcagttgtgtgtaatcaagaaagatagccaggcagcttttgtactgggaagatgatgggtgtgagctatcttcctgcccgaaaaattaacacagtgcctggtttatcatagacaaaaacaggtacaaaataagtgaaaaatatatgttaagggaacttaaaatgggtccttttttttttttttttttttttttttttgagacggagtcttgctccgtcgcccaggctggagtacagtggcgtaatcttggctcactacaacctctgcctcccgggttcaagcgattcttctgcctcagcctcctgagtagctgggattacatgcgcccaccaccatgcccagctaatttttgtatttttagtagagacagcgtttcaccatgttgatcaggatggtctcaatctcctgaccttgtgatccgcctgcctcggcctcccaaagtgctgggattacaggcgtgagccactgcgcctggcctaaaatgtgtcttgagggaaggacagagattttatggtttggaatgcagagtattctgaggaaacatgtaggtaaatatggagcttcaaatcctaaagaatttttcaataaaagtgagttatttagtttttatggtatattggagcatatttttgaatcttaaatattagttaacatattaacatttccacattttctgtgtttattttctattaaatgccattcaagttatttttattttacttgtttttttttgagacggagtctcgctctgtcacccagactggagtgcagtggcctgatctcagctcactgcaagctccgcctcctgggttcacgccattctcctgcctcagcctcccgagtagctgggactacaggcacccgccaccacgcccagcaatttagctgtctcaaaaagaataaaaaaaaaaaataaaaggacccattttaagttcccttaacatttatttttcacgtttttttttttttgagatggagtctcgctctgtcgccaggctggaatgcagtggcgtgatctcagctcactgcaacctccacctcccgggttcaagcgagtctcctgcctcagcctcccaagtagctgggactacaggtgcatgccaccacgcccacctaatttttgtatttttagtggagacggggtttcaacatgttggccaggatggtctcgatctcttgacctcatcatctgcccggctcagtctcccaaagtgctgggattacaggtgtgagccaccacacctggctatttttcacttattttgtacagtgcattaaagatatcattttgtatttttagtagagacgaggtttcaccatgttagccaggatagtctagatctcctgaccttgtgatctgcctgcctcagcctcccaaagtgctgggattacaggcatgagccaccacgcccggcccattcaagttatttaagcaaatattgaacaggacagagtaagtagaaacttaaaggtattctttagtcttcagatctataatttgactttgtcacatctacttaattaaaaacactcattgcgggaagaatggtacaacaagctttcatctgggattatttttcttctgcctaaaaggtcgtttttgaatttcttcagttcaggtattctggtgatacaatccctctgactttatttaaaggactctatcttgcctttatttttaagaagtattttcactgggcatagaattcttggaaattattttctttcagtgcattaaagatatcatttctgatatcaaaccttctggctaccatgtttccattgagagtcttatatttgccatttgaaaactctcttcccataagcaccgccatccctgacagctttaaaaaatgttctcttttccagtagttttgaaatttcatttgtctttgaactataatgttctaggtatagatttccttctatttaccttactcaatatttgtagcacttcttttacttgcggcttgaagaaatttattttggaaaattctctcctattatccctttagtattgcttttacctaattctcttctcttttctgggattctaattaaatgtgtatgaaactatgttccacgttactttctgtttttctctccatgctttaatctggatattttcttacatattattcatttttcttttatctctttagctgtatacgatatgctgctggacccatcttttgaatattttcctaccagtagttatatttcaaattatagagtgctccttttgattcattttacatggaatcctttagttttgctgtctgatttattaaacatataaatcacagtttatacttaaatctccttctgttaactacaatatcttacttccctatgggtctgtttctgttgtttcttttctcttgctttttggttaattcttatttttgtaagcaaaattcttattttataaaataagcatcttatttttataagcgtgaatgctgggcattgtgtattaaaatatagagacaattttacctgtgtgtgatgtggatttccttttcttctggggctgggcggacagggtaaggatggatcaccttgatctgtgcagggattaaactgttctgaagatgggctttagtctttgtgagggctgcttctggtttatgcttacttctttgggttagcactttggaatcacagctgaaagtgggggttgcaggacctttttcccttagcaggctatgaactctgatttttgcctgtcctgctctcggaagctgaaataaacctgttcaacttagttttccactgtctgcaatagagtcagcaagtgggttaaagagaagtcaaatgtcaggctcccttctctccacagtcatgacctttcaaatcattgtaccttgatagtcctctaataccttcaagcagaggctgttttaacgatttattttcctggttattttagctcgctgttgggaaggttggtctgatctaatctagcccattatattgaagtagaagttgaagtacttctttaaggcactctaatcctacatgttttgataccttgatgctatgttcaataatttcaaatgccaagttgctgttaacctgtgccatcttgaactcttgtttatcagaagtttttgatcaagctactgaaaattttgtatagccataacgaaaacacctcaatgttatgtcatatgtttgcatttaaagatagtttacaaattttactcatattattgcatttaatctttacaacagtcatgtgatgtcaaatatcatgattaagttctccatggagacttatctgtaattttagtgaataaagaaaatctgtattaatttacctctagttaagtgaatattctggaaaatgggaatgaaaagaagggggtatttgagagcaatttaacaggttaatattgagattaacccgtttgtggaatgcagagtggtgatcattttgcttgggtaaacgacgaggatggttattcttcctttaagtaaaaggagattctattaagaggagaattaaattttggcaggttaataatgaatggataaaattagtactgaattgtgctcccagaagggagaattactgtgggctaaaaagagctttgtggtggagttgagattattattggacgttttgaggaggagaggaaatgagaaggaggcagggcaatcttaggggagaatctaaaattagaaaccactccccctcctccttcctcccctcctccttcctcccctcctccttcttcccctcctccttcttcccctcctccttcttcccctcctccttcttcccctcctccttcttcccctcctccttcttcccctcctccttcttctcctcctccttcctctcctcctctccccccaccacccctttcattaagggcttacaaagtaccaggcactgtgctatgtttgtgcatacatccttatttaattttcaaccctataagatagttaatctaatggtccctattttatttattatttatttatttttgtgagacagagtctcactctgttgcccatgctggagtgcagtggcatgatctcggctcactgcagcctccaccgcccaggctcaagtgattttactccctcagcctctggagtatctgggattacagacgtgtgccatcacgcctggctaatttttgtatttttagtagagacggcgtttcaccgtgttggccaggctggtcttgaattcctgacctcaggtgatccacctgccttagcctcccagagtgctgggattacaggtgtgagccaccacgcccagccagccagtggtccctattttatagccttgtccatttgtcaggcaatgaaaccactgccttaaaatggagccaaccgctgaagcataactttgataatgagattgttgtcaattataggggtccctgaactgagtccaagtgagtgcattcagattttcacctgaagacaactggccatgcaaagtgcaattttcagaagatggtgtagacagtagagtgcccgataggtgggatgctggttgggaggtggagaacgtagagcacagggcacggttgggggccacctctgcagtacacagtacataaggaagtccccctgctggagcggaaccagcaggaagagaaaagatggggctgatgtgagatttcaaagccagaaaagtcaggacttagtgactgtgaagatgtgaaaggtgacggagaggaatgttataaagagggtttcaagcctgggacagaagttctccaaactgttgtttcctgcctctgtccttcctgcattcctaccctcctaactcaacaggtgagtaggtgagcgtctctgtccacgactcctttcagttgctactctcagccaagtctggcctgcagctcccctcaaacatcctcctgccctagaatgttctcagcgattccctcctgtttttactttctgttaagtgtgtatttccaatttagtattgtgatttcctcctttttccctttcccttttttcctttttcttccactcccaaccttcctctttttcattaatttttttttaatttaaaatgttttgaacatataaactcagtactacattgagctttttgggtgcagggaccgtgatttctgtagacttctatttctgtgatccagtactatgtctaacatgtattacatgctgaacatatgaatgaataaatgggaaatcctggggagtgtaccagaaataggtataaagacataaagttcatagcaatatagaagtagaaaccgactatcattgattttattgtcaagaggtgttcttcctttttctcttacaaaaatccatatggatttcagtatatttcatctctgactactccatagaataacagttaactccacaaataatatattttgagacaataataaccaagaagaacaaaatcaacagaacacgctataccataatatttttgatgggttcttcttacagctgattttaccccttctagtccaaatttttgcttgataaaggtcctgctggataaagattctgataagctacaaaatgcccaaatgttggacagtagaagggagggaaagagggaaaacactttgcagaatggttcatttgcttcatggagttgaatatcatcgagtcctagggaaagcctgctgtttttggaaagtggacaaaaagagggattgcatagagcttggaatttaagagagaaactgtggaacaaagatgtaacgacattcattaatttagatctagattgagaatttttatattaggaaaaaaatgccaataaaaacaatttgccgcctcatctgaaatccagcattatgtgcttagaaattactgcctctgatcattagccggcaggcgggccttccccagaggtctgtcttgtggtagggaaatcaaacagccatgctggcagcagttttatccttttctggaaggagattcgcactctcggctttgtgtgtagttatctgactatctcttctaatgctggagtgttagcatgtgcttagtaatttttaagctcctgggaccagactggaattgatttcatctgcaatttgtctagtgacaagcacaatgctgaagaaaaataaatattcactataatttttattagttcatgacccatcataaatcaaagctgtgaaaagagtttaagtagcttttcccaatccctgggattcatagctctctcagttatcacttgaacaaaggtgatagctggacaccagtgataccctgggatggtgagcttaagggaatttagcttttcccttcctgcaagctttaaaatgtgatgtcgttaggagactagggagggtagacttttcagtttaaatctccccttttccctttggtaggactccgaattttagatttcatggatgaataagtaaccttagtgagtgatttgagactagagtacataaaaatgtgtcaatagttcaggatgactgatagctcccttgtaaccaaagccacctgcaattttttatagtcatgcagcataagccatcttgaacagataatcaattctattgcacaaacagtcacttctgttcaccaaggaggcccactttttctctcttcaagcagggctatgaaaaaaataacctatataatccaaatgatcaaaacttctgaaatactggggcacttgtaaagctaggcttctcttccacctctccataccttgcccgtctctttcttttttagtgaaagaacagtggactcacttatgcagctgtaacaaagatcagagagacctgtactgccatgtgcccatgcacacatgcaactacacacacacacccttttagaagagcgtatttcagtccaagtatcgtttcttgcccagcctttgtcagaattttgatctctggaggattaggagaatatttatttatttattttccttacataaaatatcaagtggcattgcggcagcagcattaccacagcagaaattcattcttcttcagctacttcctgcatctcattgagttaaaaagagtgaggatgtgattttgaaatctgaatttgtaaagggtgtgaggtcttcactgaaaatatgattgtgaattaaaggcttttgattaaagtagacttacagataaacacttcatctatttttcctcattcattaaaataccattatactgtatagtctggtgctggattttatattcattttttcaatagggtgaacacagtatcatcatagttgccattagattattcaatggtatttatatgcaaactaggtcattcattcattttacaaatatagtttgagctttgaacaggtaacaggcactgatttttaggtgctggaactggggctacagtattaagccagacaattaagtccctactttaggagctgacatttgaagatgtaggttaacagttagggtctaatgattaaagatctaaaattctcttagtagcagctgggtctctaacaaataatgattatggaggaaccactaaacctcagaatttagtaaagacaaaaacattggtagtaaatgattctggcttgttagttataaaatattattttcagatctagattttggcctaaatcgtgattattgttgcttaaacttgggcacttttgcactagagatcaatgtcaaatccaatgagtcataacctttctggtgtctgaaagaaagcttggaagccatatagagctcacgtgttttagagtaaagtcaatttggggatatgtttgattttcatgtcatctgtcccctaaaaggacccttaaaggttggcccaatgactgggccaaccactacccccttctcagtttgagtcactgttttcgggtatcatggtggcctaaatagcagttcttaaagtttggttcataaacccccggggttccttttcagtggatctgcagtgttgatgtattttcgtaacaatactaagttgttatttgttttttccattctttttctttcacaagtatacagtgaagttttccactgtatattcagaacccctgtataactcagcaagtcgctatttcctaaacaaccgatgatcgatgttacaaaatgatatattggtaaaagatccattcaaaatgctagataaattaatgggttttaatatatcagagtatgtaaagttcactgataggtgttccgattcctatacaaacttccagttgttgagtttgggtgtagtatcaaagaaagaatatccacaattatctgaaaggctatttcatcaatcctgcatttgccaactaggcatttgtgtgggaatgggttttctacacacatcaaccaaacatgatgccacaacagattggatgcaactatcttcagttatgctgggcattaaaaaaacgcaaagtaaaacagtaccactcttctcactaaatgttttaggaaaatctaattatcccttataaaaaaatatatattatttatgttaacagtaatgggttataaattcttttttggagacggagtctctctctgactcccaggctggagtgcagtggtgcaatgttggctcactgcaacctctgccttccaggttctagcgattctcccacctcagcctcctgagtagctgggattacaggcatgcaccactactcctggctaatttttgtatttttagtagagaagggatttctctgtgttggccaggctggtcttgacctgctgatctcaagtgatccacccgcttcggcctcccaaattgctgggattacaggcatgagccactgtgcctggcccatatattcttttttaaggagtaacaaatattaaacatttatcagttttaatttgtatcatgataaatgttataaattatatcatgagatatgatgtacatgaactaaagcactttgaagtcctcaacaacttatttatttatttttttttgagatggggtcctgctatgttgccctggctgatctcagactactaggctcaagcgatcctctcgtctcagcctcctgtagctgggactacaggcatgcgccactgtgccctgcctcagaattttttaagattcataaggttatcctgagattaaccaatttaagaaccgccggtctaaagcaatgtgttagtaaatccatcttccaggaagctgaagcgtagagaaatttgcgctagttacattccctggggtctaggatctgctcccagttctcattttgaagcagggtttcgggaagtataagtcaggtctccttaatggctcggggcttcctgttctgtgtgcagtgacagaggataaagacaaaaaggctgtagtccataaagtccatttttaatttccaatcttatatgccccaaagtcatgaaatcctctaggataatttctgagtttcaaaccacagctactgaagatggagcattttacaagggctgcatgacatttattcttcttggaagtgcagcttgcagctccgcatgctaaaaggaaatcaaaactgcttatctgaaacatcttttatcatccatttggaaacgaagaattcagcctgctctgcttccacccctgtaggaagctacaccaagctgacttctcagtctggacttgttctcaaggtcacctatgtaattttttttcaaagcttcagtgtccttagtattctcagagataatagcaccaaacccatcagtcatttccttgtcctcaattttctttttggcttcctgcaattttaatcccaagtccttgcaattcctttctgtagaggcttaagtggccccatttatgaccaatttacagctaatatttgattcattcttttaaaataagccaaacagtcctctgctctacaggccttgtagctttggacttaataaaatcaaaggcctgatagtggggtaaactgatatgctttttatgattttcgaagaaaaattaagagatccttagaaattggaaggaggtagatatttgttaatttcagaatctagtgctgttgttaataaagggaaagaaatagctctttcttctgtattgcacattgaaccaatttttataaagcggggagagggaggggtgaggaggatagatgagtaaagaaatcagaaatttttctggggcctgcttacttgtaacctcctttggatgccttatctctggccccttctgtaagctgatccagctcatgtcagcatgacacatgaaccatgcaaagcttctttttaaagagattttaattcctgcttgacaggctaggctgaagcccatgagtgacaatagatttttttttctcttaaaacagagtgaaagccacagtgcacctggtatttcattgaacaccaggttgtgtgtgtgtgtgtgtgtgtataatatttctgggaaggaaaaaaacagtttaaaaacctaagtaataaaatgttcagtttgccaggagttatgctttaagaaaagatatccaccgtttttggcctgcctgaagactgtttatgcccttaaatctgttttaaatcttttaagagttttatcactttcccccttcttgtaaaagtagctcattgctttatttttttattctagtctgaaattgcatctttaattatctcctgtgtggtaaagtatcaaactctcacatttcatgtgatgaatttcatctcttatacccaagaagtttgggggaactgactatatccaatatcttgggggagaatagctagaaactgggaccatccttaagcattgtatgaggcccaatgcagaaagacaaggaagtactttaggagttgcctaaatgttctcttgcaaatataaaatgagctttattttatttatgactgcctgagtgagttcggacagctataacaaagtaccctagagtgtgttgcttataaacaagagaaatttatttctgattgttttggaagctgaaagtctgagatcagggtgccagcatggttgcattctgatgagtgccctcttcgtggctgcagattgtcaacttcttgtatcctcacatggcagaaagtgagtgagagctttctgggtctcttttataagggcactaattccattcatgaggactccaccctcatgccctgatcacttcccaaaggccccacctcctaataccatcacaccaggggataggatttcaacataggaattttgggggccagagcattccatccatactaatgaccatagcacatttgaaatagctctcactttccactggtattgcgcattgcgaactactcaaaggactgaaggtgatagggatgactccgataatggaggtagtgatggtggtagcatgatgaaggtggtggtaataggggcgtcttcctttatcaaatggggcactggactttgtgtgaatcacttcccatacttttttctcatttaatttgcacaccagctctgagaacttaggtgtcattgtctccattttacagatgagagatagaggcttagagaagttcagtgacctactccctcccaaagccatccagcccagtaatggtggagcaggattagaatttatactgatgacaaagcccagcctcataacccccactccagaggtgcttgtcttcctcaggtataggcagggtagggatttaattcctctttcagggaaaactaagaccccaaaagcttgaatgatgcttagtgatacgcttaatgtgaatgaacttggagccagagtggaaagcatcttaccatgctggttcaaccagcttctgaacagaagctgtctatgtacgtcaaagggaaaggagccacttgtaattgtatagcacacctcaggagtagtgttttcacaagtactgtcttgatcttcccagtgcttatgaggtaggtaggtcttattgtgtccattttgcatttcttcttacctatactctgttgctggatgctaattatgatgacttggagaaattacagaatactaaagtaaggaacagtttctggttatatgaactatttttatagttaagcatttgagtgtttttattaatgttctcatggaagatactgtttcttctagtgatttgaagtaagcttgctacattcatgtttagacatttttcttatgggtgcttgtgacattacgtacttctcagtggtcatattttaaaattgtatgttataatcaggcacggtggctcatgtttatcatcccagcactttgggtggctgaggtgggaagattgtctgaggccaggagtttgagaccagcgcgggcaacatagtgagaccccctatctctccagaaaaaaaattctttttttttttctttttaaattagctgggcatggtggcatgtgcctgtggtcccagctacttgggaggctgaggagggaggactgtttgatcccagcagttccaagatgcagtgagctatgattgtgccactgcattctagcctgggtgacagagtgagaccctgtctggaaaaaaaattgtgttttacttttgcaaaacattttcaaaagtaacattgcataatgatctggaaagtcagaaactccagggttggattgtgctttgctactgattaattccgggaccttgagcaagacctgtgacctttctgggccccactttccccatcttcactataatggggatgggtgttcagtaaggattcactagaatgtctttgatctgttttgaaagagccacacatggttcttaaagcttttgttacccaataatatatacatcaaaaaatttttgtagtaaagatgtgaacaattgtgtgtcctatacacattgaaagatgacaagccattggaagactgctttaaactctggtatctgctatggccagggagtgagctgttgtgttgataatttagcctgattatattttgttcataaatagattaccaattcttaaaaagttggtattgccggccctccttccttccttcttcctttctaccttccgtttgtcaaaaagccattaggcaggtctcagcaaggagacctatcagggcaaataagtaaatatactgaagataatgggagccagacttcttactgttggagaatagttacagatataaaaaaggggagagccagaatgaaccctgtattgtggataggaatttaaggtttcattgtgaacgtgtggattttgatatgtagaaatttcatagatatagaaatttcagtgtagaaataatataaacgttaaagtgtatgcatgtctatgaataaatgcacatacacacatacacacacacacacacacacacacacacaccccccacacacacccatttcctaactctgttcactgaaagggccaggatgtagtgacagcccagtaaatatgagcacacctgctacccagattgtagtttctaaattccagtttttgcttaaagcaactatgggtctttgaaaaaaatgtctggttctagagctgggaaagaaaaggtacaagatgagccctgaatgtcttgtgacagaagatatagaaactctgaaagaataatgggagacgccacaaggacacagcagtcagcttcaagggattctcactaaacccatgtgaaacctggaacaatttgagcaccagaatgacaatgatagttacagattacatcccactaaacaagaaatacatgaatctacacttgcataaataaataaatgcataaaaatgtggggagaggagaaagttcttccttaaaatagaacgctgtgtgatatacagaaggaattctggaattggagagattaccatggcagtcatcatagtaataattaatccaggtaagaaacatcaacggatgctaacaataatgaatacaagttggatgaggatcagaatctttatataatcataaagtatctgtccacaaatccttgtgcattttaaggggcaacacaggagctttactggagaaacttggaagacacaaccttactcaagtgatcaaagttctcatcagcagtgatgggacacacagtgttctatgtcacttgatgggatgcaatgagaagaacacagcatctcttccaaacaatgcaatcttcagatcttttcatgagaaaatatctctaatcctagttcaggggcgttttacaaaataattcacctgctgccttccataatataaaggttgtgaaggtcaaggatactattccagatcaaaggagatggaagagcgatgacaactaaatagaaagtgtgatcctgaaatggatcctttgactagaaagagcattactgggaaagttggcctaactcgaattggggtctcccagtgaaggatacatgagagttctttgaacagcttgtgcaacatttctgtaagcttgaaattcttttgacacaaaaagtaagacataatttgtacaggaaggcttagcttttagttttaattttacaaagttaaaaggaatagtttctgaattcttttttattttggatttttgtaagaatcctatggggtataattattaaattagacttttagttctggatttctgtggtggttgtgcagagaagaatattgttttatgagatagggacttttctggatgtgtgatatcatttgtgtaattacggaaattcattcagatttgactgggaaagcagttggaaacttggagtgtcttaaggccattgttagatatttatgaggcattttagattaatgggattatgagttggtgttctggagtcatgcttcctgagctcaaatcctgcctccaccacttaccagtgtgtggctttgagcaagtgaactaacctctctgtttcttacatcatctataaaatgtaggtaaccatagcacctatctcatgtggctattgtgcagaccatctgattaataccggtagagtgctgagaagagtactggcttagagtaaatgctatgtcgttattattatcatcattatatattattgctgctgctgctgttactgttacaatatggatataatttgtgtagcacagggaggggaacatcacacactggggcctgtcagggagttgggggaaaggggagggagagcattagaacaaatatctaatgcatgcagggcttaaaacctagatgacagcccaggtgcagtggctcatgcctgtaattccagcactttgggaggcgggtggatcacggggtcaggcgttcgagaccagcttggccaacatagtgaaatgccatctctactaaagttacaaaaaattaaccgggcgtggtggtgggcgcctgtaatcccagctattcgggaggctgaggcaagagaattgcttgaacctgggaggcagaggttgcagtgagccgagaccgcaccactgcacttcagcccaggtgacagtgcgagactctgtctcaaaacaaaaaacaaaaaacaaaaaaaccctagatgacgggttgataggtgcagcaaaccaccatagcacatgtatacctatgtgacaaacctgcatgttcagcacatgtatcccagaacttaaagtaaaatttaaaaaaaagaaaaaataaataaaaaggacatttccaaagcaaagaaaaaaaaattgtgtagcaaaggctagagaaactggctaagagaaatttcctatggcaatttgttggaagtttgattctttctcacgctctgatgatagaaaggccgtaatgccattgattttggatactaacactgtgtactgatcctttaagatgctttcttatttgcaaagccagcttccacgcccaagcacaccttagagtttctttaccctttatacaggcaaaggcacacattttaaacgttcaagaagaacagcagaaacaagacaggatcaaagcaaaatacaaagaaaacaagattggagaatcagagaatcaagatccaaggaaaaatgtttactttggcagaaatacctagaaaatatagtgactgcaggccttgtttcaagttcacatattgaatctcaacatgtttacttatttgcaagtgtaagtaaatgtatgcagcacactgagttagcaaacatgggatatccctgaaggagggagatgtacagctcatcagtgttgtccacagtgcacccagcatcctaccacttgctccgggctctccagcctgttccttttcctgaaagggcttccagtcaagctcatgctatattattatatataagacctagggaatattgagcattatgcatttttatttctttatgctttgctttgtttctaaaagggttcaaatgaacaaatcgaattgtctgttatcctaagaaatgctaaattgtccagaatagacctgcattaacaaagtgtaaagtgaaacaagagaccagttggcagagagagaaaagagagagatttcgactaaagcctagaagaataggtaatgaatgactactcagaaagaaggtaacagattggtgatggaggaggtcaggggtttcacagtgtatgcttcttttttacaactaaaagcacatttctggtcatctagcccaaaagcctaagtttttaggcacaggagagtttcagatatgtcgtgaacacatagcccattgcttggtcctctgtctcaaatacccaggttgtctacccttgattcagtctcttgtcactatctcaccctgactatagtattttgaattttagatgacatttacatatttttgagaagcactagcaatcaaatgggaataaaccatataggattcctcataccatctaagttttaaaactttttcctagagtatatggacctatgtcaagacagtgtgttaaggttgttctgtgattaagaactcagaacctagagccagaatccttgggtataaattgtgactgtcatttactagctgtgttccattttcttcatccgcaaaatgacatcaatgataagaaacaaatatgggccaggcacggtgtctcatttttgtaatcccagaactttggcaggctaaggcgggcagatcacttgaggtcaggagttcaagaccagcctgaccaacatgacaaaaccctatctctactaaaaatataaaaattaattaggcatggtggtgcgcacctgtagtcccagctactcaggaggctgagacaggagaatcgcttgaacctgggagaaggaggttgcagtgagctgagatcacaccactgtactccagcctgggccacagagcgagacttcatctcaaaaacaaaacaaaaaaaagagacaaatgtagttacatacagcaacataggaagctttcaaaaaatgttaactagtatgtatttgcctaatgagtagaaataaaaaacttcagtactatttggagacttggtatgtttacatgattcagtaataactacacagcacctttccttcatacaaagttctaataaattattgctttttctgtaggtaaaatctactggtggagtcactccattattcttatctgtggagatctagatcttgatttgaaagtttctgagaaaatcttcagctcagacttgagggtcaactttaccagctgaaggtaaaagctaattttattcatttaagtgtgaattgctcattactgaagcatagaaaataaagatcattaacatgtcttaactagaacatatcaaatagaatcctggtttcttgatgttgaaaaaattatgaaatactaatagaaacagagaaaaatggccaggcgcggtggctcacacctgtaattccagcactttgggaggcccaggcgggcagatcacctgaggtcaggagttcgagaccagcctggccaacatggtgaaaccctgtctctactaaaaaatacaaaaattagctgggcgtggtggtaggcgccttaatcccagctacttgggaggcagaggcagaagaatcgtttgaacccgggaggcggaggttgcagtgagccaagatcgagccattgcactcaagcctggggtgacaagggcgagacttctttcaaaaaaaaaacaaaaaacaaaaaacaacaaaaaaacccagaaaaataagatacaatgaataaggagaaaagctcgtttcctcttgtggttatggaaagctttataataagcatcttcaaatccatttttattttattttatttttggagacagggtctcactctgatactcaggctgcagtgcaagtggcatgatcctagctcaccacggccttaaactcctaggctcaagtgaccctctcacctcagcctctcaaagagctgggatggcaggaacatgccaccacatcgagctaagttttttcattttttaaaatagagacagggttctcagcatgttgcctaggctggtctcaaactcctgcctcagcctcccaaattgctgggattacaggtgtgaaccaccgcacctggcctcatatccattttttatatctacagtacccagttgttgaaataatcttaacatctaaggaaaacaaataaactaagaaacagtctactgcaggactggagcagttggggaacggaataggagagtaccaaaaaagatgcaaatgttcctataaaaaccaggaggcagtaagcctgctgcctggagccaggagactggacagtggagaaaatctcttctcagatgctcctattcatttgatggctaagtaaattattttgtagtgttaaacatggacgttgttgttgtttttaaatggtgggaaccttccaataactggcttattttctcatcggtctgtgtctcctattcttcagaggttgttcttaacgtcctccattcacctcaaatttcctacccctccaggttgccagttactgccagtcagaaaagaagctttagatgtcaactccctcaaattttgcctccaggcctgcacaattaacctgtactcacattcagtgctttgtcactagtgaagggcaaaccacatcccagtcccactttgttccttattctcctgctctggaaccacctcctcctccctgctcctgaaccacctccttcttcctgctctgaaactgctgaaacgcacctccttcatctggctttggaaccacctccttcttcctgttctgcagcctgcctccttcttcctgctctggaacctgccttctcctccttcctgctctgaaactgccaaaacctacctccgtgttcctgctctggaaccacctcccttttcttgttctggaacctgccttctccttcatcttgcactgggatttgccgcctccttcctgctctggaaccagcctcctccttcctgctctggaacccacctcctcctccctgctctggaatctgccttctcctccttcctgcactggggtctgcctgctctttcctgctctggaaactgccttctccttcatcttgcactgggatctgcctcctccttcctgctctggaaactgcctcctcctcctccttcctgcactggggtctgcctcctccttcctgctctggaacctgccttctccttcatcttgcactgggatctgccttcccttcctgctctggaacctgccttctctttcatgttgcactggggtctggctcctccttcctgctctggaaactgccttctccttcatcttgccctgaaatctgtctccttcttcctgctctggaacctgctactccttcttcctgctctgaaactgctgaaactcgcctctgtattcctgttctagagccacctacttcttcccgagctggaacctgcctcttccttctggcactgggatctgactcctccttcctgctctgaaaactgcctcctccttcttcctgccctggaacctgcctcctccttcctgagctgggaactgccttcttcctcctgctctgaaactgccaaaatccaccttcacatttctgctctggaaccaactccctcttcttgctctggaacctgcctcctcttttctgctctggaacctgtcttctccttcctgctctaggatctacctcctcctccttcctgcactgggatctgcttgctccttcctgctttggaaactgcttcctccttcctgctctggaacctgcctcctctttcttgttctggaacccacctcctctttactactttgggatctgcctcctccttcctgctttggaacctgcctcctccttcctgtgctggaacctacctcctccttcctgctctggatcccacctcctcctttctgctttgggacctgccgcctccttcctactctgggatctgccttctccttcctgctctggaacctgcctcctctttgctactctgggatctgccttctcctttctgttctggaacctgcctcctccttcctgcactggaacctgcctcctccttcctgatctgggatcttcctcccgcttcctgctctgagacctacctcctcttcctgctctggaacctgtgtcttccttcttgtgctggagcccacctcagtttctcctttctccttatcagctatcatttttgtcacttcccccttctttttcttccttttgatgcctttgttcaatattttcacatattcactattattttttctcttttttaattaagattattcatatgccacacaatgtatcattttcacatgtagaattcagtggtttttagtatattcacaaaattgcatgactcttcatgatctaaaattccatgatctaatttcagaattttgtcatcacctcagtgagaaaccccatacccattagtaggtgctccccattttcctcttcttcttagtccctggaaaccactaatctactttctgtatctaaggatttgcctgttttgggcattttatgtaaatggaatcatacaatttgtaaccttttgtatctgacttttttcacttagtataaattttcaaggtttgtccatgttcatacatgtggtagcatgaattgccatttcattctcttttatgactgaataatactccattttggaatgcagcatattttgttcattgattcatcagttgagagacatttgaattgtttctactttttgactgtttagaataatgctgctatgaacattcatgtccaagtttttgtgtggatgtatgttttcggtcctcttggttatatatttaggagtgacatttctgggtcatagggtaattctatgcctaacattctgaggaactgccaaactgtcttccaaagtggctgtgcccttttaccttctcaccagcaatgtacgaggtttccaattcctctatatccttcccattactgattattgtcagtcttttaaaatatagccatcctagtggatgcaaagtggttacttatttcctagtctctcttggacatcacttcctttggggaattgttctgaacaccctgaaatcctttctcttcaggctgtgttaaatgtccctgtattagtccattttcacactgttgataaagacatacctgagactgggtaatttataaagaaaaagaggtttgatggactcacagttccatatggctggggaggcctcacaatcatggtggaaggcgaaaggcacttcttacatggcggtgtcaagagagaatgagagaaccaaacaaaaggggtttccctgtataaaaaaccatcaggtcttctgagacttactaccatgagaacagtatgggggaaactgtcccaatggttcaattatctcccaccggctctctctcataacacatgggaattgtgggaactacaattcaagatgaggtttgggtaggaacacagccaaaccatattaatcccccctgtatatttctcaggcaccctgtccttgtagcatccatcatcacactgaattatcattgtctattaactttatctcctccattagagtatgaacctgttagatagagtaccaaaatattcctgtggtatttcctaggttaacacaatgcctgacacagttatttagtctcatctttttgtcaggagtggtatggtgggagacttatagactagacttcatagcattattacctaagcccctaaatacaagaatgaaaatattcattagtattgtttgttagttgatatctagttagaaggagaagacaggattttttagcctatgtgtttgactttttatttttattttattttattttgtgatggagtttcgtgtttgttgctcaggctggagtgcaatggtgcaatctcggctcaccgcaacctctgcctcccaggttcaagcgattctcctgcctcagcctcccaagtagctgggattacaagcatgtgccaccatgcccggccaattttgtatttttggtagagatggggtttctccatgttggtcaggctggtctcaaactcccgacctcaggtgatctgcctgccttggcctcccaaagtgctgggattacaggcatgagccaccgcacccacccgtgtttgactttttatgaagttattttttctttactgttgtactaatacagtactgtcctttaattcaccaagaagttggaaggaaagaaatagggatgctataaaatatcaccatagggggaaaatgcctgggtgattttaaaagtataaatcaattagccatttttactttgattttttaaaagcttgactgattgagaactgtttcttttaaaaaagaaaataccagttccatagattagactttaaagatttcacatgcagatagaagtcaagaacggtaaagtttatggatcttcaaaaatgatgtgtttcactgtaagtatcaaaaatctgagattcatttacatcagggttgaacagatagggatcagtgccgggtaacaaaagctggaagtggaattaaacataattaaagactttaaatataagtttgaattaaaaagtacatccggcttgaaggctgactcatactaaattatagtgccctatgcgtaagtacagattaaaaggcatatttaattagttcttttaagaatttctccccacaaacctattggtttttataatcaacatttagataatgttgtttcttttttttttcctgatgccagaaagatttgttttagcattttagatttttcttaattgaaatgaagttatgcttggactagatagccattctcttatttgacagtgttttcagtgtattcttggaaattctatccagcttcttttctatggtttttatatgcttctggaacaacgaggaaataggggagggaaagaaagagagaaacaaatgtaagttggacccagatcagtgagatagtatcaaatggggccaaaatgaatttggcagatgctcttctcatgtttcccactggagcatgcacatattgttacttggaataccacttgcatttctttcattcttgtaagatttttcttcagcttcagtaacaaactttaactttaaataggagccaggaaggaatattgagaatttttaaaaaatgtgtaaatgtacttagaaaggatattttgccatgaaggtttggttggtaaaggatataatagatgccttttaagcgtaggaatgaaagtgtggagggccagagatagtggaaggtgtgtcgtgtttagagatctgagtttgaatcctcattttgccacttaatagtggcatgactttggcaaagtaaactttaagagtctatctttccttatttataaaatgagaagatccatttttactctatagtgctgatagtaagtgaatttagtgacagatagaaaacattcaatgaatgattgctgtttcaaaattgtcatatttactaaaaaaaagtaattcttaggataaaaaagtaaattttcttatcaaatgttcttttaatgtcaggtaggcatttcagtttcatgatgttcattgtagatattactggtagctgtatttccttggttcctgtatgtcagcgtggtagacaaagacaaaaatgagaaaaccttgaatgtgggagcacacgaatttatatagatgaaattgtacagtaccatgtacttcattaatatgcacttaatgaaagtttattaaaattgaatgagagttgaaggtattcaatatcattttatttcttgcagtatttaggttactgcagacaactgagaattagctttttttttttttgtgagactgagtctcgctctgttgcccaggctggagtgcagcagcgcgatctcagctcactgcaagctccgcctcccgggttcacaccattctcctgcctcagcctccccagtagctgggactacaggcgcccgccaacacgcccagctaattttttgtatttttagtagagacggggtctcaccgtgttagccaggatggtctcaatctcctgacctcgtgatccgcctgcctcgacctcccaaagtgctgggattacaggcgtgagccaccgcgcctggccaagaattagctttttttttttttttttaaatatatgtatccaaaggagaaagatgctgtataactttccaaaatgtctgttcccttacttacaaaagatacttttaagtttaaaggaatcttaggctgcaaggaggtgcaaaacttacagagttttcatgtacccttcacccagcttccccatgatactactatctttaatatccacagtaccattattaaaaccaggaaattgacattggtaatttaccccttcaatgcttaacccattttagcgtttttaagtggaggaaattctttttgatgtcttgcttaatcaattttcacctacatatactttttgagtgtcagtatgctgaacagaaagatattttgaaatcagaaacccttaggctcaaatcttggctctgcctcttattgctatgcaacacaggggagctttcttagcgtcgatgatggtctgtttcttcatttgtaaaaggtgctatcacttaccttgcagagttggcataaggattagcaattgtgtattgtcaagagccttttcaataaatgatggcttttggaataactgttctcttgctatgttttcatcaaaaattgaaaagagctggccattatctttaacatagcatgtgtactttgtggacacctatcatttcaggaccactaactggtaaatatgctaaaacaacttcatggttcctgtagccccctgcttgttttgctccctggtcacccactttatctgcacctttttttctggcctatagaccaaaagccactcctctctgtgtatagattatatttcttctgccttttgttatatgaattctaggaaatgtagttctttttagttttttgtttgttttcttttatataacctcttccaacttagttctgttttacaagcagttgatgatagccctaggtagatgcctgcttcaaactcaggctgatacggctggctcttgagtatccctgtacaaacgctgcccttcagggaacatcgtgtccagggctgctgcctccctccgtttgcagacctggtgctctgcgtctaaaactggtcactccttctcatctctccacttgagcacagccgcaaaggtagaaacagagttctgcaccccactttttgctgcacctcagttagcccaggaacatctacccctatttagctcagaagtgtgtagtcctgtttaaatacttaaaatttgctatgttctgtattggccaagaaatgttttctggtaagagcttctggtaggaagaggacctaaagctgccctcacaagacgatatttggttcatttgaaatagaaagttttgtttgcttttaatttttatttactgaactgaaaattggaaacagcccattgacttttctatcttatacagcatctcctcctacacatatttagtttcctgctcccttgaaatctgggcgacctactcctgttttcaagttttttctattttattattttggtccttagcatttctgccttttttgtatcttccaactttccatttcaaaagagaaggatcatatttttatatatttacatcccgtttgaatgtgtttaaggaacgcttagaaatgttcctttatgttttaaaatatcccttctgctaaagcaagtagcatatcatttcctgctttagttgcggcctcagtctgacaggccagggctaagtaagggtgaaaagttcaccgtccggaagtgctgttgaggtcagaatcacgtgatgaggagccgacccagactcccggtaattccctgagaatgtgaatctttgggagaaggagcacaagagagagctttttctcaagtcggctgcctgtgctcgggctcttgcttacaattcttagttttatggcactattcttcttcttcttcaaggaactcactgtaatgcctttattattgtctacatcagtgttttaaaaagtaaagttgtaacgcattgctaggttatgcaatcaattgtgtggacagagatcagccttaaaaaataaaaaaggaaacaggaaatgtaaacagagtgcattatatggaataagaatatgtgtattttgtaaaactcttgtttgatacatagatccgtacacatagacacacacaatctcataggtctctattgatttgcgtatgggtacacgctggcaggcgtacattctccttcatcctcattcctagtcatttgaaaactcagtcattcaaaatgcatgcccttgccagtggatgtgttcttataaatttcacatagtttcatatttggaatttattgtaactgcattttaatttatgtgaatatgagttatatatcttattttgtttctttgtattttctccactcagtattctattttaaggtccatggatattgctatgtgtacatctaatccattgcatccaaatgcccatagttgttgaagtgcgtctagaatacattttacttctgttctctcccagggatggacccctatattgtctccatctcacctcaccatgaacacaactactgtgaaaagcctcagatacatcccttactggaaagtaccaaggggaatttatttgggttctagcctaatagtagacttgctgagccagagggcataggtacccagctcagatactgtatacagtataatttcaaaaagtatactgattacctccggaatgattcaccagtcaaagcacccaccagcagtatgaatgcttattcccacattcccaccagtacttagcattattaagctttctaattttccctatttctgtctagtgagtgtaaaatgatatattttttgttttgttttgtttttatctgattattgttggatttgattatgtcttcatgtgcttgattttcttggatttttctcatctgtaaattccccttcaaattcattgcacatttatctactggaaattttttacttttcctattgatttataggcattcgttgtatagtccagatagtccctggctggctttagacattacatgtattctcctagcctgtcacgtttctgttaacttttgtctcttatactttttattgaacagaagtctttaattttgatgtaatttagtttatcagcattttactctgggggctttgcaaaatattccctcttcttctaatacaaaaattatctattcatatcagttttatagttttatcttccacatttaggtctttaatctatctgaagtccatatatgtatgtggtagcaggtagcaatccattaatttttcatatggtgattctgtttatttaagctggtgttgcccttccgctctctgatatgctccattggtttttctgttctttaactaaagtttatgctgttttgttactatggcttggtaatatattttactatctggtagagtaagtcctacttattgttcttctttttcatagtggatttaggtatctgtgaacttttcttttctatgtgatttttttttttttttttttttttttgagactgagtctcactcttttgcccaggctggagtgcagtggtgcgatcttggctcactgcaaccttcgcctccctggttcaagtaattctcctgcctcagcttcccgagtagctgggactacaggcgcgcaccactatgcctggctaatttttgtatttttagtagagacggggtttcgctgtattggctgggctgttcttgaagtcctgacctcaagtaatctgcctgtcttggcctcccaaagtgctggggttacaggcgtgagctaccgtgtctggccatatataaattttgaaataaatacaatcgaatcagttcctcaactacaactgaattttgatttgaatgttattgaatttataaatgaaaattgaagaactaacatatttttggtaagttattccatctaggagcttttactgtctctccatttatctcagcatctttcatgtaccttattagagttcaatgattctccatagaggtacaggtgttctttctgatacttgaagccaatcaaagatgaagacaaataatatacacaatccataaaatgattttaaaataaaaattgagggtttagccgttgttaaagtagtaatatcctttgattgcagatatttatgttagaagagatcttaaagataatgtcagataatgttagaatccctgattctaaaacctgaaatctgaaatgctccaaaacctgaaactctttaaatgctgacctaaagttcaaaggaaatgatcgttggagcatttcggattttggatttttacattagggatgcttaaccggtaatgcaaatattctgaaatctaaaaatatcccaaatctggaacacttctgttcccaagcatttcagataaggggtactcaacctgtataaataagaaaactagtcatcagtgagggactagtttttttttttattattatcttataaggaatgattcgctcaagattacagagttagacagtgagagaactgtctaactctgcctttctttctcttggtagagttaatgttaaggtttgcttatgcttccagacaaatcagattcttttttcagtgatgatcacacaaagaatgattgacctgccagagccataagacagaaagggggaaaaaaatctcttgagcagctttttgttttctcattaataatggcgtgagttagtattttggttcatttttcagcaattatgtcctgcattctggctgtggttgatagtgactttaaaaaaatagatatggtggtacttgcacaaaataattgtcacacattagcatgttaatgaagtgttagggtgctaagaatggctagcacactaaaacaggagagaaaagatccatcctcactgctgcatcagccagactacacaatctgaatggaaggcacggctcagattgactggcagggcattctgtattattgacatgcattttcttcctctccccacatgcatgttgaaacttggtttttgctgtctttaacccatctaattttcctccaaataagttggtttggggacagaaatgagtgctttttctttttttcagacagacagcagaactcatcagggaataattacaagactaattcctctgttttaatgacatcaattgaataacattaaaaaatcaaagcccatatgatttcatagcattttaactctgagcatttgaatctaaataacatgtcattttgttgtatgtctgtgtagtagggccattaacttaaaactaaattcaccgtgtgtatgtgtgtgtgtgtgtgtgtgtgtgtgtgtgtgtgtttgtgtgcctgcctgtctgtctatttctggagctagtcatgttgatggtggcagagagaattcttgcatgtttcctgaaggttggagaaagattagtatgcttttgaagccaacatggatactactatcccttacaggaaaacacagaaatgctgctgatcgaccatatggccgaggtactcctgatccacatcttaagggccagcctttcttctgaatttcagtttcatatttttacccacctgtcgggacttctttacccagctgttccctgtctacctagatcccatcaggtcaacacattaaaacccaagttcagtgtctttcgctaaagcccagaccccctttagagctctccattcctctaagtgttagcaacacactcaggtttataggctaatccctcaccatgtctagtccaccaggtcctgtttgcgaatgccctatagcatcacacaggcttatacatttcttctgctcttgctcctgtcccttaatgcagggctcatcatctacccagcaggcctgggctcctgctctctgtctttttatccagccattttccaagcttctggcccaaagcttacctggactctggtgtgaccatttgttaactgttcaccttgggcagcttatttagcttttatgaacctatttgtgttcttctatcaagtataaacagtaataacttgacggcttgtttggaggatgacggatataatgaatgccaagtgccacacacagtgcctggcatgtaattggtgctcatattgtatcaccctccatagtaatttctttgaacgctgatttctttcttttccagaaatacaagctccttcttgctgtttgtccctagaactccttttcccctctgctcagctttcaccttcttgatgacacaatccaaaatagcctttcccagctctgtccccgtactctccagcatcacgtttatagtcttgcctttttaaatctctttatctctgacattatctttcatttgtttgcctgatttttaaagtaatctgtccttttccccacttgtgcactagaatgtaagctctgcaaaagcaagggatgtgtctgtcttctttgcagctgtagcccaggatggaggagtcagccttagatatctttttaagacttatgagtcagaactcaggcttcatacacagaggcgccaagcccttaagccattcggggtacacagtggctgcagcaggaagtggaagagatgaatcttctaaaactgaagatacagctgtgtaggagatgagaacctacctacctaccttgattgacccttgccttttatacttagaagaatcatcatcattataaggaaagacctgaataacttaatatacaatctaagttttctttttgctggatcagatagagatagactttcttatgatatgttcttatggccttcccattcttggcctaggcttttctttagctaggctctgatccctgctgaagcctcaacctgccttgtccattaccaggaccttaatccctgtttataatcctgcttaccggccttttaatcctttgagattgaccacagattcaaaccttgctaaaggcttggcctcctggcccctacttctccctagcctacttctctgggctgtgccttcctccctgtctgtgtaaccctaagaaggtctgcaccgtcactttgccacttttttctctgattcggtggacaaagagtaagcatttgctttgtatactatgtacgccctttcatttccagtgtagcgtatttaaccagagtgaaatagcacatggatccagcccaccatgtaggttaaaactgtggtctccataccttcagcacctctcctttcaccctaccttcaaattttcctgccactgactcttcctcagcgaccactgtgtatatattgctgcctgctgagaaatgttcaatgcttcctcagccactgaaggataagcttgaacttcttagcttgacattcaagccttgcccagtctgaattgtacttagttgcccatcatggttcctacatgaagacttgccctgcttcacccagacccacaagacgcatcttctagcttatgccacagctacatctctgcctggaatgaccctcctgctcccccgtgtatattcaagcctgacttgcaatttagttcacaattcaagttctggttgctccagggagtttctccaactgtgaccaccccttcctctcgaactcttctcttttctcctatcccctttacttggtgggtggctctttcttcttccactgccactcatctccagatgagtagattgggcctcttcatttggcttgaaagtcccttaaagatggaattttgttttcttcctctttaaattttcattgttttaaatattgcagctgttgtcagttattgctgaagatgatcatgatattgccatttttcggggtattatcttttatgcattgcactagatgttttatatgtattatctcattaattgtccaattatcctatgacattatacatgtattttacaagagaaaatgaaaatttattttattctgctaatagttggggaaggctggtttcaaaggtctgttggattttaaagcttgtactctttccaccattcactgatgatggcccaaagtagtatgcatttaaaatttgggaatagatagcaggaaaggagaatgaggtttctaatgtgatctgaatactactctggaacccgttaccagagaaagggtaataaagatggggaccaacacacacacactcacaaacacacacaattctttatgtaaagctggttttaatttttgttttcccatgagaagatgaatgggcaggaattcaatcaaatcagcaaatggaaaacattgacaaatagataagaaaatatcgttgataatatctgaaatatactttagccaggggttttcaagattctctttaaacctttttccttagaaagctttacaagtaagaaaactatttttgacttctttattttacactttcttaggaatcagcttgtttagtggaaagaacctattggttttaaagcacatcaaatgtggttttagatttatattgaatacaagaagaaagggatataagtgtaatttctaaaaaaattgcttggtaactgaagcaataaaatcacaaattttgaatttgtctttaacatctaacaggtttctcgtgtatatatatgtgtgtgtgtgtgtgtgtgtgtgtgtgtgtgtgtatccttctatattctttgtgtgtgtgtgtgctttttacaaaagtttatattcttctatgtgttcatccaaattattgatctgggtcattcacttataaacttaataagaacaggtgatgcttgtcatgcatgtttttgtgcatacacattacagttttttataatttaattattgctatcatcagtttaaaagccccaggaaacagacattgggatcacagaaccactgaacccaaagtatatcttgatgtcaacttttgatgcaagattttaagacaggaaaagcactggaatagaattttcagaaaattaaggcaagcaattttaccatcccgggacctaggttccaaaaaaacaaaattagaggattagactagatggtctttaagtaagtttccttcagattaaaattctttagtctatgcctttatgtctgcttcttgcctcattaatctctcctgcaaaagaaaccttatgtctgacaacatctgaggaaataaagatagcatgtttgtaagaattggaaagactgttgaaagaagtggttatttccttcttactgtgttaatgacagcagtgtcttgaatatcagggaatgaatgcatcaaaggctctcactagtcctgtggtaaagaagttaaaaaaaaccctgagtaataggattttatctgtccatctatgatcaagagtggttttaaaatggggtggtgtgggaggctgaggcaggagaatctcttgaacccaggagtcggaggttgcagtgagccgagatggtgccattgcactccagcctgggcaacaacggcatcaacagaaaaaaagcggggggggtgggggggggatggtgattgccccagagtttttataactcacaataaccaaaaatgatgttattattataatgtgactagtaaagcacatgactagtaaagcatgcatttattatatgcttgctttatgcagggcattctatccaggatttacttaacattaagtcagtattacagtatattcccatttttcagatgagaaaactgaggtttagcgagattgacttcctcacagttgtacacagagagagagttgtaggaccacaattcaattgtccatttgatcatgaatcctaggttctttatgttgtgtccgtttatatcaataccatattttctgcctgaaatattatttacaggttcaagatctagcactctgtttttgtcattagctatggatagtatgggtgctgaaactcactaccagatcttttctggtgttatgacttaattaaatgttgaataataatgaaggcacacttctataagaagtgtgaaaacactgtttacacctgacaaaatcaactcactgttatgtctatcaaggtacaagaatgcaaattgtaaagtgttagacaaagtccttttctatcatcttctcattcttaaaattaggggaaaacaataccaatagagtgaaatgaatattttttcaagtgtacttttccttcctaaaatactcatggaacagcctgattcccatgttttttttttctttcaataatgtgttgcctttttaaaaagagcctaattatatgcaaaatattccagtatgtggaaaatcaaatgacacattgctttaaaacacagacatctttagattactgccccctgctactgtcttggtgatgttgagagcccattgcatgtttggtctgttataatttaattgtaattccagtttcaaaattattcttccattccagattttaaaatggttgtgaagcaggatccaagtggtgattttttttgtgttttttttttgttctctactaatttagcctcctagagccattctgtccaatatggtggtcgctgaagatctatggctatttaaatttaaagtaaaatagattgacaatagataaaactaaaaatttaattcctctgtcacaatagccctgttcaaatgtttagtagctccatgttgctcgggacagccaggctggaaagcctaggtatagagtatttccatcactgcagaaagttctattggacagtgatgatctagggtcattgtaatgatctgcttttgatcatctgttaatttgggttaaaacagtatgaattgggttattgccataaaagggaggcagatctgatagctggaagaggttctggcatgtgtagtgtgctttggaaactctgggagagctacgtattatgggtttgctttagcgtatgtaacagtgttggccactgcaactttacctggtttcagaatctgtattctaaatagctaacattttattacatacactgactgtgccactcactggttttgattgttgtttctctggtgagtggaccaggtaaagagcagccacaaattcaaactaatttagaaagaaatcctaaggcagagagtcttaagttacagaactacttgtttaagttcgttttgtagtctggagactgtcctacagaaattcacccttgaaggccgcagggagttcagcaagcctgtctggtggctgtctgtctaagttccttgaggcaaaaaaaagagacaatggatccttgtttttttgacagctttattgaatgtattcagtcctaagttctgaataatttgcttaactagagatatattgcacagtgagtaaaattttcttggtatgaaatttaatcctcatagtatcttcagaataattttaacacttgccagatctctttgtctactacccagttctgggtaaatgtccaaatgcctttacttgttgaaaagaactctactctgcattgctgatttgttattcctggtaacagccagaagtacagaaaatatacgtgtttaaaaaaaagtaaggaagatgattggttttaatgtttctcttgatcttgctcccttcaagcatataataatttaccagttttctctcccaattcttacgtttctctttcattgatagacaaatagaacagtgtttgaaagatcatttacagattgcacagttagctcaatggtaataaaaaatgactggataagtctcaccaccaagggcttacatgaagttgaatgtgaacttggagaacaattttatgttcagccagctctggttgttctttaaaatcttttatgattatacatttcttcatttaaaattgtttgctgtaagttttaataggaagtgttttcttcattaagatgttctgattctgtccccctttttgtaaccagactccacgcatattataagcatgaacaaacagtcactgcacaggcaccagtgagccccttcctttaacagatctatttataaacgctgaagcaggagcgagtgggtgggttcatgtctcctgtgatataatcttgccttcctgtgtttgggagcttacaaaggatgacagctgtttatcatccttccacatttctatccaatctaaacctggttgggctaaaatgtagaaagcctctgtactcaatcaagagtgcatgcccaagagcctccatagcagatgggcttcacaacattgactatcctgaaagttttctctccttaaatgataaccttacttactgcagttgccatccttgaaactggctcttctgagagtggcaaattatttaggttgcattagttttgtaggtttggttttgaacaagccgaagaatttgattagtataatcatctctattcatctctttttgcaaatgatttatcaagacttgaacagcaactgagcaactcttcttgaaaaaacgggaggataatgtttattttgcagtatggtggtcttttaaaattcgtttttttttgcttggcagctccgaacagaagacaaatataaaatgggagatgctaggtttctaagtagcagttgtcccatggttaagctgaagtgctttcttaacataagggtttataggagtgaatgaaggcgggcaaggaaaatattgactctatcctattacaataacactgatgaagttctagatacttctctatatgctattaaagtaacactgatgaagttctagatacttctcattctgtggcaaaggaagctgtcagtatacatgcaaaaaaaagaaaaaaagaaggttatgcaaagtttgggttttctttgttcttagtccttgcttgggattttgaggaaaatggaatgtatttctattttctatttcacttgattttctcatctttcatatttggccagctactttctgagaacatattgtacacatgttctgatgctgtttgaaggccctgtgagagacaagagttgattgaaagctctcagttctcctgaagtgggtggccaaagagctgaaactgaacagctgctgtacacccattgaacttttgtcatttataaattattttccatgccatctggagcaagaatggtgccatggtttagagaagctctttgtggggtacatttcatatccagtgcttatatagcttgcttattaccacattcaactgaagttttaaaatctttatttgcttggaggcttaaggatgtgaataaatatgagtgatttctttaaatgttatatgaaaaacaccacctccacctctaccaacgtttttccctccctctctcctttccagtgactacatcctgcctgctttcagctccagtggaaaatgcattaatcccagagtctccgtgaggtttcctgtttgatgacataatcagaaaatcctcctcacattgcccttggggttgctgtctggatgttatgttgtcttggtgggtgtaactcagccatcaaaaaaatcagcacaggccataaactcaggacctgaaatgcattaatataatgttaaacgaaataacgctgtgggtatgtctgcagcactggtagggaatttcattaaactgcagattctccctggcatcagatgcattggctggtgactccggtacatatggcatgagctgctgcaatgccactagcaggaggtatttgaactgctccagtgtaagctgttagactacatctcgtggaaaaataacacacacccttgactaccagagtttggtagtgttgatttaagtagttcttcccttccattcccctctggggcagcctgtttacctaataacgttttgcctttggtgttgatcacaggaagctgcaaaaaagaaaactagtgggaagagtcagaaatagaagatgaggatacactttaaaatgagaaaagcaaaagatggcatctgacatgtagagtgggttttaaaagttttaaagataagatattgtgaggcagaaacttcagtagctgtgaatatagttggaaagaagaaaccttgatataaaagtagaaccaagagtaggatatttagataccaaagggcacgtacaattttacaagtttagaagatattggcataggaaattgagcatatgcttaaatatggatttcctttgctatttggagaattttttatattttttttattgttttggtaggctgccataaccctccatttggttgtcttggatggaatatctcttgccttggatcttggaaatccaagcttgattggcacttggtcaggatgagaacaaggaatgggcctcttaggatgttttacaagttctagaagttacctccatgatcctccctcctgttgttgtaccaaactctttcttgcatgtgtcttcctgggggtggagagaggtggtgagggagctggtgggagaagcaggcaagatacagcttgatagagcttcactggagagaagttaaagaggaaggagaggtctaagctctagccagttgaaagcctggggtgatgtcaccattcctacctccttatatcagaaatattcttgggttttccataatgtattccaagcagcgggacacctttcacagatgcttctcctgtgttaggggaatctggactaatataacactaggagggagaaaattgtgtttctttatcgctactgtgaacgttgttgttttttaaaatttacagctgactactgaataaactctaaaacttggagttctggatttcaggttctgtgatctgttttcttgtatagctctgtgatggttacgtgaccaagctgtgagcatttactctcaaaacagcttcatttaaaccatcctatgccttgtactagaataatgctaccccagagcgggaagggctctgaaagatcacatctaatgggtgaacctctttacccaggtgtgttgtgacaagagtgggggagactatgatcctttttattctagatatgtagcgcaggttggttgtgttagtgaatgtaccatctcacacatcatattgagctgaatgtttcaggacatccttggggacaaaatgttacctatatggtcacactgggaatctatttgaaattattagatattgctcctcatttctgcttgtcaagatctttttgaatcctgcatctatagctattgcctgtcccaggttttggtcccaatgtgaagtcaaaaagactcgatacatgaggttaaatcctggctctactgtgttctgcctttgttacatcaaatgaataatttaactgcagtaagtttcagttttcttatctgtaaaatggaaaatagaatgttctgcctcccctgttgaatagttgtgaaggtgaagaataatagtgcatatagagatgtttgaaaaaataaagcaccacacaaatactagtttttattaagcgacctgaaaatatgataaatactctttctttggcttcatccaggtcatttgtttaaaaaaaaaatgatgaagcaaagggaccaaggataaaaccctgcctctagggaccttccagagagtggcagtgatgggatgttgacagcctttggttcatgtgtttattagtctaataaactgccctagcattctgcccatattttcacatcttgtcctttaagttgtcctgggagcccttgtcagattccttactcaagttcaaatacattatgtccacagtgtttccctgatctgccaggctaccagccttgtcagagaaggaagtgaggtttgtcttgtccctattgaacccacactgtccgccaggactggtgctttcttttctgagtagttacaaaccattcttttaacactctgccaagaatcttgtccaggatcaacagtaaacgcactggtggtgtgcagtattgggattctctcttcctttttgtttttctttcttgtcttcttcaaagtgggaactcatttcccccatctccagtcttctggcaccagttctgtttctccatcagtatttccaggaaggggaattgaagagcagttaacttttgcctgagtccaggttgcagtcacactgacatttggtggctcatctcatttttgctgaggttgtggtaaatgcttagcagcagtgggatgtgtttactgctctaaattcataatagttaaaatccatgtaatgggaagaccttagaaatatattcctacctaatatgaatgcattttaaaatccagtattgtttttagttcccttatgaaaacaaaaccaacaatttaaaaagctagatttttttgtactgaagagcccaagaaagcccattaaatacaatttttagtttgcctggttaatatgggcatgaaaaaaataatataatttaaaataatatatccttaaggttttattctaaacaataatactaataaaaattgctatttagtgaagagctattgtattctatgctgtatatcagacattttacatttattaccttatgtagtacaattactctgcaagggtaagggtttgcacattttggatatgagaaaactgaggctcagacagctttagtacagtgcttaataagtgccaaactggaatttgaatttagatcacctgactgcagagcctcagattttccattatagcacagtgtagctttaaatgatgttttccatttgactttaaaatttttaacttatttagcattatgataaccatgctgagtgacctttaacttgggccatgtcagtgggaattgcttaaataaagctgtgttttattaataagtagagtgatgattgaattggactgctttaaaaatttctaaattaaaaaaaattaccaatgaaaaaagagctgcttttatcaattggtggtcttaagtggagattttgctttatttatctgtttttttacaaatccattaatggtccttttctttaacaccccatcaatcaactcagactctcccattgataagcatacctcactgaaagaaatcaattctcctttgtcattttgacaggaattaactaaaaaggtgggttaatccagaagcaacaggaaaatacctgcaggctacgactaaaacctaattttgtaaaatcaaaattgtcataatatttcacagttggccaggcacggtggctcatgcctgtaatcccagcactttgagaggctgaggcaggtggatccgttgaggtcaggagctcgagatgagcctggccaacatggcgaaaccctgtctccatgaaaaatacaaaaattagccaggcgtggtggtgtgcacctgtaatcccagccactcggaaagctgaggcagaagaatcgcttgagcctgggaggtggaggttgcagatctgagatcacgccattgcactccagcctgggagacagagcgacactctgtctcaaaaaaaaaaaaaaaaaaaaaaaaagaaagaagaaaaaagaatattttacagttcatgataacaaagggctttgtctcttttccatagtaaagataaatttgccatatgaatgtgagagtttaacactacttttgtcttttcattgtggcattcacatcccattgcccgatgctatagaaaggctcaagatagtgtaagctctgtttcccaaggcttggtttggaatttaaaccattttaatagggaactgtataagaaaatctcgtgtaatgcctgaaaaatgtacagtttcagatctggtgcatgaggctgtttgctggctctgacacaggatttttgtaagagtgacccataagaatctttggaaaggagaattttcattaacacagggtgttcaaagctgtgtttgaaccagtaggagcccaacagctctacacacacagtgttctaacagtgcattgtcagagggtaataaacccaagagctgcatctataaagtcttattttgaaagctgattgctaacacgtgaacacttaccatgattatggccaaaattagagcttgttgtttttataatacttacagaaattcatttttaaagaactttaaaaattaaacattaatatcctctctacttagctgtgtgatacagagtgttcaggaaaatttatgtctcttgtagttcatgtttatccctaggctgaaaaactttaaaccatttttagccccttccttcgaggatattgcctagctttttgatttatgtaacttagattatgtaggtcaattcgttgactagaaactcatctaaataaggtttacttctgaatcttggtgtttaaatagctttgggggaaaatgtgcttaactaaatgttttttttcttaaagtaaggcagtaaccattgagtgtttgttttttcattaactttttttttaaattttaagttatgctttttagaaatatcaaagtcgttttttatgtttgtttcttcggtagtatatttggaaacctttggaaaataggtttatgttttgttgtttatagccattataatataaaccttgaggctggataatctttctggatatttcttttctttttttttaaattttactttaagttctgggacacatgtgcagaatgtggaggtttgttacataggtatatgtgtactatggtggtttgccgcacctatcgacctgtcctccaagtttcttcccctcgccccccaaccctggatatttctttttttcttttctttttttttttttttttgagacggagtctcgctctgttgcccaggctggagtgcagtgagtggcgcgatctcggctcactgcaagctccgcctctcaggttcacgccattctcccgagtagctgggactacaggtgcccaccaccacgcccggctaatttttttgtattttcagtagagacagggtttcactttgttagccaggatggtctcgatctcctgacctcgtgatctgcccgcctcggccttccaaagtgctaggattacaggcgtgagccactgcgcccagccgttatttcttaaagaagtatcaaatactagtccagtttaatttgccataagttttaaactcctttcttggtctcttgatatctcccaatactcgattcctacaggtaaagcaagtgattactatttggttttgaaatgatatgggatgtttaaaaaatggtaaaactctaaggtacgattatatgattacactattctcagtctctttgagtcaacactttgggtgaagaacaatacttgtgttcctaaaaataaatactttgtccatttccccatgaatagtaatcaaacttttacctgattaaagaaattctttttttttttttttttttttgaggtggagtctcaccctgttgcccaggttggagtgcagtggcatgatctcggctcatggcaacctctgcctcctgggttcaagcgattctcctgcctcagcctccgaagtagctgggattacagccatgcgccaccaggcctggctaattttgtatttttagtagagacagggttttaccatgttggccaggctggtcttgaacttctgacctcaggtgattcacttgccttggcctcccaaagtgctgggattacaggcgtgagccactgtgcccagccaaagaaattcttttagcaattctataagtgactgatttttttttatttttaatttttactctttttgagacaggttctcactcccttcccccaggctggagtgcagtggtatggttatggctcactgcagccttgacctcctgggctcaaacaatcttctcacttcagcctgccaagtagctggaaccacaggcatgcaccacagtgcctggctaatttttataatttttggagggatggggttttgccatgttgctcaggttggtctcgaactcccgggctcaagcaatctgcccaccttggcctcccaaagtgttggaattacaagcatgagccactgcacccagccctgatttttatttttttattatttatttattttttttttgagacagagtctcgctctgtcacccaggctggagtgcagtggtgtgatcttggctcactgcaagctctgcctcctgggttcacgctgttctcctgcctcagcctcccgagtagctgggactacaggcgcctgccaccacgcccggctaattttttctattttttagtagagatggggtttcaccatgttagccaagatggtctggatctcctgacctcgtgatctgcccgcctcagtcccccaaagtgctgggattacaggcgtgagccaccgagcctggccttttttaaatttttaaataagagacagattgtcactatgttctccaggctggagtttagtggctattcacaggtgtgatcataatgcactatagccttgaactcctggactcctaggctcaagcaatcctgtctcagcttcctatctgggagtacaggtgtgcaccacagtgcccagctttgagattttgaataaactcagtggggaatgtagttatgctaaattaggctgttattactttattattttaattccaaatgcaagataatatgccgagctgttaaacaggtttctataatttaaaagggactgagatcacacgaagtatttgctctggccatagtgaaattaaattagaagttaataacaaagccatcaagaaaattccccacctttgaaaattaaacagcacacttctaaataactcataggtcaaagaagaaatcagaagtacgattagaataggttttgcagtgatgatgatatatacccaaatatatcaaaatctggaagagatgcagcccaaacactgcttagaaggaattttatttgctttaaatggttctgttaggaaattaaaaagtacgattttgaatgtatacaaacatagttggtaaaactatcaagaaatgccagacaaaaatcagaagagtggttgcccttgaggaaggaagggatgtgatttgggagaaacccacagaggggctgcaaatgttcaatttctttagctgatgcattatattggtgtccattacaggctgagttatatccctctataatttatatgttgaagtctcaaccctcagaacctcagaatgtgactattattagacatatggcctataaagaggtgattacattaaaatgaggccattggggtaagccctcatctaatcatatgaggatgaagaaaagacatcagggatgcttgtgcccaggaggaccaccatgtcaagaggcagtaagagggtggccgtctacagggcaaggagaaagacttcaggagaaactcaccctgctggcactgtgatcttggacttccagcctccagagctgtgggacaatttctgttgtttaagtcctgcagtccgtggtcttttgttacggcagccttagtagactaatacattattcatattttaaaaagttctttatctttacacctgtcataaacatttttgtatctattcactataagtcaattgcaaatgaataataaatggataatgtcatactgagcctgaaagttgcccttttgtgtcagagcgtgctaatgacatttttcaggactccagttttaatgtttaaactatgggagtagctatgtgtaaatatttaaaatgtgacagatagtactatcacttgcagtgattttatacctcctagttgggaggttaaatgagaaaaacctcggtaaagtccttataatgtgtgcctggcataatacttgttagctgtgattattactagtactgtgtttcttatgcttatttcattgcagtttcattttcttaagaggtataggctctaaaatgaatctcatatagtagaccttgggaaaaaggtggcgagttaaatttgtagagaatatagctgtttccactggcctgaggttcaaacagtttagagtgagattgtgagcaccctcttagggacagacacatctctgttctgcctccagctccaacacagttctctgccttttgggattgggcagcagcagcaacagataatgagagacgaatttgtcattccagagctacttttgcctttaggatcacgtctgtgctttttccaggagaaggtagaaaagaaagagaagggagggtttggtggttttgagctatggagacctaactttatggaccaaaatggcacacaggctgtgcaggtttgtgtgtgtgtgtgtgtacatatatgtacgggtatactaacatcaggcatacagaaattatttgctgcgagaatgtcattaatagcacattgctgttgaatgaaggatgaaaagtgtacctgagcaccctgttattattgagcaatgagaattaagcaatttctctttaaattctctgtccctaaatacatctcattctgcttctgcttctcctctccttccttccccaatttagctctcccactctccctctttatctcttctcctccctctctctccagtccaccacagtgcctggaattctgcatttagaaatttgctctttggattaaagacactgtggccttttccaagaatttccttttaaatcacgaatattcttggaaggtaagacatggcatctccctgtgaagggttgacgcattcgattgctttggcatatggtagcttggactgagtagaggagggaggagtgtttttggagaggtatccattattggggctctgtagtcctcattctagggcatctactcctagggacttcacttatctgctagagcatcttaactttgtgtttttattttgataacaataaactgatatcaatacattctgaatcatctgaataataatttcataacaaggtcatcccatgaaacttcagcacctgtgtttatatttgtgtctgcccctaaatctttgtgtctggctaatgactgactcgtaaatgatgtatttccaccaagattaggctggatgacatcattttttgctgtgtctaatagaaagagtggcaagagaattgagctgtcctgctgcctggagtaaggaaaacagtcccagctcataagaaccttggctgtagtctcagtgccattatcacactgcaagagaacaattagttgtagcaaaacctcttctgccacattccatgaatattgttaaattgtgttggttttataacttttcttgaatttttcttatacatttatttcggttttgtagttgcctaggagttacaagcctaaggagttactcctagttgtgtttgtacaaattttgaaaacataatacaataatttaagtcaatagtgggagtaaacttttatagaccacttaggtttaagaaatgatggtcgggtgtgtagcagagcctgccaagcctgggtgagtgctgcaaggagggatcccgggaagggatgggaaaggtggaggaggtcaggatgaaagcgatggatgcttgagaatgaaaaggatggtcattttataggtggctggaatgaataaaggggagctagaaaaggatttcagaaagccctcccaaaatttaaccaacttcacaatttggcctgtagctggctatcttgttaggttattaaataattgaaggtaaacctgacatctctcttctggattacttaaaaaaatgcatttctaaagcaattcattttgaaaattggggtcagtgacctctacaaatcaaggtaaaatggtgccagaccctttttatttagccattggtcagtctgtcgcttgcacaaaaagcaaatggagtgaacaacagttagacggggaggtggaggggggacaggcaggtagtcagagagccgaccctcctgcctcatatattttggtggcgcctcatgctaatgctgagtttgtgtgcttaaatggtactgagataaaactattttttgtatcctttatagttcttcattcacaaatcctacttttagatggattcaaagatgaaccagttttacatgaaattcagggaaagggagttgtatcccctagtttcttctgcggttgacagagcgggaaaggaacttgagctaaatgaccttaaaatctgttaagagattttagtttaatggaagtataaccctccctaaatctgaataaaaatgccagaatcttttcaaagtgaacataggttggaaagttaacatattggtgattatctcaatgaaatattactacatagaaataatgacagcatgaactaaagcatgggatgttatgatttctgggcccttgggcacgttagtagacagttgtcagtcttcactgaacattggtaatagttgcttgtaaactctgaccttaagtgaaactatatataacaaaaccagttttaccataggctaatggatatggcatattttggtcacagaaacatcaccaaacatataaactaagacccaaagcacttctaatgttaaactttgaaataaatgtgagctatacatagacttaaagattattaaaaacaagataattcagttcagggtcacaggtggccaggaacctcatctggcaggcagctcagggtgggcaccatctctggacaggctgccatccaatcacagggtgtgctcacacacacccacacccacccacaacataggaacaatgcagacacgccaattcatctgctgtgcacagctctgggatgtgggaggaagcctgactattaggagaaaacctaccatagacgtgaggagaacatgcagactccacccagacagtggcccacatctaggaactgattttttttttcttatcatcattataacaaaacaatgttgaacatgatgatgttattccaggacctgctccaccgggcaaatgcaaaattcaggcatttttataatgagaatgtgttcatcagaccacaataaaatctcagaatctcatttccttaaggaaataatagaatcatcactagatatcattagagaagatgtaaaattacttgtttctatatatgtgtagaaatatattttattacatgtatctttacatagatgacaaatatttgatatatattttatatatatgtaccatgacttttcaatatatgctataatacaaaactattttcactttatgtatttaccatttaatccatttagtttctataccctgtggcagggaatactacaatgtgtgggaatctggtctttccatcttcagagaaggagaccaggttctcatggatggcattgacttccgcaggctgctttgaagctggatgtagtttgcagtttacactctgtcacttccactttatatcattatcagatgccaaaaaccaatccttctcgaagtacaagaggagcagagttgggggaagtaagggggaaaatgagacttgactttttttttctttttttgagatggagtctcgctctgtcacccaggctctagtgcagtggagcaatctcagctcactgcaacctctgccttccgggttcaagtgattctcctgcctcagcctcccgagtagctgggattacaggtgcacgccaccatgcctggctaatttttgtatttttagtagagacggggtttcaccatgttggccaggctggagagacttgacttttagtaagtaatgatgctgaaaattcacgtgctaaattagccaccatgaagtttagtcagcttaataaaaaggtaaaaagaaaaggtatcttagaagacatgaaagaagtatgagatccaaaagtaaaaacagagtcgtgcatgtgaggtataggaaaaaactaagaaacagagactggaaagaaagaacaaataataatcagaaatgttagcaagtaggtttgagtttcagatctttccctaagcgacaccctttaagactttgataaactaatttacagttatttgataatgaaaagaacttccgaatgtctagttatttgaagagcttttttaattataataggatagaaatgcatgctcccccctttttccataaagcattcattaacgtgttaaaggaaacgaaagaatgattaaaacctagattttccttgtgcggctttttcctttgatccagaaaagagcggaaaacgttgatgttattcattttcaaagtcacgaacatgaacaagtcattctgcattgaatgattttttcgtactgtgtacagtgctaaaatcacatgcaggtaaaatgtaaatacatgcccacgaatgaccacataacacccactcacaacttccacagatatgctgatagcagaattgtcatttagattgcctactggatttcccagagaggatgatcccttgcctaaagctgtcattttacctcctctacaggaaataagcaggatgtagggcctgttggtttttgttggtaatgacctcccacagcaaccttttctgttctcgcaatgagaaatccacacaacagcacagaataacgttaaagagagcctgatggaggtttgtgtgctagttactatttgcagccagtgttaggatctgtgttgtacttaagtcacaggaatgtaataaagttaacgtgtatccagtgctttctatgtgctaagcgatgttcaaattgcttcatgagcatcctctcattgaaatttcacagcaacacaatggagtcaataccactttgtccccatttgttagacgaggaaactgagtgtagctcagagaagaaatttgccccaagtcatatgcctcgtaagaaatggaaccaggatttgaacctggacaacttgctccaggacttttcatcagtcctctttcctgcttcacaaggacatgtgtgaaaatgctcctgaatctatgccacagagcagtcattctgattatggacataatgctccgcttttatagcatttcagccattatatattaatggtatattggctgttcttttcatctgaaaaacctaaaacttgactattgtgctagctatcctagctgaacagtttttcatgtgtcatattagcaaatatgttttgtattctatccaggtatatcatacacttactttgaagtctggaattgtgtgttgaatactctgcatctttagacatctgtagtcgtttttggtttgattttgccaatatcagatacttctaggtatgaacttattttctccataaagatggatatgccttgtagttgctatcttgtaggcaagtgtcatctgaggctttctaaaaggcagaggtccatgtggatatcctggagagggaataaaataagcctagtgtgtaaactattacaaaatatttaatacataaatatatctgaagttgtgatatctgacatacagagtagtcagtaaggaatgaaccctgtgcttgcagacggtgtggaaatttcaatgcttttttaaaggtctgagcatgtggcctactatatccatgtacattaagtcattcttaagggatttttgagatttcaatttagagatctaagttaattgtattcttcagatgctttttacaccagaccacactattttccagagaataaaaatgttctggccgggtgtggtggctcacactttgggaggccgaggcgggcagatcacctgaggttggaattcgagaccagcctggccaacatggtgaaacctcgtctcaactaaaaatacaaaaaaattagctgggcgtggtggcggacacctgtaatcccagctactcgggagactgaggcaggagaatcgcttaacccgggatgtggaggttgcggtgagccgagatcacgccattgcactccagcctgggcaacaagagcgaaactccatctcaaaaaaaaaaaagtgcctacttcttaagtgttttgagttattccagtgtccgtcggttatttaatgatgaaagcaatatatgaaataccacgcgtttcctaatccaccagcacttaggtatggagtatctgctgtattggaggaaaataccatgtattagatattgtaggaagaagctaagagcttagagcctgctctcagccagtccttgggtagctgagggaccagacatacgtacggcaaatatggacttataatactagaggggcaggtgaatcccaagcaagtaccattgtgtttggggtggcttattccagggaaagaaagaaggcattatgtcgcagagtctcataggaggtgggattttatctcaagtgttgaaggattaagttgaacaaaatgattgaaggtagaaattctagcatggggaatgtgtgaacagaacattggaatcaatatctgtttaggacatgggaaggagatgaacttgaccagagcaggggttttctctagggaaaaatggtatgaaatggtatgtaagatctgcagtacacatcagaatcatgaatgtttgttgttgaatatggttaaggataactggggtcagatttttttttttttttttttttgagacggagtcttgctctgttgcccaggctggagtgcagtggtgcgatctcagctcactgcaagctccacctcctgggttcatgccattcttctgccccagcctcctgagtagctgggactacaggtgcccgccaccacggtcagctaattttttttgtatttttagtagaggcgggggtttcaccatgttagccaggatggtcttgatctcctgacctcctgatccacctgcctcggcctcccaaagtgctgggattacaggcgtgagccaccgcgcccggccagggtcagattgttaagtcttgaatggtaagcacaggggtgtagagcagcatttcctaaactgtattctctgtagcccagttaacccacgaagtgatttgtgaaaatgcattctgtgatcacatgagtgtaggcaacatcatagtccacaaagtgtacatggacttctcacagtcttgaatttgctaatacatactatgcattcccaaggaggtagaatcatagcatgccacgtctctcacactttgaacacagactgcttcccagaatactcacgaacagctaccctgcatgctagttttctgtgtaatgctgtttgaaaagcactggcttccattgctccatgtaggatgaagcattaagaaacattttggaagaagagaacgataagaagaaagtatgattattattgttattattttttgagacgaagtctcccaggctggagtgcagtgatgcgatctcagctcactgcagcctccgcctcctgagctcaagcgattcccctgcctcagcctcccaagtatctgggattacaggcgcccaccaccacgcccggctaatttttgtattttaagtagagacggggtctcaccatggtggccaggctggttttgaacttctgaccccaaatgatccgcccatctcggcctcccaaagtgctgggattacaggcatgagccgctgcgcctggccggaagtatgatttaaggaaagttttatgttgcttaaatctgcctgcagctttttttattcctgcaggcatagatctaggccaggggtccccaacccctgggccatggacctgtaccagtctgtggcctgttaggaaccgggacgcacagcaggagatgaggggtgggcgagcattactgccagagctccgcctcctgtctgatcaaaggcggcattaatttctcatagagcaccaaccctattgtgaactgcacatgccagggatctaggttgcgcgcttcttatgataatctaactaatgcctgatgatctgaggtggaacagtttcattccaaaagcaccccctgacccccaccgccatccgtggaaaaattgtctttcatgaaactggtccctggtgccaaaaagtttgggtctgctgatctaagtagctaagattttaaaagtacagagaagtcctaaaatttcatgccttcctaaagctactgatgggaactaatttcaaagtttgttttgttgttgttttgaatgctgagcttctggctcttattgtgctcactgacgctgagtttgaaagcctctttgcagtggccaggcgcggtggctcacgcctataatcccggcacttcgggaggctgaggcggccagatcacgaggtcaggagatcgagaccaccctggccaacatggtgaaaccctgtctctactaaaaatacaaaaattagctaggcgtggtggtgcgtgcctgtaatcccagctattcgcaaggctgaggcaggagaatcacttgaacccgggagtcggaggttgcagtgagccgagattgcgccattgcactccagcctgatgacagagcaagactctgcctttaaaaaaaaaaaaattttttttttttgcttgttcatcttaggtatctgtctatattaggatgctgccccacctggatggtaattgcttttgggcattagcactgttagaggtgtgtggctggggagagagcaatgtggccacccatttcatgcaacgctctccacaccatcgtggcattgaacgaaggattcactaggagctattgtagcgatacacacgtgtttgggttgaggtgaggttcagcccctctggcagctgttgataaaggttttattgctgtttctagcaccctgctcctaaaacccctctctgacaatttggcctggtagaaccctttggacagacctggtatttgtgttctgtgttgtcagcctctggatcatcacaggatcatgggagattgactccaaaaattgtatcttcctctacccatatttgaatgagaatcatgtggaaagtatcgtatcttcaaaaaatccttgattgcttttttctctgcctttcaattgctatgtttaggagcattttctttaactctacgttttgaaataaggtggcaaataaatatgccaccttatagataaaattagacaaataagaacactggatctagagaaatattaggagaatcaataatacaattaactggattcttagttgtgaaggtcttcaattaaaatctgttcttcgcaaacacaggtcgaacgtcagggtcgtgtgtttgtgtgtgtgtgtgtgagagagagagagagagacagacaggcaggctctcgttctgtcattcagcctggagtacattggtgcaatcctggctcactgtagccttggtctcttgggctcaagcaatcctcctaccccagcctcttgagtagttggagctacaggcacacactaccatgcctggttaatttatttattgtggagatggagtctccccttgctacccagcgtggtctcaaactcctgggcttaagctatccttctgtctcagcctcccaaagttctcagatagcaggtgtgagccaccacacccagctgaaacataagtttttaatgaaagttgtcatgcttaccaaggattaagtgccaaatccctgtgtaattcttttcaacccagatttagactaaaattacagaaaatgagagaaaaattaggatagtaagtacaaaatcctgaagtgatcataataaaagcaaatctgtatttggttcaaattctaagatagataaacatgagtctttcaggagaatcgcttaaaaagaaaagttgttcaggagcagatgcttccaacttttttttaatacagctcatttcatttttcttttggtcaccctaaaatggtgaaaggtttcttcatagccaagtggaatcttttttatttaaactattctcagaaagttttctgtgtatatacatgttgctactctctttggacttgtttgtgtctggtcctcttggagatttttgaaataatcagaaacacttatgtcattgacagtgtttactatctttgaacaattgtttacttttttttttttaacaggtggcatgttggagcacgggcctgagaaacagtatagctaggaggggaattgagtgtgagacactggaatcaggctgcttggattctggtcctggctccactgtacactaaggctgcaaccttgggtgactttgtctctctgtgccttggtttctccttaagtaaaatgcagtgaataataatagtacctgctgcataagttctttgtgaagagcttagaacagtaccaggtacataataagtattaaataagtgttagccatcgttgctaaataaattagtaacaaataaatgttagctattgtttttagattgtattgtttgaaaaagtggcttctcacttttggcgggttttggaagagggagagaaaatgagccagaagggaggtgtaaatctttgtttctaatatgttcactggaacatcttcaactggaagataggatttgactgttatgtgttttcatatgtatgcagaagccatgttattcctcccctcccctgagtcaatgccaagctcctgaacactctgtttatgcagccttggaaaccttctagcttcatgttctctaccagaagcttgaaaacaaccaaagagaatatcgggtttactcaaaaccttgagtggctctttgacacagaagcttatagtatttagcgttctaggaaaccatacacgtgtatgtcagtgttgttttttatggttgtcagtggagggctaaaaatatcagaccctacatacatgttggtgacattggatttttttttgtcatggtgttaagtgattaaaatcaggttattagtgaaccataatttatttatagagtcaaattcaacagaactctatttaatgtcattactgaccatgaaattggcagtttgatattttaggatgacttttgcttgttagatgtttgtctttggaatgttttgagaactatggcccccgtataagtccgatcttgtctctgaagtatttccaagttctttggtttagaatttttcctgatggtttgccactaaaatcaaaagctgtgatgtgtgtttgagaaattccacaatcttctcagcccttagcccctgaattctttctctaaatagtttctctaaacctatatgacttcaactcccatccataatgacttctaatccatcttcactctggactgctcacatttgctctgacccctccagaaggtatctcatctgggttataataccatcctcacctcaaattgaggtgtcttcaaaagagaatccccaaactggttcttcctccttcctcctcaatggctcactggtgatatattcttattcttctgcttagtgaggtgtaatccctagctattcttcactttttcctctcctttatcctccttatccccacagtcattgaaaccttttaaattcttcagtagtactctttctcccaaccatctccctggtcaagaactcatggcttcatgcctatgttagcataacagcctcctaaccagtctgtatgatatggttatttagtcccatattcccttggtagctttctgactaaccttctaaagcctatattttatctttcactcctgattcaaaacttacagtggttctgaggaaagcccagattcctccatcagtttgtcttcatttggccctgctcctaatttgttctcagcatcttctactctgcagcaggaatttcctttttgtgtttagtgtcaaaactaccatcacaccaggcccattcttcctttatttgaatgctttagaatctccttcactctgtttccactcaggtatctctctgccatccttcaagcttcagctcaagtcttcctgttctccttcatctatacctcttcactaggagactcagaacctgcactttctttatctctcatttcttgccttgggtgaacacatgttacctgtccattttgataactccctaagggcaggtattattaatattaggtttctgtgtccctcagtatgatttatataccatagtaggtactaaataagagaatgtggagtaatcctctcccaaaacttggggaagtcaacacatacactgctctacttgggatccaatgagatggcatatgaggcagcattcatagaaggactgtgcaaatgtaaggcagtgtctttcattgctgggcacatttggggtttttgatgatgctgtcctctattccagaatagcagtatgtggtcaggacttctcatgagtttcaaagtttaattggagacaaccaaaatgtgtttccaataataggtcataaaaaataaggcttctatttgcgcatatgtttacttgtttatttacatattttcctaggtcttttatttcctcactgtgaatatatttgtttttaaatgcaacagctgactaggataaaggtgctgttttctggtcacctctgcattgccatggtctttgttattgggccaagaaccttatttatcttaacacacacaattgcttaaggatggggattatatcatcatcctttgcatcattgaattacactgtgctgccttcccacattgtcatgcgtaccaactatctaatccagaatgtcacacgctgctccctctaagccatttccatgtttcagctagtaccagccgtgaaaaatcgcaggcaagagcggggagctgcctgcattctccagtagggcaccactctacacctaagctctttggtaaaaggggatatagaatctatagctgtaagcaaaaatgagtcattttcacatctgattaacatacattttcttccccagataaacctgtatcttcattaatttttttttccttatcctttttacccaggtagttcatatcagtgaacatattggtctttttttcctctttataggatctgcatttactgctcaaccacatctaatttgatgtcctctgcagatttaaaatgtgtgccttcttttccgtcaccaagtcatccctgggttactactgaacatccttctcaattccccccgacccatggatggctgttctccattgtctgtttcaccagatgtcctcaaaacaaacagacagaagaaggaagtggctaatggtaagaattttttgtccctcttagaaaaattttaatgcatttactttaaagtgctggagatgtgaggtttttcttgtaagtaggtaatatgagtatagttcaaacattttgtttttaggatatcaaaattgtaggaaccttcattgggtcctttcatagtgatgaatcagaaaaaagatgaaagagtacagtacagataactttttcaaacgttcaaacatttatgacattcttctggtttcagatcccaatgctctctacgtgtcactcctggcatgacccacccacacacaaaactcaatagagccagagacaaactcattctgtctgttttaacactttttcctttgagttttgtgcttcaaagatcgttgttctcatttctctgctgtcccctgctccccagtcactcattccctattcaagcagtttgccatgccttccaaatatttctctaattcacccccatttccccattctcctatttggccctgaccatctccggccctggctggttcagtcaccttcttactgggctatctagtctatcatggacagtccctactgctcccacccttctcaggtggatctccttatgttacttttgttattgactgaagagtgtatttcaagattttcagcatttcatgccccatctttctctttgccataatcttcccacacctgtattccctgatgtctttgatttggtggtctagttctggtccagtttctgaatcagtgctgattgagacatagtacatgtaaacgttttccattctcccctcatctcttcccctatccaatgggcacttaaaattaaaatgactatcctaccagaaatttggtggcccagtaatgacctctgggttgctgtgtctttcctgttgttcccactactattcagacccactttccttccccaacatgttgtcatttggtggcttctatttatagttcttccagccaccttgtattaacctagtctaggattatacctgggtttctgttcctaaattttgactagttactaaggttaataatcttgtcttcctctaacgtggcagcttagacttcaatttattcttgagagttggagtgccttccatctgaattcttcttcttttttttttttttttaagatggggtcttgttctgttgcccaggctggagcacagtggtaaaatcatagctcactgcaggctggaactcctgggctccaacagtcctcctccttcagcctcctaagtagctgggactataggcgtgtaccaccatacctggctaatttttattttttgttgagatgaggtctcgctttgctgcccaaggtggtctcaaactcctggcctcaagctaccctcccaccttggcctcccaaagtgctgggattataggcgtgagtcactgcccttggtctgaatgattcttatcaagactggtgatggtggcatctaagaacagctgggggtgactctttgttcactgtgtgtattaatttcctctggctgctgtagcaaattaccacaaacttggcaccttaaaacaacagacatttaggttttgacagggctgagctcctgccagaggctctgggggagaatctgttccttctctcttccagcttctggaaactgctgacatcccttggcttgtggcctcatcactccaatatctgccccctccacggccacattgccttcctgtcttccatctgtagtcaaatctgcctctgcttccctcttagaagcatacatgtaatgacatttaaggcccaactagataattcaaaataatccccccatctcaagatctttaatttcatcacatctgcaaagtctttgcatagaaggtaacatttacaggtcccagagattaggacctgatatattggtggccattattctgtgtactacactgtccatctaggttgggcctgctacttctcctggaagtcccactcttgaccatttctgagtcatggttcagtgcactatgccttcctgcttctctgcctctttgtcttcctcacctctacctacagaactggccttagcaatgctgtcggtttccccaaggtctgtctcaggcccaggggccagggctacctcctgttcctgctgcttctcttcctgtacacttgcctccttctcttttattgagttgtagaaaataccaagtctcttttcaaaaatctcgtcctgtgatgcctccttcctcacaaagaccttgcaatccaggcccttccgggctgtctgcgttgtgtgacacttaactcggacatatgtagacatgccttgagatgtgggctgccatttatttatctaaaatgccccttccccttgctctatattgggtgaaatattgtacattttgcaaggtcttgtttaagtgtcaaattctctgagactttcctaagcccctccccctcctcttttccatacagaatcaattacatcttccctctgttcttccttagcactctgtttatacttgactcaaacccttcccacattgtgttatactttattttgtctctgtctctccttgctggactttgaggttcatgagaaccaggaaaaggatattattcatcttttttaattttaacctgacatggaactcacaatacatccttgatataataataatatgtgtttaattaattgattaatttgaattttaaacttttcataattcagaatatcttagaatagatgaacatttaatacttttctcccaatttccttatggacccaagagtaattattttccttagatggctatgtacagtcaagcatggcttttgtttccagtataaattaatttaaaatactgtaatttatgcattctcttctttacattttgttcagtgtgggggttattacccttacccctctagagagccaatttacttattttattttatttttgagacagaggcttgctctgtcatccaggctggagtgcagtggcttgatcacagctcactgcagacttgacctcctgcactcaagcaatcctcccacctcagcctcccgagtagctggcaccacaggtgtgtgccaccatgcttggctaatttttaaaattgttattgtttgtagagataggggtatccttgtgttgcccaggctggtctcaaactgggctcaagtggtcctcccatctcagcttcccaaagtgctaggattacaggcgtgagccactctacttggcccaatttactttaatatgagatttttctaaaccttaaaggctaccagtgtaatgttgtcacttgattgtcttcttgtagatccagacttttaagcaggaattaggaatgttatctgtgaagattgcttcttttcacttactggtgctctactgaaacaatactattttcctcccttttcctgggtgttttgtctgagtacatgtgaatgtcagagttattttccctgccttgtcactggaatctgcagccagcctccctgattgtgaatgcatccatgctgtacagctggcgtctgtttcctatttctatagccgtgagtctctcagggcttttgtagagagtacgggtgttttattacattgcatgtcttatatgtatgagaaacttaaagggctttgaggattttctttttcggtatctaatcttctaacagctctctgaggtaggtagcaggaagtgttatctccattttgcagacgttataacagaggcatagcacaacttgatgtaggccccacagcaaatcaagggctgagtggaaaaggtctccctagtctttcaacctccacttcaatgcactagttgccagacaagttaattttaatttttaaaacctccatccattttggttttgcatgaaatgttattgtcagcattcaggtggtagcagtgctccagttctagtactacctttcccatcttctgcatccttctagaatcccttcttgcttgtcacggtcacacacactcataagtgtgtctctctttttatgtgtgtatgtatatatgtaaataaagaaaataaaaatatatactctttctttaaaaagagtttctgtacaacattaggttctgcagaggggttgtttggtctggggactatatgcaaatatgagatttctgtattagcagcatatctgatactttccaactagttttttttttttcttgtcaatcaaacatactatgtagatattagctgtaggcaaggaaagatttaaaaatataaccgacatgggcaatatagtgagactctgtctctacaaaaaaaattaaaaaaattagcagggtgtggtggcacatgcctgtggtctcagctacttgggaggctgatgtgggaggattgcttaagcctgggagttggaggctgcagtgagctgtgatctcaccactgcactccagcctgggcaacagaacaagaccctgtctcaaaataaattaaaaacatatatatataacctatgacaatgggaaacataagaagtactataaaactggatatcagatactattaataagtgaaataaatgtttttactcaggtaattcctctatgtgacttatggtatcctcaaagtgagctcatactgtaactttcacataactttccgtcaaatgtgaagatttttttcttctctcaggggacagttaatgccttttggtaaatgtaaaactgtactgcgaatgtcagttcctgatcagatttgcctgagtctctaaagggaacatgacaaggggctttgtgcctgctgtgtagggtgtgtggtaaggcgtctttcttccttgtggctgaatttggaatgccccgctctttcagtaagtgccattaattacactattgctcctagagcactgaactgctcagcagggaatttctccccactttctggagtctctggggcagtttccattcattgctgtgggtggtggtgaggcacaggctctgcaccagccgcctggctggaatccgcctggagacctctttgtgatttccctgagctgggagaggggatttggagcacctggtggggggatgcagcttgccaccctcgtcttcgtcagcctctcccctccaccccctgcacttgggagcaccacccggcagcagtgtttttgtgccttgaaaccttttggagccgctggaatggaggccacccagagcttctgtgagcagctgtagctgcagatctcctattggccagagcagagaatgttcttacttatctccattgagcatgggtggccgtgatccctcaggataatgcaatttctcactgtctggaggtggaagctattgtcctgctctccagcttgttgtttgaagtctttttgtaaggcttccggcttctgctgactcacagacacacacagaaaaactcccttactggcttgctccctcccaaggcttttgaaatggctaaggagataacaaacctcccccctgcaagggggtaatagcttaaatagtaagtagaaagaactgttttgtacatgtccacaaagtctgagaaacttcatcttcctctttcactgctcactccgtttccttccttgtcccttactcccctcttcaaaagttttgggctgagccacaggcctaaatgtggtttgcatatgatttttacagaggcacaattcacatctggggactttttcagattaacaagttgaaggatgccatctttgtttcccctatggaaaattgccatttctaatgaacattttatgaagaagccttcttcacttacctctcccacttgtgataaactgtaattaaaatgtatgaagaacttgattcatggtgtatgcacctgggctctttgtggagtctctcttagcaatatgccgtgagaacagactggcagttgatggatttctaaagcagaaaatcaagcttattcacaatagaagcttatagttttaaaaaccacatggataagaggactgtagttttgcaagatttggcaatcatcgatgaacccagtagccacagtgaccgagactgaaaatgtagaaggctagctttccttcttaattacttttaaactacgttagcaaattctcagggtcagtgtgatagtgatagtttcaatgcttgattatagtgattttttttcgcataataattttcttatgttcccgtagcgtaacataggtctttttattaattaaggagaaagagaaagattgtgtagaaagcattcttatgtggtagcatgtgtgaacttcttataattagcaacatgtcctcattgcgtacttagaaaaatccagtgatataaatcctctattttgtgcagtcactatttacccaactaaatcatttaactgataacattcacacctttctccatgatattttagaataatatcaatgtacaaaaataatctctgtcctttcattgtcatcagtttatgaaaatactgccaaagagttggaaaacaaagttttctcatgttttacaacacagctcccctgggccactgggcctaatttgttcttactaattttcaaaagagactccatcctttagctccccagaaatatacaggctgtcctaaagaagccgcagcctgatacagaaactctgccaacttctaggaaatggaaggttctggaaagtagatcatttttccctctggtaggaacaatataagttttagacgtgggtgggggggtgttgtgtttgtgttagacatatatgtatacagctgctagtgcaaaaatcacaaacctttcagtttccctaaggcttgtctgcagcccttgtgccttgaatgcagattgtaataaatagaggcagtctctggctggaaatgccggacatctctgtttgagttagagctcttgttccaggcgtcaggggattaagacagagggttgttttctagcttgccctagagcccctgggcctttgcggattggcgtagttgcctttctgtgtgtgcagaatcttgcctccagcctcccacagtgtggggagagagaatagggagaagtgagggaagggaggtaaattattcaacttctgcaaaatgtcaggcactgtgctgggtactgtacatatatttcactgaaaagtaagtcttttataaatatggcaatgtagagcttcagagatgggattttggagccagaccgccgaaatcaatgattttgccaggattcaaatgataacttggccactttcgaggtataggactacttggtgcctcagtttctccatttgtaaagtggggataatatcagaactaacctcaattgtttgttgttgggattaaattgtaaagtacttagaagcgtgcctggcatgcagtgatagataagtgttacatgaaaggaatggaaaacagaagttaatccacttgcccagttcaactagcaagtagctggggcaggatttgaatctgggtctgttggcttaaaagagatgatttttgcctggggaacatggtgaaacctcatctctacaaaaaatacaaacattatccaggcatagtgatgcccccctgtagttccagcaacttgggaggctgaggtgggaggatggcttgaggctgggaggtggagcttgcagtgagctgtgattgtgccactgcactctagcctggggtaacagagtgagaacctgtctcaaaaaataaaaatagagatacgatatttttaccttaccatagcaccatactttcttttcttcctagctacatttgaggtggtaccttggagtcaattctctccattcctccccaccttacctgatcaggggtggttgctgtatcagtctagttttcccttttccttgctcttgtagagacatcgtagggccaggactcagagcttaaacatttaacatcttctgtgcaggcaggtgataatagcttctttcccccaaaccactgtggggttgaactaaccattttagttgcatggtcaattttttgggctggaataaatgatcttttgttctttcttatagttatttgatgtgttggttcttttctttactcaaaaatagaagcatctaatgagcagcctcgatgtcacacacttcctgttgtactcacccaagcagttgactctctgctgagcacattggtagcagctcatgggcgtttgaatggaggaagaaggcatcatattaaatggcttttccctgtttttggacataaaatgccatgggacagcttttttctttttcgtggcggcaggatcaagagtatagagtctggatttggagatctttgacgtgtgctttgcttcacctggcaatttctgctgggatttccagttgtaagcccatgtccctctatcctgcgatccctctaaatgtctggagttggcttgaacctgcatatcttatgccaactttcctctcttaagaaatgctgctaaagaggtagaacatatttacaaagtccttagctgtgacgatgaagaacataacatttggtctccagtaaggaaaataaaaaagggatttgattacttttgccccagtcccacctaattcacctacacatgtccagtttactttggacaggagttttcattaatgttaaaatgtatgtaaactgaagtggggtttttgactaaggacacagggtctctaaggcaagacaacactattaatagaatgtggatgtgtgtggtttatttttgttttcaaaatggaaatgtttcttcggggttttggcatgctctttgatatgttgaaagatgagaaaacatcatttgggaaactcagcacttctaccatattaggaaatttacagtgcttcagatttcacatttaatgttttaattgcctggtttggtaatagaaaaatgtcaagcttctctctttcatttggagttaccaccacgtttttttccctctttgcagtgatgggctgttgccagcttctacttactgccccagtcccagcatggactgagtatttgctctgagaaagcagttcctcacatgtcatctgaaatgagtatcaatgtggacttctgacatactggtttagccttttttgtatgatatcacatatgcagttgtttcctgtggtgcttgtaaatatcctaaatgtacaactaaaattgaattgtctttttgaaacttttaaattgtttttgaacagagggtgctattctcaacattacataaagtacagaagaagtcaaagaaaacactgctattctgatctgagagcaatctttaggaaaagcctgtacattacaagagagagacagacacacatggaaacagagaaacacacacgcagatcaaggcagagagaggcagacagaaatggagactgagaaggagagaggagggtggagttgtatattctgtgaagtgtaggccttttggaaaaatcaagacccaaaacagagttgaaatttactcttcttataaatataccttcctactgaggaaacaatgatgaaagaacttccagaagtaattttttgcggacaataaaatgtggagggaaaaatcctgtacatcatctttactgtcatacattgtcacaggatttagaggggaaatatgcttttatctggggaattagggctctattgctaagcagctgagtacaggtattttcactttccctgcacagttatctccaaacaatatttgcaaataaaatagttatttcatttttcaatatccaaatataatttttaactatatagtaagtcatacttagtatagaaaatttggaaaaatacagaaagacctccagaaaaaaataaaaataacctgcaatcatataatctagaggtaatttgaatgtatttccttttagaatgtgtttctatgtgcttatgtctatatgtattttttatataagtggaatcacactgcacatacattttagattcttcacttctctctataacaataaacatgttatttaatggttacattgtaattcttggtaggactctatcacaattcattttaccatttccctatgggttttcttcttcactaattacgttggtagtgatctatgggttaggttaagaaatgctgtaaagaggatctttgagtgtgaatagtttttctggattcctgattattttatcaagttatgtttctatataagaattattgtgtctttttaaggcctcctttgcacattgctaaatcacttcgcagaaaagttgtatgccttgaactctaacatttcagattgctcatctttcttacctgagacaatactgacccacttttaagacctccttcatctaacatgaaaaataatactttatttgttactttaactttcattctttgtgaattatttgttttattggaacttttattgttatgttttattggttgtttacttattggctgctgtaaattctctacaagcgccttttctgtatttctactgggattttaatgatgactgtatagattagtgtgacttcttatttattcaggttgttaactcttgtttgacttacttccttttttatacatacagacataaaatctaatttttatctagtgataaatgctttgtaacatcatttttctttcctttcccttatttttttttaatcttctcttaatttttctccctctgaaatgcccttgaaatttctttgcttctcagtcttatctctccacttctccacggtcttttccccagaatacttttccaagctcacttcctgccatgatcccaaccaagtcttgcttcatctggatttctccacttttccccttatgcacagttttgctttcggtgatttctattacctgcggtcaactgtggtctgaaaatactaaatggaaaatttcagaaatagacaatttgtaaggattaaattgtgtgccatcctgaataatgtgatgcaatctcatgccttcccatgccgttcctgctctggatgtgaattatccctttgccagagtagccactgtatacactgcctgtccattagtcatttggtagccatctagccatcaaatggaaaaaacatagtgcatatggcataggggttggtactatgtttctgtttcaggcatttactgggagtcttggaccatatcccccgtggataagggaagacaactatacctggcaaattccacttgcagctctgtgtgtgtgtttcccttgacatgttatcgtggattcttctttctcttttaagacagagctggtatgccacctctttcatacaaccttccttcacttcagcatgtggtgatctgtccttgctctgttttcagtgctcattttgcactttttgcacactaatttatatctttagttataccttcatgtgtgtatgttttgtcaccctgtataggctgccaggtccttgtaagcacagatgctatcgctctcatttctctgtaagccttatcctcaccttgggcaccgcccaaaaatacttaggacagtgctccatgtatgggacaactagacacttagcaatatgttgttgaccgatcactctcgtgatactttactttttccatcttatttctttttgccttctgcccctcccctccccgcttccttcttcttctttttttttttttttgacagaatttaactctttttgcccaggctggagtgcaatggcatgatcttggctcactgcgacctctgcttcctggattcaaatgattctcctgcctcagcctcatgagtagctgggattatgcatgcactaccacgcctggctaattttgtatttttagtagagacagggtttcaccatgttatctaggctggtctggaactcctgacctcaggtgatccacccaccttggcctcccaaagtgctgggattacaggcatgagccactgcacctggccttttttttttttttttttttttggagacaagttcttgttctgtcactcaggctagagtacaatggcatggtcatagcttactacagcctccatctcctcggctcaagtgatcctcccacctcagcctccttagtagctgagactacaaggcatgcatgaccacgcccagctaatttgttttcatttttagtagagatgaggttttgttatcttgcccaggctcatctcgaactcctgagctcatgtgatcctcctgccttggcctcccaaagtgctgggattacaacatgaaccactgtgtccggcctattgttggttttcttactcagtataaagaatcacttggtacactcacactggaagccatgttccctacttgctctcttccctttgaaacattatcctatgccttctttataatatgccatgttcaactaccagagaatctttttttttttttttttaaataatttcaacttttattttagattcaggaggtacatgtggaggtttgctatatgggtatattgtgtgctgctgagatttggggtatggacgatcctgccaccagatagtgaacacagtacctaataggtagttttttagtccgtgtctcctcactcctcccactcccacccccaccaccaactctagaaagtctgtggtgtctattgttctcatctttatgtccatgtatactcaatgtttagctctcacttataaatgagaacatgcagtatttggttttctgttactatgttaatttgatgatgataatggcctccagctgcatccatactgctgcaaaggatatggtttcattcctttttttatggctgcatagtattccatggtatatatgtaccatattttctttatccaatccactattgacaggctcctaggttgattccatggctttactattgtgaacagcactgagatgaccatataagtgcatgtgtctttttggtgaaatgatttatgttccttattcctttgggtctatacccagtaatgggactgctgggtcaaatggtaattctgttttaaattcttcgtgaaatcaccaaattgctgtccatagtggctgaattaatttacattctcaccatcagtgtattagtgttcctttttctctgcagcctcactagcatttcttttttgtctttttaataatagccattctgactggtataagttggtatctgatagatttgcatttctacggagaatcttgatgtcatcagaaactgttaggcagctaatttcctcattgtatatttttgttttcttggtggcttcatcaatgttatttgctgacttacacacttcttgcctctcaccttctctgccaaatctccatgctttataacccagacttacccacggtcgagttctctagacttggctcctctgattgtgtgagatcctcccacatttaggaagggggagctggtattaaatatatgtgtgaaatacttaaagaataaagtgtggaatagtgaaatatgggccctaatgcactaggagatcagaaggagacagtgggtatgagctgattgactcaaggacagctttataggtacagaggagatttattatagatataggaggatgggtaggatctagatggggcatgaggaaagagagggcacttaacaattggaatgagagtaaacaaaagccctaaaacctttattattagtaataatgcttggtagaaatgaatggggtatatacatgggaaatggtatataacaaggatgtctaggtgggcaagaggaggacatagttatttcttagaaggaagtcaatgggtgctatgcatggccaccgaccatgaatttctacagctgcttgctggatcctgctgagtggttttcctcaggactgctgctgcccctgtggcagccatgccagcttctctcttctccctcctgtttagcctcccactgggaagagctgctatgtagagacttattaaaattttctcaaagagtggcaggatgcagtggctcatgcctgtaatcctgaggtgggcggatcacctgaggtcaggagttcgagaccattgtggtcaacatgatgaaacccccatctctactaaaaatacaaaaattagccagacatggtggtgcacacctgtagtcccagctacttgggaggctgaggcaggagaatcgcttgaacccgggaggctgaggttgcactgagccaagatctttactgcactgtagcctgggcgacagagtgagactgtgtctcaaaaaaaaaaaaaattttttttttctcaaagaatttttcaaacactatctcattggatgcatgtgataatcttgggctgtgctgttacaccaatttgcaagtaggaatctgaggttctttgaggctaaggaactttcctgaagccacaaaactggtaagcagcagaactggactgtgaggctctggcccagatgtggtcggcgctctttgtggtcagccaggccacaccagaggccatttgcctgcttttctgttcattcattcatttttggtaaatcttgtctgaccatctactaagcgctgggtcccaagttaagacaaaggtaaacaaggcccttttcttgctttctgttccagttggatagggatcagaaaggcaaagccggcagttgcagtctcatgtggtaagggctgtagggagatgcccagggtgctatggctacccctaggaaggactttaagggtgaaattgtgccaggggctaaggcttcctagaggaagtgatagcagagctgaggtaccaggaaagatttaaatgttctttacagaaatctgtaacataaaaggcgaggcaagagagaggaatggtacatttggggaattaaaagtagttgaatttgcctggaatgcgaagggcaagttggggaatggtggaagatgaagctaaggacaccttagcttaaatctaccgaggccagatcgtgtgtagttgtggaaaccatggttaagagatcttcactgcccagagcacagtgaggaactgttggaaaggttgggagcctgagagtgacttgatcaaatttgcagcctagaagaattcctctggtgcagtgggaaggatgggctcactgttgcaacagttattgcagtctgttaaagtagagacattagctgatagcataaggtgcaatagcataaggtgcgatagcgtaaggtgcttttctcttcttcagtctctgcagtagcattctggaggaatccaaaggcctcttccagagcaaagctaaaaatggtggagaagggagaagcggaatttgctgtcttccatgatttggttccaaatacacaagccttgttctggttctttttaacatctgtgtgtctcaagtcaggaaaatggcttgaaaagccataatatcatcatagccctagcgttcagattaccttctttcaattagctaaccaagataaacttcgatttcatgaaagttgtgtactttatctccaagtcatgtgactaaaaaagccaactcttttaaaaacatacatgtttctacacgtttagaataattttaaagtatctatctatagcaaatataattttaaacatccataaaacaaaaatatagctcaggatcttttcattagggtctgggttctcaaagagcacgttgcaaggtaaagcaaagaaccttagagaaaatgttaagtgcttctgtcagacagagttttctcaagtggctgaatgtttggactcacagagctgctttttttctacgtaaagaaaactcttctcttgtagacccctctacatttttctcataagcaattctctttagagattacttctctaatttatccctcccttcccctccaaaaagagagatgagagattatctcaaggagctggcaggacagaatcaaaagcaggggggtgtgggtgtggaataagtcagtgcagacccaggtccttgccgtcgctggagatctctgaactttgccgcctccctctttgctgaggtccctcaggtggcctcattgtttctattaccttggtagaaagcctgtgtgaagtccctgcctgcctggcagtctcgttgccatggaaacttccattccgcacacctgattcacacatcacgcttggctaagtccagacagaggtcacagactggcatttgccctttgtttccccttcttgtgttttccaggcacttaaaaatggatatagaaagatgagagggtgggcagtgttgtgtgtaagaacgctttgttgtcaactgtagaagtgtgtgaggaaaaaaaaaaccaaaaaaaaaaaaaaaaaccaaaaaaaaaccttgtaaatggaagagcagagcaaatggcaaagtgtgcatatagttctaaccttctcgtaagaaagcaaagtttgaatcctgtaatgtgtctgaaagtgactttttttctggatttctaggtgagattggaaatgggtataatagattccagagtctgcggctccacagggagttttctgtcccctttcaccaagttgctcttacactctaggattgcaatgtgggttcaggtaaaccatccctgacagctgtatgttaagaatcaaattctctgatgttgctttctatactgcagctttacttttacataaagtgtaatactttagaaagcataaatacttttgaggaaattatccttcgttagaggtcaatacatttgctggagtaattttctgtttaccctctgattttttcttcttcctgtgtaacttctttaatatataacttagagaaaaggaccatgtaggaaggcagattattaaagttcttgcccaaccagaatttctctttcttaggttgagtcgttttcttttgattcttgtttataaggctgagatttagagattaaaaaaaaaaaaaaagactttccaagggacatgggacacggcattcagccctcctaaaacattaagttggccaggcgcggtggctcacgcctgtaatcccagcactttgggaggccgaagcgggtggatcacgaggtcaggagtttaagaccagcctggccaacatggtgaaaccccgtctctactaaaaatacaaaaattagctgggcatggtggtgtgtgcctgtaatcccagttacttggcaggctaaggcaggagaatcgcttgaacccaggaggtggaggttgcagtgagctgagatcatgccactgcactccagcctgggctacagagtagactctgtgttaaaaaaaaaaaaacgcaaacaaacaaacaaaaaaacccacattaggtttcagacattatgtgcagtgcagttatcatgtcttggcagtcgggttagctcgtgagtttctgtttgctcttacctccattgacgcttctgtttcttctcatttgtcaatattcctcctgtttagatggccttgatttacaaaatatgcccttactaccagcagtcaaccagacctgggtttcaaatctcatctaccttatgtccttggataaaattattagcctccattgtctcatctgtgaaatggcgttaataatacaaaactgctgtaaaaaaattgtaatttttacagtagattgcaagatacctgccacacaatatctattgttactattatcctgttaaatcagtttagaaataacatttatagcatgtgaaagcatatgcttgctctcagtgttactaagtttggtgttgttcttgactttggccaaggtaaggacaggttggggctaagtatatggatggtggatggaaataaattataatttttacaaaaaatagagcatgtacacacacattctccttgtctttttttcatttgtgtactcaccctcagtctattttttgaatctccctacaaattcaagtggcaaaatgaaaaggttgtacaagtattggaagataaaatattgtcatagagacatttagcgagcagtggctctgctctgtcagcatttccaggcagtcatagaggtacatgtgtgaattcccattctcatgaccccaaggccattctaatccccccattctaatcccctggctcctcacctccttccccttcctctcactgttctcacattttctcctcgtttttcctcctctcctctccttctcctccttttctccccgttttctgtttcctcctccctctccccctcctccttgtctttttcttctttctttaaaattgtggtaaaatatacctgctacagaacttaccatcttaactgtttatacgtttatggttctgtgacattacaaacttccacattttttgcaaccatcaccatactccatctcttgaacttttgatctttccagactgaaacgctgtacccattgaactctgactccccatgcctgcctcccatcacagccactggaaaccaccattctactttctgtctctatgaatttgactacttttggtgtctcgtataagtagggtcatatagtatttgttcttttgtgactggctcatttcacttagcataattagccttcaaggatcatccctgttgtagcatgtatcagaatttcattcctttttaaggctgaatcatattcaattgtatgtattaatatataccacatttttgcttatccgtttatccatcgacagacacttgtgtggctttcacatttagtatttgtgaatagtgctgctatgaacatgggtgtactcatatcccttcaagagcctgcttcaattcttttgggtacatactcaggagtggaactactggattatatggtaatcgtatttctaattttttgaggaactaccataccgttttccacaatggctgtaccattttacattccaaccaacagtgcacaagggctccagttcttccaccttttcaccaacatttattttctgatttttcgatagtagtcattcaaatgggcgtgagatggtatctcgaagttttgattgcatttccttagtgattagtgatgttgagcatcttttcatgtgcttattggccatttgtatatcttctttggagaaatatctattcagttcccttgcctgtttcttaggttgtttgttttgttgttgttgaatttttaggtgttatttgtgtattctgaatatgaatcccttatcagaaatatgatttgcaaatattttctcccattctgtgggtggcctttttactctgttgtcttttgatgtgcaaaattttaaaatttttaaatgaagtctaatttatctattcttttccttttgttgcttatgcctttggcatcatatccaagaaataactgccacattcaatgacatgaagcttttgtcccattttctcctaggagatttatagatttaggtcttatgcttaggtctttgttccattttgagttaatttttgtatatggtgttatgtaaagtctgacttcattctttcgcatgtggacatttcattttcctggcaccatttgttgaaaatgttgccccttcccattgagtggtctcggcatccttgtcaaaaatcatttgaccatatatgtgaggttttatttctgggttttctgttctgctggtgcatctctctgtctttatgctagtatcaccatgttttgatcactgtagctttgtagtaagttttgaagtcaggaagtgtgaatccttcagctttgttctttttcaagattgtttttggctattcagggtcctttgagagtccctatggattttcgaatggatttttctatttctgcaaaaattgtcattgggattttgatagagattgcattgaatctacagattgctttgggtggtatttatatcttaacggtatgaagttttctaattcatgaacatggtatgtgtttttatgtatttatgtctttttaaatttctttcagaaagtttttattgtacaagtctcttaactccttgattaattcctaagtatttcattgtttttgatgctattataaatggaaccatttttgtaatttccttttcagattgttcattgttagtatatataaatgcaacttacttttatatgttggctttgtatcctgctactttattgaatttattatctctaacaattttttgagtgcgggatcgggggatctttcggagataagatcagatcatttgcaaacagaaatagttttatttttcctttccaatttggatggcctttatttcgttttcttgcctaattgctctggctagagcttcttgtaccatgttgaatagaagtggtgaaagcaggcatccttgccttatttctgatcttagagtaaatgcttttagtctttcaccattatgatgttggctatgggttttttcatatatggattttattatattgaggtagatttctttctagtatgttgagtattttcaacatgaaagggtattgaattttgtcaagtcctttttctgaatcaaccacattgagatgatcatgtggttttagtctttcattctgttaacattatatattatatcaatttttctatgttaaaccatccttgcatttcgggactaaatctcatttggttgtggtgtataattcttttaatattctgctgaactcagatggctagtattttgttgacagtttttacatcagtgtttataagggatattggtctatagttttctttctttttctggctttgctatcacggtaatactggcctcatagaatgaattaaaaagtgttttatcagccgggtgcagtggctcatgcctgtaatcccaggactttggaaggctgaggtggatggatcacctgaggtcaggagttcaagaccagcctggccaacatggtgaaaccccatctctactaaaaatacaaaaatcagctgggcatggtggtgtgtattggtagtcccagctactgaggcaggagaatcactcgaacccaggaggcagaagctgcagtgagccaagattgcgccactgtactccagcctgggcaacagagtaagactcagtctcaaaaaacaaacaaacaaacaaaacgtgttttatcttcttcagtattttgaaagagtttgagaaagattggtgttaattctttatttttatttttattttttgagacggagtttcactcttgttgtccaggctggagtgcaatggtgcaatctcagctcattgcaacctctgcctctcaggttcaagtgattctcctgcctcagcctcccaagtagctgggattacaggcatgtgccaccatgcccagctattttttgtattttttttagtagagacagggtttcatcatgttggccaggctggtcttaaacacctgacctcaggtgatccacctgcctcagtttcccaaagtgctgggattataggtgtgagccactgcgcctggcttacttctttaaatgtttggtggaaggttgtgcatttttaaaaacagttttaaagaatatatttaatcagctgaactgagggaattgttacatttaggataaagagaagtttggaaaactgtggggtttccagattcattgttttatctccaagtgacaattcccttctgctctcccgagtctttaccacaggactgaagattcagtttggcctctgtgatgtggcctggccgacagtctgttgctctctcatcctttaggagtcctggatgattagtaagcattttctcacagcaaatgattcagaatgaaatgtagttccagatacaaaaattatttctgaaaataacctcacttctttaaaaccatttctgttatatgttgatttaaaagcatttatactgatctccagtcaactttctctttctcttggtgttccttcttcatccctctccccactctctttctctctcttgcctgcccacctgcccgcccccctcccttcctccctccctctccttccccctccttcttccttccttgcttccttccttcctccctccctccctcatggaatacccagaacaatactgtctaatagacatataatataagccacatgtgtagccatgctaaaaaaaaaaaaatgaagagaattaggtgaaattgattttaataacacactttatttaacctaatatatccaaaatattatttcaatatttaattaatataaaaattaatgagctatttaactgtatttttcatagtaagtctgtgaaatccactgttttaaacttgagatacatctcagtttggactgatcacatttcaaggactcaagagccacatgtgtctagtgaccactgtattagacagtgcagacctagtgtatttggtaccaagcacgtaaagtccagaaaagggcagccctccactttgcttcatggacaggacagatcaataaaggatgaatgatggctgtgagtacctggggaggagctgtgcatagagtattagggaagcccagaggagggggtccaaaggcagacctgtgagctggggcctccctgcaacttacttggcttgttcactaccactagatctcatttctttgaactagtcccctgtggggaggcaactgagctggagtttggcatgggccccagtccatcagacattaactttttgcctcatgtattaagagagccactggcaagttcacatttaattacaggctctgctctggccacaggtttgggagctgggattttggaatcacaacctcactgctttctgttctggtctgcctttcattcccacacacaggatggctcatctagcttcctggagattgctctccggccaggtgcacctccttgcttctttttactgcagtgcccagaggaagatgtaaagtatgactgagggaagggaaggaagaaaacatttttattttcttctttgtctagacacctcccctactcatctctgggaggcagcaccaagagctctggttgttaatggaaaggtcatcaggtggccttctgtggatccaccttgtccccaccctggccactgtgcctgacctgcttctcagggatttagagaggtagctaatgtggatggtgtggctccagcagttaggcaagtgtgtgtatatccaggctccctgcttggggaagggtggtagagagatgtttacagatatccagccaggaagtgcaagggaagaggaggagctgtttccacttaccctcctacctccttttggctttctcttctggcattgcctacggccaaaaagggatgggaatttggcaaagtaaaagtatctcattgtacttccccacccctccgtctcacctcccttctaagacttttttctacccaggtcacttaatactcaaagactgcaaattcctttcctactgctgatgtggaagaagcttggaaacatgttcctttccaggagataagtgatacggcagaaagacgggtcagatgaggccaagggattggagccagagtcttaccaaactcgcaggcagcttgtgactgcgggcatgctgtgctgatggaggaggggaggcctgggggctccatgctgtcgggattcctcccttgataaacagagtcaaggtgggtagggggaccttgtgagaggtgtccagccctttagaagattctattagcatgtgttggcttgttaaatgatctacccattgagattggtggcctggtccaaggctttgcttctgataccacttaatctcttttaatatttgaactctatactattaacatagatttctttgggaactgtatgcattttccaccacagggaatcaaatccagcatataaagatggcaagaatctcagtaattacctaaattcatgaagaagccaaagtaaaaatatttcttctcttgggaataataaaataaaataaaataaaataaaataaaataaaatagatgagagctgaatagctcttctccttaccccacactcacaaatctcctaaaactcaaaattaatgttacaatacacattagcagatagcatttttatcgataagtgttaaattaaggagttaacactgagaaattgaaactgattaagaaaatggaaaaggccacagtatttgaatgtcacatatgcatacttatattgtaccgtagatactgaaataagatcattgttactggtgcagcctgtggtcaaatgcattttttttctttttttttttttttaagacagggtctctttctgtcgcccacgttggaatgctgaagtacagcagtgcaatcatggctcactgcagccttgatctcccagctgctcaagtgatcctcccacttcagtttcttgagtagctgggactacaggcatgcaatactgtgcctggctaattttttaaatctattttttttgtagagacaggttctcagctcaggctggccatatgcattttgacaccccaaaatattttgaattattcttagtttcagtagatgagatgagtgatcatttgagttccttcaacaggtcattagaccagaccagaagcgagctgtgatgataacacaggctgtgggcaggcaggcaccatgaggcacagtgagagcaccaagactgtgggctttgggtttgaatcctggctccactactaatcagccctgtgcaagtgactcagcctctcttaacctcatttattttctgtaaaaatgggaattgtagatttatatttatggagattattaagataatctgtgtaaaatacttagtccacagtacctgacaaatattaaattctgaggaaatattaattgctattattactacttcagctctgaaaatgctgttttcttgacagtaaatggctgttttgtttatttctgccagtagcaaagtaatatattgattgtttaatgccttcttggcctctttgaaaatgtttaaaattatgtttaccttttctttatatcattgcaggttttgtgtgtgtgtgtgtgtgtgtgtgtatgtgtgtgtgtgtgtgtgtgagagtgagtgcgttttgggaggccagtaattaccctgtgcagatggagctgcccaaacagtctttcccatggcaactgaaaaaataaaaaataaaagcaaaaactttgaggttacataattgccttcaatagactaggaggagtgtagagatcatgactttttttgtgggttttggtgttcttttggtgtaaggtgttgggtgaaggtacagaggtcctactgagtaactgaacaggatgctgttgcttgctttgaagtgaataaattggtcaaaagtacaagtgggaggggaagttgaggtttaatgaaggagggccattattaatgtttccatggttttagcagtttaaaagttgggagtttaaataatgttgttagttgtggggaaaacagcccacagacattcagacatagttgaagtttagtctttcagtcttcattttaatctgaaggtagggagccgagccttctgaatcacacagcaaagggattgcttcgtaattttaacagtctgaattattgcatgctcataatggcataagatttgcatagctccaccactctcatcaaatcccaattatctgaagattgtttctcttgggaggcaaaagaatattataatttttgggtttcttttaatcttccaaaatgatttatattcatccccttaaaacctgggtgtaaccaaaggcactagggcccaaagaacaggtgttgtctttccagaacatccataaaaggatccctgtatacattctctttgcacctcttgtgtaggggttaacatggaaggcttcattatttgactggaaagtaggtttgactttcccactggagatttgatactcttagctccagaaccaagaaagagaagactattagactttccttgcccaccaccccctccccaaccctgccaaatgtatgctaagcctatatttgttttatttccaaccaatttgttggaaataaattggttatttatttccttattggtttttctctccagagacccaaaagatcatataatgccaactctatgttattgataataatctgggcataggaagaacacggagagttgaaatccacaaatcctcctaaaacccaacattcaaaaacctcttctgctcagctctttacatgtgagcaaaggaaaggagaatgagagataagatattaaatgagtacacgtggctcagggcacttggtgtcagaaactctgcgttacaatccagcctcttccagttacctggtgagcactgggaaatttttgtaactccctgagttctccctttatcatttgtcacatgatgaaagaacactttagtcttgttggttgttgtattagatgagatacgatatatgtgacgatttgtaaattttggggcactctccatgtggtgctcactactttgtgtcatctgatagagaggaggaggaagcatatataactagcagcctgagtaaatattggttatcgtttacttccaaattgccaagaatgggccgtaaaccaacaatctgccttgtttaacctccatcagctacaattgcctcaaggcccccaaattgcaattggtaagacaaaaacaataaatgcaaaatccatatttgttttcttcttccttaacttttttcattcatggtggtcaattgaggttattaacctaactgacctgcaaggataaacaaatgagtttttttttttaatcctttctgggaatcctaaataactagtttcaattgttgtaagttgtgggagctgggaatttgttttctccccagtactggactcttttacagtggcacactgggaaaccaaatttgaaactcaaaggagaaatggaacggtgacagtttcctttaacctgagctcagggctttggcaatagctctgctccaggtttctgttctatctagttctgcctggaacttagataaaggaaagctttctgtatcttccatcatccttgccttgttctaatgtagcaggagtaagtctttcctaatagtgttgcttctttttttttttttttttgagatggagtgttgctctgttgcccaggctggaatgcagtggcgcgatctcggctcactgcaacctccacctcccacgttcaagcatgtcttctgcctcagcctcctgaatagctgggattacaggtacatgccaccacacccagctaatttttgtatttttagtagatatggggtttcaccatgttggcaaaccatggctgatcaccagtaattcctgacctcgtgatccaccccccttggcctcccaaagtgctgggattacaggcgtaagccactgcacccggccgctctttttttttttttttttttgccttcactttattaaagaatgagagttttcttttacattttttctcattgctctctcagctgttttttgttgaaactagtatggaatgactattcctttccttagtgtgtgcgcccatggtgcattacacatggcacttctccctgtaggggccccactctatcacaacaaccagtgtcctcatctctcctaggccttgctcctggcccagccctgagcacatactctgcaatattcgaacccttgatcaattctgaaagcaatttattaacttccagccgtgagaaagaagtgaattagtggtcagggtaaaaattgtaggcatagtttaaaaattcattccagtgacataatgaaaaatttcatcaggagtcaagattggagatctctttttggctttgcaactgagtaaatgtggtaaagttacttgatgtctatgtacttcagattcttatttataaaattggactgaattaacatgactgaattaacacaacagcatcgtgattctgcgtctttcagtcccatacaactgtccatagtttagttgtctgattagggattataatatttgcgtcttttgtaacctaaagaatatcttatgttattcaagactgctcattttcattgacgtgctcaatacccaaagcacatagtttttcaagactgactattctcccctctcctgtgaaggagaatggtaagggccagtttcctcatgaaagcaactgaagaaactgaagtaaacgtgtcttttttttttttttttgagagggagtcttgctctgttgcccaggctggaatacagtggtatgatctcagctcactgaagcctctgcctcccactttcaagcaattctcctgcctcagcctcccgagtagctgggattacaggtgcccgccaccatgcctgactaatttttgtacttttagtagtaactgggtttcatcatgttggccaggctggtctcgaactcctgacctcaggtgatccgcccacctcggcctcccaaagtgctggtattacaggtgtgaaccaccacacctggtcaagacatgtctttttatcatgtctttcatccgatctttggaaaggagactctgtaacaaacaaacaaaaaaatcttctaagctgagttcaagaatagatgttgcttttggactcacttcttttggaagctttaaaaatgggatcatgagatcagaatgtatgtaggtattctctgaagacagaattgtatttgtccttctaatacccatctctcaaacttagcaagtgtttagttgcttctctttaacataagcctctgttggtagtttgtgtattcttttcagaagaaatgtaggaaaaaatatctaggggcttatgaaagccaacaaaactatagttagaaggtagatgtgttcccttagaaagatttatatggaaacttgttttctagaaagatgaacaaacaatgagccagactgtccttgttcttgttttaaaataaacatatttgtagacctgtaactggctcctgatgagcaatacatgaagccatttaaggcatgaagctttgcattggtatggaaccaactgaataaaacttgtttataaccttgtatacctttccaacataaacaccatttctggagttaatcatttttatactgctttatacctaacatcatgtgacagctttttcttttacattttttctgacctggattgctagctaggcatttgtattttttgatggtgatgttctaggttatccttttacatgccaaattggcataagccagaatattatattttatacttgtcaaaggacggcacatattattactatgtcataactagggctcactgtttttttttttttttttaaaaactgcttcaactttccacctatgtagaaacaagtatactttttaagtgaatgcttggattgaggaaccaggaagtgttttttactcatcagtattgcctcccacctgaaatagttcatttccttagaggatattgtggagtttagttatccatgaatctgtttttatggattgtattgaagaagatgaggagtaccatgcatttttttctgagagtaaaattgtaactatcagtatgattatagtttacttttttggtgcatttagtgggtttcattaaaactgatcttggattttcacagtatgggagagtgggtttttttttgtgggagatgatgtctgcatacaggagattgtattataaatatgatgtatcctggaaattttggaaagttggaaagagtgacttgacaactcttacattgaacaatgtatctgaatctattaatcaaacagatcactatctgaccagaaacccctgtaagagggaaaaagtcttcagttcttttcctaaattttatccgtctatacagataatatttctgttcctgtttgacatgttattttcctcataaacagttttaatggttccgtgcgtctacaggctaaaaagcagaggcccggtgatctcatctctactagttgactccaatctgtcttttcaataatggcctccacacccagtcctttgtcagatgtgtactctgagaggaggcattctatgaaggggaggggagacactagatttagaaaactctgggttcaaattccggtgcttcatttattagcaatgtgaattttgtcaaatcacatcatgcctctgaaacctaggctcttaaagggtaaaatgtgtataaatatattgacttttgttttcatctgtgataccatgtgatatcttttagggtcaggaatgtagttctatttcttgaactaattatggtggctaatttgaatttgcagcgtgtaaacaggctatttggaattcaagcatttctccctttccttgtcatctatttagatggtgaattcttcttttcctattatttattatcgaaacactttgaccacaaggatactttttttttttttttgagacggctcgttctgttgcccaggctggagtgcagtggtgcgatcttggctcactgcaagctctacctcctgggttcaagtgattttcctgcctcagcctcccgagtagctgggtctacaggcgcttgccaccacgcctggctaatttttgtatttttagtagagtcagggtttcaccgtgttgtcaggatgttctctatctcctgaccttgtgatctgcctgccttggcctcccaaagtgctggaattacaggcgtgagccactgtgtctggcccataaggatacttttaaatatttgggatacaaataagctattttaaatttaacaaataaaaagggctacacacaaatttttgagattggtgtccattctttaattttaataagttgttcaggtatgaagaggagagagaacataaaattggatttttattggattacttttatgctcaatataatgttttttggtcttatctaatcctgtagaaatatctaggaggatgtataatccagtgttcatagacattgctcaccatctgtttccaaagtgaaaaatcagcattcatatcgtacctttatttccctttgtgtgctaagtccaaactcaggcaaagaggtcactatttgttctctttacagcaaacttgatcctaacattgcatattccataatctgtcatctttgtatagttttgtggtaatgatctactcttactcggcctcttcacatacttattatgatagattttcttgatttaccaaatagagaacttatccattagaaatgtttgattggctttttcagaaacaagaagttgtttcgcttttttagtattttttttttccccttagacccaatctaatctaggtgggagagaaagtaaagagagtctcttggaaaactgaagagagtcacagcaagcccacagagttacacaggaatcaggaggaataaaaatgtaaaggtaacatggatgaaccatctattaggtgctttcgtacatactgtctcattttaggtttaccaatagcattaggtatagtgaagatgattgacatggtttggctgtgtcctcacccaaatcttatcttgaattgtagctcccataattcccttgtgtggtgggaaggacccactgggaaataattgaatcatggaggtgatttcccacatattgttctcatggtagtgaataagtctcacgagatctgatggttttataaggggtttcccctttcccttggctctcattctctctttgcctactgccatgtaagacatcctttgctcttccttcatcttctgccatgattgtgaggcctccccagccatgtggaactgtgaatccattaaacttctttctgttataaattacccagtcttgggtatgtctttattagcagtgtgagaatggactaattacaatgattgtgataatgactattgccattggacagataaggaagctggctcagagtggcaagtcacctgggcccaaacatcttgctaataagcagcatagcacattccttgattactctgttatatgtggctctaaaaggtttttttttgtgtgtgcattcatatggatgtcagcaaaaccaatttaagtgtagttaacggaattattatttctcatgccttctatgatttcttgtctgattggaacataatactccaggatcaggtttgttatacttccttctacgacatgtgccccaaatggcagtgagtttatggcagagattggctcaggagaagtattttctcatcttctggaatgtcctactaatgaaataacttaaaagacaaggacatatgaaggtgattctgtaatattaactctaaccattattaaattcttaatgcatgccacatatgcttctatttgcttacctgcattgatttttcactcttcataataccgttgtgaggaaggcacctttttgtttttttttttttcatttaaagatgaagaggttaaggcacaagaagattcataacttgccaaggtcccaaagctggtgtgggttccagtccaggtcctctgactccacagccactctccagtgctgctttggagcctgacacattagtaactggtggctccctaagagccttgactttggctttagttgacttagaaaatatttttatgtgtgtgtatttacttccaagcctctcatattttctcattaattataagtagtccacaattttcaagactgtagttgtaaaatataactcaaggcatagcgagaaagtagattttagtcatttggaatggttaggaccagctctctgtgtacctttccaggaatttaatgtttcagctgagcatagtgaccctaaatgtttggagaaagtgagagattttgtgtctatatacataggtgtccctgtgtcatctttttctttagcttgaagcactcaggatggaaaaacaaatcttgggaaagatgaaagagtagaactaaaggaaataccacataagttacaaaggactagagttttatggctgtaatttataatgtccactatccttgtgaaaattacatgggatagtttatctttttctatttgggaagatatattttttatatttaaaaatatcttgtctttagagttcttttaagtgtaatgattggagggctgagatatacaaactagattattttcattctggtctttttcttctagtatttggggtaatttaaatgcttcttcgttcactcacatgcttattcaacagatatttattgaatgcctactatataccagaccctctgctagaccctgaggataaaaggtagataggatgctgaatctgtcctccaagcatttggattctggtggtagaaactgttgtgtacccagttagccacggcagtttgagaagtgctacactagcagaatgagaagttctgtaaggccacagaggagggagggagtaattcctcctgtggttatgaacagaaatttgagctaagtcttttaaaggatgaataataaggttgggtaggccaagtgggcagggagggcccaagagacaaggtgctcaaatgcctagaatatgaaaaggacagagtaactatcattatctcacagctaggaacactgatccctgtaactagcttggcttacctgagaaggaaatgccaccaactctgagggtttccccccgccagtcttcatttattattgtgtaaaattagaggatgacagcagtggtggtggtggtggtggcggctgctgctgctgctgctttgtcttcttccttttcctgattagcttgatagatttgggttagatataggcattttccacatcaggctgtagttctttattttttcaacttttatttgatttttttttcttttttcttttttttttttttttttgagacagagtcttgctctgttgcccaggctggagtgcattggtgtgatctcggctcactgcaacctctgcctcccgggttcaagtgattctcctgcttcagcctcccaagtagctgggattacaggcatgcactaccatgcgcggctgatttttatatttttagtagagatggggtttcatcatgttggctaggctggtctccaactccagacctcagatgatccacctgccttggcctcctcccaaagtgctgggattacaggcgtgagccactgtgcctagcttcaaaaacttttatttgaaatatgggggtacatgtgcagatttgttgcatgggaatattgtgtgatgctgaggtttgaagtacagatcccatcacccaggtagtgagcatagtagccaataggtagtctaacttgtcccatccgtatccaggctttaaccatactgagagagtgggaaaaaaactgagctgcctactatgacccagtggaatggaaagttttctaccattttggttctatgtcattttcatattacttttttaaggaaattcaatttttctgccattctactagactgtatctctttgatcactacctatgtgtccaaatcactgcttctcccaactttttttgtgggccatcatccatgagcatggtacatccatgtggtgacttcctctgtttgtttaaatttgctcatttagagttttatattaggacagtaaaacactcatgtctaaataatttataagtcctgggaaactcgtaaaaatggcctgacatgatgttttgtgcctataagaaatcttgcagatggctaagagaagaatgaagatgttttgacttactgtctcttcaattacattataaaaaattcagcggacttgtccatgatcattaggaaaatgaatgattttcctattataaattacaagtgccacaaactacataaggactgtaattgacaggtatcaactggtagcgtttatttacattctccaaggcaacccacagaaatgtagtgctcaccatatttattcagaaaaatatgtttttaagtaaataaaacttccttgacacttgttactatagttaggcaacttaattccaattgttaactttctttagtaaatgatagatgaaacatgattttgtaagataaaagaacatggtgccaaaacattatatgagcatgatgccaaaaatacacacacacacacacacacacacacacacacacacacaactgaatacattgttcatagtgttttctaattcagggaaactggaagatgatttgaaagtattatgttcaactttgtatttattccaggaaaatttacataaggagaaaatacattaatcttggcatgtaataagaacctacattttgttatataattcattttgtgatttacatttctataatttattcaataagcctaataaatgttaggtaatgaatgaatttagtttcatgagtaaaaaatagtacatgaatgatctgtcattgtacaaaactgctgaattatgaatatggtttttgtgagtattttcttcccttcctccttgtcccatccctatgtcctttcttcttaaccctaacctcctacaaccagaggatagcacgttgagggaagaaatcgtcagaagttttaatataattatattcaggatgagagttctgttcaacacaacatcattggttaatttagtaatttctagaatgctgcccagacttgaaaatactttcagtactcattgctgaatattgctgttctctgcatgtttttcttctgggattgaactggacaggattttggctttttaacacattccagtgggtataagtatattggctagcaaagattcccttaattgacctggttttaataaaaaatcatccagtcctcctgccactaatttttctcttctttgaaaccacagattaataacctggtgttatctctatcaccgaggtgagaaattctgccaaaagtggtttacaaaaacagctttggggttggatctggagagtggctatgattttaccaaaactagatccctgtttttcttttaaattacatatggacagtttcatcaattaagttaccaaattcatattttatattctgttcacatatcaggaagcatttagcccaaacaaagtctgttcacataaaaatttctttttggatattttcttctactctgaggacacatgcctgcctttccccagtatgttctctcctgctcccagtaccttgagtatagtgagcattccataaagagtcagtgaatgaatccctttttcattgtgtctccattatgtagagtggaaatctgtgctggaacaatagctggtagatgatctgcaccagggaggcctgggctagacttcaaaagctgtttccccatcccggcaaggcaaaacatgttctttataggctgggaggtcacagctctatccccgttcaagactgcacctccttttttctctcttccttcccaggagctgtggagtccaagtgtgactgccaagaggaatccagcaaagccaaaaagcccaagcatgtagccctgcccgaagcacgccacacgcatggaaaacccagaggaaatgagtgaggatcaatgggaagaagagagccagccaggtgagcaagctcatcagtctggaggctagcgccactggaaagagtcccgggcggttctgtttatttggcaagttcgggccatgacctgagcttacactaaattacctcagagcaaattattttttaccaagccacgtaaatgttaggtcgtctccctagagcttttgggctgaagacagatgactacatcaaaggctgctcttgagtttccaggtgtggctgggggaattgtctgtcttctttcaggaaagggttaatttctaactcttcccctttcccttcctcaggtgaattattttgtttcatgccaatttaagtgttacctagagaccttttacgtagagccaattaattaatttatttatttttatttttattttttgagacggagcctccctctgtcgcccaggctggaatgcggtggcgcaatctcggctcactgcaagctccgcctcctgggttcatgccattctcctgcctcagcctcccgagtagctgggactacaggcgcccgccaccacgcctggctaatttttttgtatttttagtagagatggggtttcaccgtggtctcgatctcctgacctcgtgatctgcccgcctcggccccccaaagtgctgggattacaggcgtgagccaccgtgccgggccaaatagagccaatttaattgaacatagagtcctctggttttggtatgagtgggtgtgcctctgtgcctgtcttcataagaggaggccaaggctgtgtttcttctttataaatacaaatttcacattacggtcttgtgtggatatattctgaagcatcctcctaggtaaattgaattggactatggtgaatttttttttttttttttttggcagggggaaggattttaataattaaatcactggttgaaggcttgtgcaaagtttggtgctatattaggatttaccagggttccactgtgattctaagttcattttaaatttctgccccctgccttcctttccatttatgttaagtgttattaccatgtggagagaaggtattttaataacagaattttacttaaaaatgcttccagccaggcatggtggctcatgcctgtaatcccagcactgaggcaggaggatggcttgagcccaggagtttgagaccaggctgaccaccatggtaaaaccctgtctctacaaaaaatacagaaattagccaggcatggtggcatgtacctgtagtctcagctactcaggaggctgaggtgagagaattgcttgagcccagggaggttgaggctgcagtgagctgtgctcaaaacaaaacaaaacaaaacaaaacagctcccgttctaccactcctaaaatccatatcatatatcaaaaaaggaagtttgatacctgaaatgactcttggcagggcttctcaacctctgttccctggtatttggggctgtatcattcagtgttgtggggagctgtccagtgcattgcagaatatatagtagcacccctggcctctacccagtagattccagtagcatgattcctctccccagctgtggcaaccagaaatgttctgtgggggaccaatttgcccccagttgaaaaccattgttttggggattgattcaacaaaggaaaagaaggtaaagaaaatggtaaagatgtcacgtatggagctttgtttttgttgtttgttaattttgtcatattaccctgtgaatttccaaagaaagtaaatcgtaagacaatgaggtctgccactagaactcccatttagccaccagttctctctccattgttgactggaatttagtttggattaatacaacaattgcaactcacaacaagtattgactttgatgctgtcattatcaactgaggaactccaggttttatattaaacacgcagaactttctatgaagtggccattttgatcactgggtgttttcacagggctggcttattgggggaaaaagagggagtggttggagaaaaagactcaaataaggctaatgcaagactttaataactgaatgtatgagttgaatgaagaaacacgcctactctacactgtaattcagcagttttatgaatgggaggtcagatacatgatttaaatacaggtttcattgaatgcagtatcttttacggtactaaaaaaggtctggaatcctgcattcttcctgtataggattgtaattcattctctctgctctcactctccttccaaatttacttctacctctgtcatagaatgtttgagctgccagacaagtaggatcatgtcactgctgtgacttaacattaaatgtcctggtgtctttatttcagatgttctgtttttcctctattttctgctcacatgaacatacacacttgccaggcacattctggcttttcttatttctctttctgattttgcctccttcctgcccctgttttcttcccttttctctggctatagaaactgtcaggtggccttgctggcatcatcctacctcttttgaactgtgttacccaggaacttccatttattatgcctcgagcactctctttctttaatactgtatctctctgagggatagttaatgatctttgcagcaaatgaaggtgaactgtagccacattattgttagaatacagccaactatatggaacagattgggctgagctttgaacagctggggctggcagagtgagtcttgacttctctcggaagagttccagaactgccaaatcatcaaacttgaaggggaaagagggacgagaaaggttatggggatagtggttcctgcaggtgctttttgctcttgtgatctaccttttttgaaatgtttactagtttgtggatctggcaaagcatgggctaattgaacccaagagctgctgtcattgccacagactagacctgcttagtggccgtggtggtgttttattgttcatttgcaggtactgaacatgggataagatggatgcttttgttgtgaaagcttgtggctctcttcaggcaactaactgaaactatgtgtaggtttgaggagaattttgatctgcaatgtgcatcgaaccctaatataaatttaataatggctccattggaacttttggactataatgtggcttcctggtggatataataaatgaaaaataggcgaggtaggacagatatcataaactgggggaccagagagcttaatcactccttcaaaaatgttgtgtttgcccttatgaggagttgtgtgtgtgtatgcacatgcatgggtgcatgtgtgtttaaatgacttgctgccaatattttaaaaatgtttatataaacatttggtcaatttttccaaagaagccagaatctgacttcactggtctcccacggtcaatatcagctgtggctgaataacaagtactccatacctctcctgggtgggcagggcagggactttccaattaactagagttttcaccctctactcccactgttactgcagagattggcctttgcaagaaaagttcaggaaagaaaagagacaagccttgggattgggaaataatgggtttgaatctcagcttcataggcagctttctcaattggggaaattattaaactttctgagccttagtttcctcctgagtagagtgggaatatactctgcacctctaatggttgctggaaggaatattaagtaaaacagcgtatttaaagtttctaaaacaactatgtacatacacaggaggattgctgtacacatttgctgttattgtagttttcagttgctgtgtatcataggtgagttgataccaaccctttagtgtcccattgaccatgttacaaaatttaataaacacttgtgttactcagaacaaaggaggaaacttgtgccttgtcttcccatattttgggctttgttctacaatataaaatatatagtttttctacggaaaaaaatccaatagaaactgatttcttaaaggtagcacaatttgaagagagaaaaatcttatagtttagttcatattaggtggactcttcgtttccttttgaccgggtcaaggctttgtatttttgcatctatacttctgaagtttctgccccgcaccccatcccaatcacattcaaaatcaggctgacagtaatcctgtacgtggaacatgtgctgaatcctcatggaaggaaaggtaaagaaatgaaagccctgtagaaattaatatatttccttagaggtgggcatggaatgtagcttttgttaggcttacaatgctgcgttgaaggtttgtcagcattttgtgcacacagattctttaaaacttttaaggattttttccctacattattgcattcagttggcatcatttctttctctaatgtgtgacctttgacatctatcagaaagtttcagtacatctttggatgccacaccagctgggggcagggactaccccgttattatagtcatggttcagaaatacaggttcttccccctatttttatacttcctgcatagatgggtttcctttagatgtggatatttctcttaaatgcatactcttgtctcaaaatggtgaaggataccagtgtagtagtttcttcttctacttctgacagttactgggaaacttgtgtctttcaataaaatgctttctagaagaaggcaaggtggctagaaaatgttaaggcagctcagggaccagtgggagaaaatagatgttaaaggtaaaaagtgacttgtgattagttcagttacggagtccaaaaatccaaccaggtttgtaggtaaccagttacgtttcaaatgtgatcttaagcccaccccgagtgagtgaacctcaacatgagagtagaagactctggaagggaagatgtgagaagataaaatactgttttcagagccctaggtttttgtttgtttgtttgtttgtttgtttgacatttttatgagtggaggaataggactacctctggaacctaaaattgggctgaaatccaggtccagttctaggtgattgctcagggtcccttcccattccttcctccatctgctcctgcccacttgagtgaaggaggtgaataataaaagaggaaagaatgtggatgaaaaggagaagatgcagagaatgaagattctctgtcctttgtaaaccttttgtcctaatcaccaaaagtattgtggcatgtgtaagtctgagaaaatatttaggtgaatcccttgaaattgtcagtatttcaagggttaaaaaaagacagtttcacatagttcaaatgaaagcaacaattaggtttttgctagaacttctctgggtccaccaatgggatgtatggagtggttttaaaaaaccacacaaggctgggcgcggtggctcacgcctgtaatcccagcactttaggaggctgaggcaggcagatcacctgaggtcaggagtttgagaccagcctggccaatgtggggaaaccctgtccctactaaaaatacaaaaattagctgggtgtggtggcacacacctgtgatcccagctactcgggaggttaaggcgggagaatcgcttgaacccaggaggtggactttgcagtgagctgagatggtgccactgccctccagcctgggcaacagagtgaggctctgtctcaaaaatgaataaataaataaaaattttaaaaaccacacaagttttggcatccaactggatttttttccttttgcatatgcttttctaacatatgcagatattttctttgatttttcttataatcaggctttcttactttttctaaaattgtagttattgcctcgaatctcatagcagaggagtagaggcaacaaaaaggagagccaagtgtgggagcaattgaagaccgtggagttttttcagatcattcgcctgggaacttgcatggcagttgtggggttccaaagatccaaaatcaggtgttgtaacttagctgacttgaatatttactttgaaaataagaaatgaatgttaaaaagttgaaaagttatacacatgggcacaatttattgaaaccttttcttagggtagattgaaccttgttgaaagttgtgaaatttgctcaaatagtcattttttctctttttttctaggtctgaatgatttcatgaatattgtggtagtttgggcaaagaacaaatttgcttagtcaagaaacattaaaagcctctacgaaggcctagaggtggtgaaatcagtggtcctctggtgggcatggtgtgtgtgtgtgtgcgcgcacacgcgtgtgactcatctggggttggctcagagtgaaagagacagatgcttccttcgcctgcttgtttcctggttttcaaagcccctatttcattgttgttttattttaaggttcgatgccttctccatccgtcagtgagggtgtggagagcctgcaggcgtgtgcctccctctgtaacttgctattccttgtgtaatgtcaagtggaagtgtgaagcaccacaaactgctctgagcagagcccacttcccttcacccacggagagcgtgaagcagttacaccaacatcaatcaaggaaaacccacaggctgagctcacacggttgaagcaggtgcgtgagcgagcgttctgtgacaggcacacgtgattgaggtgtacctcggcgtcttgcccacagatgtcggttgcgatgactgtgtggggctgtgcccattccctgcagagccgagcctgtcatgcttgtgggacacagtgggtgcagctcttggcagctcagtggggtgagcaggtcaggtagttctgaagtaggcttctttgctgtttactcacttgtttaatggtgaggagaagaatccaggagaaatagtgttttattttctttcagtggtgttttgcagtgagaacacccctgggattactcctttaaaacagtaaacaagaggccgggtgtggtggctcaggtctataataccagctctttgagaggccgaagcaggaagattgtttgagcccaggagttcaagatcagcctgggcaacatctctaaaagacaccatctctaaaagaattttttattttttaatttgccttgtgtggtggtgtccccttgttctcccagctacttggaggcagaggtggaaggatcccttaagcctgggaggtcgaaactgcagtgagccatggttgcgccactgcactccagcctgggcaacagagcgagaccctgtctcagaaataaataaataaatgaaataaaatagtaaacaagaaaacattagtattaattgatttgctaagcctaagggggaaaatgtaaggtcttgaatctctgtatgtatgcatatgtgtgtatacatatctatcaatatctatcaaatgtgtatgtatggagtggttttaaaaaaccacacaaggctgggcgtggtggctcacgcctgtaatcccagcactttaggaggctgaggcaggcggatcacctgaggtcaggagtttgagaccagcctggccaatgtggggaaactctgtccctactaaaaatacaaaaattagctgggtgtggtggcacacgcctgtaatcccagctactcgggaggctaaggcaggagaatcgcttgaacccaggaggtggagtttgcatatgtagagtagacgtttgtgtacacacatatatgtatatgtaaatatgtgtgtgcatgcatcaacacaggcaccaatttaaagcaaaactcaagtgggccatgagataaagagagaatgtcaatatctagacatttaaaaatatctgctgacaaggtgaaggggctagtaaaaaaatgcatatctcatcctaagtcgaaccatcttgatatgtattgagctttagaaaattttcacaaaagttttgagcaatcttaattttaaaaatacagaggcagttaatactaagacttcaatatatattgtgctttgtaaaaagtggccagtctctcaaggctgctaatacctgctattggttatgagtatctactttgagctgacacttcaaaatgttatacatattatttgcatttacatatgtgaaacaatcaccctttctttaagcaatgtaaagtaaaacaagacatatttttaaactactaaactgactcagttggagaataatgataaaaaccagtattactatgggtaaggaaaaaaacctgccattttgggggaaattttttgtatactctctaaaggtgatttcacgatatgtaaaatcaaaagccacaaaatattcttacagtttcagcagttcagcttctaggcaaattttttctcagactgtgatcaaatgtgtaaaaaatttagctataagaatgcttgatcgcaaacttatttatttttgatacattttgctagaaatgtctaaataatattacagtggtcaaataaattatagtagaaatatgcaataaaataccaagtgaggcattaagcagtggtgtagatttctctaagaccctgtttttttaaaaaactaacaaatcagtgtttcatgcattcagtatgtgcagatatattataagcagtttgtgagatttatataaatctaaaagttgttacagctgtgtgattagagaataattaaatggctttattttgcctgttgttataattttctaatattcaagtgtattacctgcacattaaatacagaaaatggcaaacatggaaatagcatattgggagtatacttgtaagttacctagagatatttgtgaagacgaggaagggaaagaggtttctttcttttcttttcttcttttttttcctagatgatgtcttagcagaaagtgttaaagactagtgattgattaattagttcaacaaatatttgtgtgcctctatgtgccaggtactggacaagactctggtcacattgctatgtacttttcacaggaaaaattgctgaatctgttctgtttgatattctgcatcaatgtagctttaccagtagagagtcaataatatgaatatgaaagtaatatgggcatgtaaaattatgatgtcacggcccagcatggtggctcatgcctgtaatctcagcactgtgggaggccgaggcaggtggatcacctgaggttaggagttcgagaccagcctgaccaacatggtgaaacgctgtctctactaaaaatataaaaattaggtgggtatggtggtgggcgcctgtaatcctagctacttgggaggcggaggcaggagaactgcttgaacccgggaggcagaggtttcagtgagccaatattgtgccgttgcactctagcctgggtaacaagagtgaaactccatctcaaaaaaaaaaaaaattatgatgtcagactgacgttttgcttcgtatttttacatatgcgttttatctgctttatgctgtttcacatattaaatgtgtgaaactttttctgtactgtagatagttgacaccatgaattgtctggaaagtcaaaagcaaaaattgagaagacttgttataattaatgaaaactttaaaggacattaaaaagcttatttgcaagtgctttgaaaaatctgacttttccatattttgtgaggttttggctttgatactcaatcttggtttaatgttctgcaggtgtcctttggggagttagaacagggtttgcagggatggggagattgagtgtgatgactctagtgtccactcacttggaatgttgagactctgaggccttaaataggaggtttagatttgggatgtctgactgaaagagggttaggattcaggctgatgtggagatgctcattgaggagttcaaattcttctctgagcccttaagaatctacccaaaggacagtcttctgatgttcagtctctttctcatgaaaatgatcttagaagtttaatccttcaaatgacctcttaacatgacttctcatactggtgtgagattagaaaaaaaaaattccagcctgaaccatcaagggctccaaaatgaagattttttttgagttttaaaactctgaaaaagtttttcataagttataaaaacagaaaggttcttgagaggaagggtttgttttgggtcagtgccaatgtgccacagttgctttccttgtgtgtgtttgtgtgtttgtctttgtcttctgtctgcctgtctgcggggatgattatggattcttgaacttggttctttctttcctattgattggtgaagggaagaagttaaactttggatttggctctatttccattgtccattgaatcgggagagttagcccattggttattctattgctcttttgctatgattttgtgggaaaattgtcattttcacttcccccttcttctctccatcctttcctctcgttaaaacagacatgatgcctttaacgaattgccttgggatagtttgaagtataaagggaggaaaaagagatttagctcttcctgagacaagccctgagtagtaaaatcaataattcaagaaatcacttgccctttaaaaaacaaacaaaaaaagacttgtaaatagaacaagattgagaaaaacatgtctttaggcaggctaatctaatcacacacagaaggcagcctgttttcttacttgctggatcgcttccactttatattctcacagggaacaatatattaagtacagtatttagaaatatttgttgaatcctactgtctgattttggcaagtcccaaggaaaaaaagaatatgtcttggactgcttgagccttcctgggaggatattggagttttcccagagaggctggcttcacactgtgggaaacactggtttggtagataacactgttagaatttatatttcagagggcatttagttgtcttcagagttttagagcagccacagctgatcttctatgtctcaggatctgaagaaactcaaagtataagctaggctttctttatactgatgtagtcattctcttttgaggggcaccctaacttgtaactcactgatcctgtgttatggcagcaggctgagttcaccagcaccaaaatatccagttagtgtatcagaagagaaaatgtgggtgtcacaaataagagtagctaaaagataggacattatagggtgaaaggtccattggctgatgccgccttctctcagggaatgttaaagtgtcaacattttggcaaaatcctaagctaattttgtttaaatgtgatcatcacatagcattgactgagtaattgaaatttgtgatgggaaataaggatgaaatatttagaaagtatgttatggcccctttgcttaagagtatatgctaaaataaaagtatctcattacgaggaatgtaagtgaaataaattctttcagtttaattttctcagcatgtatctggcattaagtagtttttataaatcttatgcaagggcctatcccacagctctattccattggtggcttaaatgtgaagtaggcatatctgaagggttcttttgctctgtattataatgttgagaagttagttattgaacctatagcttttcatctctagaatggagataagagaatcatcctcagagtttaaaaaaaaaacttttaatttttaagtagttttagatttacagaaatgtagcaaaaaaaggaagagtgtagtcttacatcccttgcctggttccttttcttgttaccttattatgtatgcttgtcaaaaaaaattcaacattgggacttgcctattaaatgactccacagtttgggtttttttttttttatctttatatttcactggttcttccctaatatccttttctgttccagggtcatactggatacgacattgcatttagtagtcatgtctctttagattcctctgaactatgagggtttttcagcctttccttgttttaatgagcttaacagttttgaggcgtgctggtcagatattttgtagaatgtccttcaactgaaattcatctcatgattggacttggttatgggttttttcagaggaagaccacagaggtgaagcaccattctccaccatcatatcaagagtacctatgatcaccatgacgtatcactatagatgttgatcttgataacctggctgaggtcatggtgccaagtctcttcactgcaaatttgccttcccccgactttttcccatactgcactctttggaatgaaattactaagcacatgtcatagggttattttaaggtttaagtgagatgatgaagcttgtggtataaaacccagtgctttagaaaacactcatgaatgtcagttgctactgtagttgctgcctttacactagtccctttcaatacatgaaagctagtattctttagagctgctttctcataattatacagttctcagccatttgctgatattgatcagaaagtaaaaataacaaaaaagagtgctcacacacctttcaaacgagatgcctgtatacaaagtcactctaggatggaaggatacgaattctctcaaagtttaccatggagagactctactaaactgggattatcagcctctggtcctgtttcatgtgatggagtcagtcattgatgacagagctggtgggttctggttggtcttgggcatgagagggagaaagaaagtttaatttaggagctgagcctgaaaaattggtgaggtttttttttttcttcctctggtgatagcttttgggtagaattttgagttcttactggaataaacgatcttcagcacttctctgtgaaatgaagggcttgttctgggacctgaaatgcttcaaaccctgtgcagttgttgccagagtggctgtctgagcctggataatagagcctggagtcctatgtaaccatgtctgttggaataaataagaacagctggtcgcttgtacagatactgttggcatgaattttttatttaagtctctccatgtatctagtaaacagtaagcagtattctaacattactaaaagcctcctaagtctcccaccaataaatttccttcactcttccccattaaaagttcagggagtagggcaaggttaatgtaccagagaaggaatggtagggaagtatttctgagctggagaaaataaggttcttcttctgtgtctcttttcccatttgaccttctagtttctctctcagataacacatttttttttttggactatttcttgggaaagcaagatttatacgatattcttttgctgtttcttatgtataagagagacttattcgtgttaaaatggaatactctgtccctgagcgcttaatgggaaaaaaaatttgcatttgtgttaaggggtaggtgagtggtaaaatattcttttggtttcttttaaatgtctagcaaggaaactcttccatgtatctttatgaatttttgtctcagaaagcttactagagactaaacactccttcactgtcctatagagaaccagagatgtacttaaagaacatagatgatgtcacgcattcattttttctgttttttttttttctttctttttgtttttgttttgagacagagtcttgctctgtcacccaggctggagtgcagtggcacgatctcagctcaccgcaacctctgcctcctgggttcaagcgattctcctgcctctgcctcccaagtagctgggactacaggtgtgtgacaccatgcccagctaatttttgtatttttagtagagacaaggttttgccaggctggtctcaaactcctggcctcaagtgatccgccggccttggcctcccagagtgctgggattataggcctgagccaccacacccagcctgttgttatcgttgtttttaaaagcagaaagaaatttccagcttaacctgccatattaaccctggggtgctaagaagtgagacctatcagagacaattggccccattgctctgttatttctttcgtcaaggagacattgagttccctgcactgggtgctaggaatgtaagtaagaagaagatgggatctgtgtaccttaggaatcaaatgatagtctttatgtgctctggtacaggtctgtgtgtgtgtgtgtgtgtgtgtgtgtgtttctttcaagcctttgtgagactcctatggcaattaggaaggctcacagatattctgatggccttccttgggcacactcagcacagttgtactttcttgcctcctttaagtctaggcatgactatgaaagtggcttgccatgaaatgtggcagaagtcacatgtgtcacttcccagatgaagctttaagagttgccatgtgatttgcttcatccccttccccttacattggttgaagcacaggccacgagagagcctacacagtctggtcatgtgatgaggggctatgatggaaagacctcccgaccgaggttgaacatgtcatgtaagcaagaattaagcttcagttactacaagtcatggggatttaggtagaggtggtgtgttcctgcagcattatccagcctgtcctaagtaatgcagtcagcattcttatctctttagagttataggaattaaggcctcaatgttgggctgtggaggggatgttcacagttgtgatggtggcagcagtggtggaaaatctgtacatgtggtagttattgatgcacaaaaattgggcatcagtttttagaggtgtgacctacatttcagtatcgttgttaaatatctgtagggagattacatcccttctgacactgtatgtctaattgtcagtgaatatctttatataatgaaacataattctaaagaaggaaaaaactcaaagtatgtacacacacgcacatgcacacacacacacacacacacacgcacacacacaccctctagtttattctcccaagaattatatgagagattttaatgttgttctactggttgagtgccaggaagaatttcttgggtggatataatgcttaatttatatttggggaatttccactgctaaatcagtgcttgtaaagtttaaaaagaaaagagggggagggttggagaaggggaccaaaaaaaaaaaaagcccagggatgtggttgacaatattccttttaatttaaagccacctgaaggcttcagctgaataataaagtaattcccatatggtttccgttctttcagtgttagaacctctgaaatgcagtctacttttagccttggcttctgcatgcctctttgtcaggctgaaatgcttcccgtctgcttgctctggtaggaaatggaaccaaagccgactgctctgggggacgagttcccaggctttgctttctatttggcaaacgtggctcatgtgatgggaggcacttctcctccagggcactcttgactctctgacagacaggaccagctctgaaggtggctgcaagttttcattaatgccagagctcgctataggcacttttctccctcccttacaattctgtttacaataaactttccctcaaaggaaaaacccaggattcatatgagtttcgttgttttccctggaaagaagtttttgtaaccctcagactctttagaagggaaaacatccagtaaatcctgaaatctgactgcagagttatttttcattatttgtactttcattaattcaaattccaccaaaaaacttttctctttttcctgccctgtgtaagtttactttcccccctgtgttcatatgagttcatgaaatacttaggaagtatatgaaaaatgtttcagaaacacagttgtgttatatgatgcttacccaaatcctgctgaagtaagtgaaaagacattccctctccctaccccttctttttctccccttctctctcctaactttctgtgttcagagtcaatgcaaagggccttcatttttaatgttaattttaaaaataactagttttcttttgaggtaaacttagggaaagcatatgtgtttggagatatatatctccatatataaatatttacatttacatttacatttggagctcaagtttttcattttatttttcaaacatgttgaattaaactagctaaggactggaaacccaccatgactatttgctgtgggttgtatgatcactattctggcttgaatttttgaacttctacagcaacatctttaaagtgccatgagataactttgctgttgctcaaaaagaagctctttaggaagtcggaaaacaggaattctggtgctactttatggtgataatgtcactaactttgtacctttttgtccatttaaaaaatgagatcaatggtgctggcctttccacttttcatgtagttgcaaaatcatttcttcatgcaaggacaatcaaaatatatgaataacgtggcctgaatatttggaagaaaagtcctgcaaaagtgtaggctgatggaagcagaggaagaacattttatattgaagaacaaaggaatttcaaaagaaatggtgttaccagctctttcagttgaccagacaagtaccaagtgtttgggacttgttcccatcccaacaaagccagcattttgaggaggcctctctggcagggtcattacatcagccagtttcctctccatttgaaatgagaaagtacatgttaagcacagaggcactctaaagatgaactcatgccaaaatatgccttcataagcctccaaagtcacttgtggggtacaatgtcagaatgaacatgatcttatctggcctataaattaaatgacacattttctgtttcttgcacaatgtgtccctaagtggtgcttcatgtgagtttctagaaatgccttctgtaaactagactaatatgcacatgtgctttttcttgatctttaattgttcattactaatatacggactttgcatcaaatgtaaagcaatctcaacaacagtctcaatcaagaggaatgtctctgtgtcttataattttcctcaacagaaatttttaatgatactactttttaaaaagctctccttctggttttcttgggtaattttacgtggtatatttaaaaatctacttcatgagctgaagatacaggcactgtattcttttctttagctctctgcaccattctactttccaacatatataaactgtatatttacttcctatttctaaggttgttagcaatgctgttctgtaaccattatgaaatctctcatggttcctgttcagcttgatactaaaaattgaaagccagtaagcagtgtttatgctatatatgcaaatacttttcaacaaagggccagttgggatgctctgattacatacttttccaatttcttgacccctgtatctctctatgaaaggggtcaaatgcaagaggccaaatgaagattctttatttaattttatcgctgattgaaaccatacaacagttagtttgcttcaaacttgaccttcttgcacaatttgttaactctcaagtttttgatctttgttttttcttgctgggagaagaaatacaagccttaaaaaaaggaattctctgtctagagtcaatgttgttttctgtcattaaacttttaggattgcttttaatctcggtgttctcagatttcataatgatgtttgggtcttattaatcctgattggtacttagagaaatctggaaactacgcctccctttggccctgagacattttctcgcattgttttgatatgttttcccaaggttttctctggtctttcttaatgggactcctatcagtcagatgttgcgtcctctgatttgagcctctgcgtctcttctctgtccttcatatttttcatcttcctgtctttgtccttatgatctggaagattttgactctatcttctaatcctttcactaatatttttcagcaatcgaaattttgatttcttaccatttgagctgggaaactcactagtgggtatatatacaaaggaatagaaatcattctattatgaaaatacatacatgtgtatgttcattgcaccactgttcacaatagcaaagacatggaatcaacccaaatgcccatcaatgatagactggataaagaaaatgtggacacatacaccgtggaatactatgcagccgtaaaaaggaatgagatcatgtcctttgcagggacatggatagagctggaagccattatcctcagcaaactaatgcaagaacagaaaatgaaacaccgtatgttctcaattgtaagtgagagctgaacaatgaaaacacatggacacagggaggcgaacaacacacgctggggtctgtcagggtggggatggggggagttagaacatcaggaaaaatagctagtgcatgctgggcttaatacctaggtgatgggttgataggtgcagtaaaccaccatggcacacatttaccagtgtaagaaacctgcacatcctgctcatgtatcccagaactgaaaataatttttatttctaagagctcattcttgattcccttatttttttgacatgtgtgctgaagtacattaaaacactggtataaaacactagcacattgccaggaattgatctgttataaagatctacattgtaaattcaaaattcctatgggtatttgaagagacagctagaattaccctgcagtgtcataatttgaccacttaggaaaactatctcagttgctgattggctatctgatttgacttatacattacaaataatgagtaccgaccagcagcaagacacagagagatgaaaaacatgcagttgtggccctcaaggagtttacggtctagttgtaaaaaaaagacaacatcagaaaataagaataaaacatgtcaaattatgcaatatggagtcttacgccaaagaatatatgttgttgttgttgttagttgagacagactttttttacaatatcttttttccatattttggattttttatttatgaagagatatagagagtcaaattgttggatgaagactatttgctgtggagatatatgtctatattccttttagagtgccattcaccatcaagcacaagaccaaatttaccaaaatttaactcacaataagaaaaaataaaaccactgagtagcttatttgtaaaaagtagaatttcatcattttagtttggattatttaattatgattatgttgctttttatcattcattgctattgatataaaaatcataatatacttatgtgcaaaagatattgtttgttttctccttctgctcttcttcctttccctcttctccttctccaacttcttcagtctgattgtccaatactacaggtatataaatataacaagtccaacttgtgtctgaatattttctatacattttctgctcagttctatgaccacatgggattgtttcctggagtgtagttcgatgtatattatatatacatcattatatattgtctagaggcaaggtggtattggttttattatttaattaataaattaattaaggccacctgttcttagatggtaagaaatctaaatgtggcttttgttgggttaggacttgaattggaaagcagagtgcagttgtttatactattaaactttttttcctgagtgctaatttctatgacttgtttaaaggctatctggatgtggaacgggagaaccatgtattctttggattcttaacctggcgtcagagcaggccttaattgagttgactggtcacagcactacttctgttttgaaagctctctacaaaaatatacaaagtttaacaacttcattcaaagggaacaataattggccctacttactatatctgttttcatcctaaaattcttcttcaattttgaaatgtggctgtcagtatattttggctcaagaaaattcatgaagaaatattgtaccactgagaattatatcggtcagtttctcatcaatgaaaagttttatttcttgtgtgaactagtcctgaaaatgtaaatgtgtattacttgatatttagaataaagctatctgaatagtgtttccagggttagaaatgaggctgcagagtgagccgagatcgcgccactgcactccagcctgggcaaaaaagcgagactccatctcaaaaaaaaaaaaaaaaaaaaaaaagaaatgaggctgtagatagagtagtagcaggacaaagactccattgtggctgagtatttatagttggcctgttatgctataatatttatatttttatcatatttaaaatgtacacttttgggtttttttttgaggcagagtctcgctgtattgcctaggcccaagtgcagcggcatgatctcagctcactgcaacctccgtctcccgggcccaagctatcctcctacctcagggaagcaagtagatgggactacaggcatgcaccactactcccagataattttggggtttttttttgtagaggtggggttttgccatgttgcccaggctcctgggctgatgtgatccacctgcctcagtctcccaaaagtgctaggattacaggtgtgagccactgcgcctaaccttaaaatgtatacttaagagagaaaaataactttatctatttgatccagtaaaattaccctaagctttcaggtaattaatctttaaacactttgctgatgtcaaagcccaaggtgaaggtattttcttgaatattatggtattgcctctggtggttaagagtcgtttgttgcagacagtaagaggcacggagacaaatttaattttagttttactttttagaaaaagaaaaatagaagtatttgttcaggtacagtataaatgtagaatatatatatgtgtatatattcacacaaacatacacacatgaaatatttctttgtttaaagcaatcaatacaacgtaagactccaacactttgtgtaaacatgttcctgtactacatgaaagttcctatctcagtatttatagtatgatgttgataaattgcatgattttttttttctgattggtggtaataaatgacagtgatttatcacttaacttttcaggtgagttcaaacagttgcctaggctgataagcaactaaaatatttaacagaaaagcagacctttctgttttcccagaagcatatgtccagatattagcaataggatatgaagaaggggaaagaaaattgtaaaagggttgttctgagagcagtccgtacagtcagagctgcaataagagctcgttttcatgcccagctgtgtgtctgctctgtcagcagcgttagagtcttgatctttatcaggttactgctgctgatgtctacattttcatttaccttggctgccatttaataataataataataataataataataataatacgacaaatgattaaggcagagctaggagtggacccgagaacgcatgtctcgttatatgtctattacatctcctgtgacatctatgatggggcatagtcttaattttaccaagccagattcctattttttggttttctaagtttttctagcttttaataagtttttggaattatgaaaacgatgaaaactctgaagtctcatttctagaaattgttcattttcaaactgtgttctaaggagtgttaaggacacagttgcctctgatgccatggagaacaggggtcagagaaggggaagttaacatctctctgggttcctcaggaaaagaagactttatcaaagacttctatttatatattggagttcgataagatttcttatagaaaaaatagcttttgaataaagtttgaagaccaatggtctaagccatcataactgcggaaatgtctttcttcagtatccctgcttggacagtggttttgcccccattgtgcacaacacttttccaaaaagcctttcaacattaattatggctggagctgactgctttcctcagaccatcatgcttctcctaatacaataaatgtttctcttgctgggcaggtggatgattggattgatgaatggatgcatagggatgggcaggaaggaagggagagagggcatgcatttatctccatgtgtctgatcttctatgtccagacatttttttaaaattatttgattatatttcttatcacttagggtaggaaccatatcttgcctgcattttttctagctcatatgcggttagagaaacagtgaactgcctactcactctttcatgtattttgggggccagatatccttctaggtgctaaggatacagcagcaagcaaaacagacaaaaatgcctgttctggtggagtttagttggaggaaaaagagtaaacagagaagtgaattttatggtaggccagttactgatcagtgctacagagaaatacaaagcagcaaaggggaggaggcagctattttgtatacagcaatcactgatacttgcacaaggacctgaaggaggtgaaggaggggacctgggagccataaggagaaagactttgaagtacgtgcttgtttggcatattctaggaccagcaaggagaccccctggggcagggcaggaagcgccagaagctgattgctatgaggtctgactgtttttccttgttcactctaagctgggaagacagtcacgaagtttgagcagagcaaagacgtgatccgacttaaaagaaccactcttactttagtgttaaccatggaccaggcatcagaaacctttttatgtaaaggtccagatagtaaatattttaggctttacaggctatatgatctctttcacaactactcaactctgctattttagtacagaagcagccatagacaatatggaagtgaaaggctacggctgtgttccaataaaactttattttttataaaacaggtgtcaggctggatttggttcccatgccacagtttgccaaccactaaactagaccatttgccaagtggttttgaattgtggctatgagtgcgtaattattttgtctgtatcacttgtcagccaaaacacaccccaaacagtctaccatctattgataatttttatgtgtaatgccctatttacacaattcatctgttaccacctcaaagccgtagatgtaatttaataagttgatgcttttaaaagacttgtctattagaaagaaagttagccattcatagtttcttcatatcaaagttcccatatcactttgaggaatggaatatccaggacaaggactgtgttccctgtaatgattgttgtgagttctgcttactcttctctacttttttctctgactgggctagcccagtgcagtccaagagaaatgtaacatgggtctcaagtgcaaaccatatcaagaagtttaaaacttctaggagccacataaaaaatgcaaaaagaaacaagggaaattaattttaataatgtttcgtttaaaccaaaatatttcagtacgtcatcaatataaaattaccgagatattttacattccatatcttgtacgaagtctgaattctggtgtgtattttgcaatgtagactagtcacatgtcaaaccctcactccgtggccacatgtggctcttggcagagatctacaggattggagaaggctcagaatttggccttccctgatgaatggccttttgtaaaaacagtagcaacactaataacccagcaataatctttaagctaatttgtgaaactaatttactttttctttgaaagagattacaggtatggaccactttacaagcactgagattattattattgctgtcttccagttactcaacaatgatgaacagcaaagtatgatataaggaggacttctaatattcaatagagttttcttttcttgtctttgtttaagtttctttttttttttttttttttttttgagatggagtttcactctgccacccaggctggagtgcaatggtatgatcttggctcactgcaacctccacctcctgggttcaagcaattttcctgcctcagcttcccaaggagctgggattacaggtgcccaccatgcccggctaatttttttgtatttttagtagagacggggtttcaccatgttggccaagctgatctcaaacttgtgacctcaggtgatccacctgcctcggcctcccaaagtgctgggattataggcgtgagctaccgtgcctggcctaaatttctcatgtgcttactaggtaactggttacaaatataaaaattgcaaaatcagctcactagtgattctctcaccctcacccccagctcaataactggctctagagtcatttggcaagactttagaactgcacggattgcaccttctcccccttcagggagaatcttctgtgtgctctatcggttgttttcaatgtgaaacaggactcagaggtggtggccactgaaggcccaacctgcaaataaagcttagtaatattcattttgcacaatttaaatacatatgtgtacatttactaatctataactgatccccccaatacagaattatctggaatttgcataagaaactgtttatataaactgcaaaacacctatatgttaaatgatttttaatagaattgaaattctaagaaattaaattcttttttctattctttgagaaaggttcttgctctgtcacccaggttggagtgcagtggcacgatcatgtctcactgccacctagacttcctgggctcaggcaatcctcccgtcaaggctcacaagtagcccagactacaggcacatgccaccatgcccaaataatttttttaaaaattaattttttctgtggagacagggtctcataatgttacccaggctggtctggaactcctgggctcaagtgatcctcccacctcagcctcccaaaatgctgggactactggcatgagccaccatgcccagtctctacaaaaaaactttttaaaaaaattagccaggcgtggtggcatgtgcctgtaatcctagctacatgggaggctgaggtgggaggatagcttgagccttggaggtcgaggctgcagtgagccatgatcataccgctgtactccagcctgggtgacagagtgagaacctgtctccaaaaaaaaaaaaaaaaaaaaaaaaaaaggaaaaagaaattaaaatataagacaacatagagtttgagagttggcaaacagcagggcataaataaaataaataaaatgctacagagccatttgactaaaatttttgagaaacttgtagcactacagcagggctactccaacggcctgtaacagcagtaaaagcagcagcacctttcctcactttgccagacactgccgttttggctttatcacccggagggggtcccatgccattgtgggagtgtccagtggtgttcacggggaccctgacacagaaaactggccataggatctaatgaaggaggcgatgatcagagctgggaaaatttgagttaccacagtttctctaactacatctgattccaccacaggatcagtcatgggtatctttgaggtacacacatactcaaatcttgctcagttaattactttcaggcacaaccaggccattaaaatagtaattgagttataagttactattttataaatccctttctaagtctttgtagatttatagattcagtcttcattaaatttgaccataagccaagtaatttcaatttctttaagaagagagtttggcagatgttaaaatagaagggaaaacctgattttatggaatttcttgaaagagaacattttgaatccagtgaaaagggaaaaaaagtcagtattatttatagtcacatagtataacagcaacaagaagtaattcctctggctagacgtgacctcctctggctagggcacttttaaaaatgctttatgtagaacttatttaattcttacaatcatatgagataggtattgctcttttcctcattgtgcagtgaaagaaactgattccaaaaaggtttcataacttgcccaaggttatacagccagtaactggtaaagctgggatttgagcccaaacagcctgactctggagttcctccctttaatcaccacactaagtaaatatccatgtgcatgatgaatggataacctgaaaagcattttacagatcaagtcgtattaagcacctaatgggtttaaaacataatgcgatcccctagtgagtccttgtggcatcagtgggacattattagcttaaaattcagcagttttaaaaatgtagattttaaaaaatcagattcacctaaaacggagatcatttatagaaagaaaaaaacacaaaggtcttctgttgaactgttcagtaagtgtgtactgatacaataatatggcaggatattgggtttccaactcagagttgatagttcagaattaaattttggcctatgtcttgctttttagctttttaagccattctgacgctaccatagacatgcccatctggtagatgagaaattcaggtgtagaaagacttgcagaaatcttatgagatgctctttctttgttcctgttctctttctctgaaccagctcctaacttacatctttgtagtcccaccattaatcctacctttgaccttccgggctcaatttttacagttagtcttaccagtgtttcacacttagttttccctaagtaactcttgctgtctgggtaggacagcatgagtcctgtcccataagacccaacctgcatctgctttctcggacatgtttttttaaaagcaaatatgctagtggagtgtgttatttacaatgcctttttcttagagatttctctggaggtttatatgggctaatggctccccacccacttgactttttgcccattacattatatgtttcttccaaggaacaaaaatataactctctttctctgacagcatgagggacattctcttgctgttgctctccaggaaaaatctcataatctaactagacaaacccttgctgaaaaattagaccaaatggcatttgtaaactccaaggaaagcatttttcttctgtgaagtgttccctagctggaagtgttagaaactttacatatactgataccaattaggtttatggaaaaaatgaaaagctataaacagctggatacactgtcaaaactgaaccctgtcaacttaattttttccctagctctgtattctaagaacctggaaacaatctttattcacactgttaagacgattgagaaaaatggatggatagagtttatttgctaagagaaaaactgagtgactacctagctacctcactcctttttgctctattggtaagttcaaatgaaggaaatagcattagaaaacatatgttgggattatgtgcctttatcctctttctcacactgtattcatacataacagtcaatgcacagattgtccatatgcctgatatgattggtgtttattttatttttgactcatgatctaaacccattacacaatgaaatatttcatctcgagaaatacatatgatttgcctcttttggcttaccagggaaccataaagatctatgttgtttacttgttttcagcatcagataaaataaaaatgttacatcttttttgggtaattatgctgcaccaatgtgacttgctttatagggttcttttatttgttaattggcactccactatctaatttatttgaagaaacttctcatgccttgtatatgatgaagaactactagtgaagaaataagcatagcctgtaacttatttaacatacttgtaggttcttagtaaacacagttacataaatgttgaaacaaaaatgggctggagtgaaggagtcctgatctatggttgatattaaatgtaactaacttcactatctaatgtgccttcttctttttaagaatgagattggtggcatgtctaaagttggattttggttctaatacattaaaaaaataactttcttatcttgaaaaagcaactagtgaacagtagagatgcttgctcactttatgagtgccatgtattaagggagttttgaagtgatatttatctgtacaacttcaaatctaccatggcattctgtggtagagtaaaaactttagagctaaacatacctgatgtttatacatgacatatagctgcatgtccttgggtaagttatttaatttctctcaaccctaaattttgactgtttaaagtaggttttataggttttatgtaatttgaagtgttgttgtaaataataacgataataaaatatcttacacagttcttggtttgcaagattgttaaaaggtacttgtggcctaattggtttcactagtaaattctagcaaacatttaaggaagaaacaacactaatatgcaaagtctttcagaaaatagaggaggtaagaacatgtcattttatgtagccatcataaacttgattaaaaaaataagttttaaaaatagatatcttaagaaaatatgaaatggaatgtagcaatgcataaaattgggatttatccctggaatgcaaatggaatgcaaatctttaaatgcttaaagattaacctgtgtaattcaccagaaccacacaatagaggagacaaaatataggatagtttaaataatatagaaaaattatttgacaaaagggaacatctatttataataaaaacttgaagcaaaggtgcaatggtaaggaatttcaatctgttaagtgaatatatggaaaatctacaactaacattacacttaatagggaaatactggatgttttctccctaagatttataactagacaaggatgcccactctcagctcttttaattatcattgtgttggaggtcatagctagcgcaataggagaagaaaatgaaataaaagaaatatagatcgaaaaagaagcaataaaactgtctgcttgccgatgatatggttgattgcacagtatgtcctaatgactctacaaaacacctatgaggaatactaaatgaatttggcaagaatgcaggatatattgttgatatgcaaattcaaatgtatttttagatgctagtacaaagaagtggaaaaataatttttaaacttccacttacaatgtcacgatgaaacacaaaatacttaggaatacctttaacaaaatgcatgcaaagatgtgagggtgacctggctgtgacatctgtcaccccattgatcaccaaggttgatttggctgatctggatggccaggcgggtgtcccctacctcccttactgcttcgtgtgtatccttcctgaagctgcatgcttggtcgaagaggacaaccacccctgatatagaggaggaactatcttcagtgaagagtatatgagtagctgtgctcccctgctagaacctccaaacaagctctcaaaatgcatgcaaaacctctacgccaagcactataacacattgctgaaactaatgaaagacaagctaaatatctagaaagagatgccatgcttattgattagaaatttctcaataatgttgagatgtctgttgtttccagattgatctataaagtcagtgtaatcccttataaagcccaccaggctgttttatttattctgcaagaagacatcctaattctaaaaatttattttaaatgagctagagctaggatatcttcagcaaccttgaaaaagaagaacagtgttgaaggaattatactatctggcttcataacttactacaaaactacagcaatcaaaactttgtgaccccttcataaggagacaagcagatcaatggaacaggattgagagcctggcaatagacccacacttacacaatggactgatttccaatatatgtgccaaagcagcccaatagagagaggaaaatatttgtagaaaatggtgctggaataactgaagcatcaacccctacctcacaccattcacaaaaactattttgagatggttcacaaacctaaaaataaaagccaaaattataatgcatctgaaagaaaacataggagaatatctttgcaatgtagtgggtaggtgaaagtgtcttaggtcacagaaagtgataaaaattgataaactaggtcaggcacaatggctcatgcctgtaatcgcagcactttgggaggcctaggcaggtggatctctttagccctggagttcaagaccagcctgagcaacatgactgaaacccacatctctaccaaaaatacaaaaaattagctgggcgtggtggtgtatacctgtagtcccagctactcaggaggctgaggtgggaggatcacttgagcccatgagattgaggctgcagcgagccgtgatcatatcactgcactctagcctgggtgatagaatgatagctgtcaaaaaaaaaaaaaaaaaaaaccaaaacctaataaactagacttaaagttgaacttgagctaatcagaaggcattgttaagaaatttacagaatatacatatatgacaaagggttagtatccagaatatatagcactctaaatctcaataacaaaaagacaattcaataaaaaagaggccaaagactgtcaagtactttgcaaaggaagataaacaaaaaatgctcaatattattaattatcaagggaatgcaaattaaaccaagatgagagacatccactagaatggctaaatttaaaaagaccagcagcaaatattggtcaggatgtggagcaactggaacttttaaatttttagtgagtgtgtacaattgtgcagccactatggataaaagcctggaaatttcttataaagctaaatataaacctactctggaacctacaattttacttctagatattttccaaagagaaataaaaaaatacatctacaaaagtcttataggagtatttacaacagctttatttaaactagccaaaagtgagagtggatgaactatgggattcctaagtggaatacttgccagctatgccaaagaacaaactacacattcatgcaacaacatagatgaatcccccaaacttttatgctgcataaaaacccttatacaaacaaatacctactgtatgtttccatttctatgaagttcttgaacaggtaaaaccaatttatgatgaaaatatatcagaacagaagggattgcagcagggatttaccaggaaggggcatgaaattttggagttgatagtaatgttcagtatcttgatggaggtacttgttatacaggtgtatgtatttgctagagcttattgagtggtatacattttctgtatttcacagtatgtaaattttgcatataaaatactgtaaagcattgcagcatttaggggtaaagtgtactgatggttgcaactgacttcgaaatggatcagaaagtaaaatagattgattaagagagggatgggaagatgcataggtatatataaccaaacatcaatgacagaatttaggtggagggaaaaatgggcttacattgcataattatttcaacttttctgtgtgtgtgaaaatttttataataaaatattgtgataagcaattatttttatgttctaacctttaagggtagaaatgatcttgcttacaggtgaagaaggcattgaaattcaatccctcaaaatccaaagttgtcaaataacagagctagtattaaacttcattgtaggctctaatcctacaatccatatccttgctgtgttgatgcacaaatttctaaatctaaacacccagcgacctttggttaaaataggaagtgaacatgaaacctcagctttgctttgaaccccagtgacgactctccagtttcttaatcaactgacctttccttaaacaaaaattattctcgagggaagaaatgctagtagtcaggttgttgagcacacatttactaaatacccataaaaggagataaatactgagatgaaataaattataagtcaatttctgaaagaattatttttcttcctaagctcaggtgctgagaattctagatgcaaaaataaaaggccaagtgtcttagaatgatatgctcatgcctatgtctatttttttcttcgcctttcaaagcagaaattcatcaaagtcgtgcagatgataagtgcgtattctgttcctaagatcactacagggcaggcttagagcagtgtgtggcagtggaaagagtttggggctggctgtgtgagaccgggcctctcattgcaggtcctgtgactttgtacgactcctttaacctctgtcagcatcattcttcaatcctgctttccttattagtgtgaggataaaaataaagcaaatttcgaagttgaaagagagctaaaagataatcaagcccaacctcctcattttatcagtgagaaaatgaacctcgctcaaggcaactgagcccgatagaagcaaaaagtgtttacctgatttagaggttagtttaactgcttcatcaaaatgatctctagtcaatagctatggaaatacttcaaggatataggtactataggaatgcaaagtgttgatatttctttattagattgtgtaaatattgtatgcacatttttacttagaaagtatgtcttttgaattatgcatattaagattttatattgaatctgtaactgtataatcacgtatatataacaatctatgtgtagggacatggtcctttttgtaaaattcatcacttttttaaatactctgaccacttgacaatatgcttgacctttttacagattattctttagtgtaatattcaatatatataataaattacaagagtcagtatttcaattgtagatatttcactgggacccggttgaggaaaagtatataaaacacattacacagcattgcattttgaaataataaaacttttgcaacactgtaactaaatataatgacatcttgtcaaatatagtattttctttttatctttaaaaagccaaaagccattttgaggcaaaacaggctaaatgagatttctttaaaccaaatgtgcattggcagctttttaaattttgggttgtgtttgtgttttgtcaactttatattacatatatatttttaaacaactttattgaggtataattgaagtacaatattctgtacatatttaaatacaattttatcagttttgacatgtttacacactggtgaaaccatcaccacaatcaagataaagaacatttctgttatcctcaaaacattcctcagagcccctttgccatcttctctccttccaaccccgtccccaggaaaccactgacttgtcttttctcactataaattagtttgcatctctagagttttatataaatagaatcataagcatacacagttttttggcctggcttcttcactgagtatatttttgcaattcatctgtgtcattgtgtgtatgaaaattttgttcttttttctttcccttcgctcagtaggcattatgtggataacgatgccatcctttgcttatccattcacccatttgttggacacttgcattgtttccacttaatggctattacaaataaagctgccatgatcatttgtatacaaatccttgtgtggaaatatcttttcctttcttttgggtaaatatctaggcctggaataattggattatatggtatgcttaattatttatgatgctgccaacgtgttttccaaaatgattataccatgttacattcccaccagcagtgaataagagttctggttgcccaaagtcattgtcggtgtttggtatggtcagtctttttaaccaatctgcataaccaatctaatggatatgcagtatcacttaatattttatttgctttcctataggcacgaatgatgcctgtatgttttatgcacttttgtccatttgcttatcttttgcgaagtgtccgttcaaatattttgtccatttttctaaacacttcagttgtgtcttattatttaactgcaaaagttctttataataattttgaatacaagtccttcatctgatatttgtttggagaaaattttcttccacaatatagcttgccttttcattttttcgtgattttttaagaacaaaagttttagattttgatgaagtctgatttatcagttttagcttgtaagttttgtattttttgtgtgttttatttaataaaactttgcctatcataaggttacagctgttttctctaatgttttcttttagaagttttatagttttaggctgtacatttaggtctatgattatttttactcaaattttgtttcgagtgcgaggtaaggatcgttgtacttgtttttttcagttttgatttccagttgacccagcatcatttgttgaaatgactttcttttctctgttgaattttcttgacaccgctgtcaaaattcaagttatcatatatgcatgggtctctttctaaacattctattttgttccatagatctatgtctctatttttttttttgccaataatccacattcttgattactatagctttattgtatatcttgaaggttaagtgaattctctaccttttcactgtctagatcctttgcatttccatatcagttttagaaacaagttgtcaatttctaaaagaaaaaaagaagaaaatcttggtatattttgtttggaattacattgaatctataggtcagtttttggagaattgcccttcatgaacatgccatttatttatatattctctaatttattatagcaattttttgtagtttttaggcgagaggtattgggtatatttacttagatttattactaggtattcttctcttctctctgcccaactactgtaataggaatttgaaagaaaatcattttcattttttttgctatgaatacataattacaggatactttttatattaacatttatcctgcacatggcttaattctttcatgctttatgtaagttttggggagttccttgctattttctgtacaaacaatatatgatatgacaatattgacagatctgtttcttcctttttggttattatctgtttgtttcttcttttgttgggatcaatcataccccaaacctcagcatcacgcaatataccagtgtaacaaacctgcacgtgattatatggtttcctcctttactaggttactgttttaaatgacattgatttctgcatgtttaaccaactttgcatttctaggaaaagcctacttttgttatgatgtatttttttatatacagccgtgtcatttaatgacagggttacgttctgagaagtgtgtcatgagtcaattttgtcatcgtgcaaacatcatagagtgtactttcacaaacctggatagtagagcttaccaggctacatggcagggcctattgctcccaggctacaaacctgtacagcatggtactgtactgaatactgtgagggaattgtaacacaattgtatttgtgtatttaaacatgtctaaacatataaaaaaggtaatgtgttgagctaggacattctgacagctacaatgtcacgtcactgacaggctaccatgtcactaggcaacaggaatttttcagctctgttatagttttatgggactattgtcatatatgtggtttattgttgactgaaacatcattatgcagcacatgactgtatatagggaattatatttgataacattttgtatctttacatctatatgaagtacattggaattttttaaaaataatatttttgtttcatttttatgttagtcttatgctggccttacaaaaccaagttgggcagtgataccaacttctttatcttctgaaaatatttatgttagataagtgttatttattccttgaaactttgccagaatttactactgaaagcattttaccctggagttttcttttaggaaagatattggataatttaattatatataattatacattattaattgtctgcatataattaattatatatagttgtatatagtatgtattatatatatttgggcttatgggttgctgaattaaatatatatttgttattaaatacatatattgtaactttgtttttcttgtgtcaattttggttagtgtattttttaagaaaattgtcaattttatgtaattgttgcatattttgctgtaatattgtattgttaccccctttaaagtctattggttctgtgtcattcctgacattagtgatttgtgtcctttctctctttttcttatacattccagctaggactttttaaattttattgattcttttttcaagaaactagatggcatagtctagtatacacctagggtatatggtagatcctattgctcctatgttacaaacctgtacagtacgttactatgctgaatactgtaggcaattataacatatgccctaggtgtatagtagactatgccatcaagaaactagctattagatttttgtctatctgttttatctttcattgatttttgttttttgctattttcttccttctacattgagtctttagaccatggttgaatttaagtccaagattaaattacatattttctgtaattttttttatttacagaaataaaatttttttcttctatttctattttttctatttctttctatttctatttttttatcttcattagtcttttattcctgccatgttttagtttatttgaatatcttttcaaattccatttttatttatctaatgtattttggctaaatctctttttgtgtgtgtgttttctgtagaaattttattatacataccagccctttcagagtttatttagagttaatattatgccatttcacataaaaagtagaaaaattttggggctgggtgcagtggctcacacctgtaatcacagcactttgggaggccaagacaggaggatcacttgagcccagaagtttgagaccagcttgggcaacacacaaaaccttgcctacaaaaataaaaaagaataatttaaaaacagtagacaaattgcaataatataaatgatcctccactgacccttatgttgtaatttttgtatgtattgtacatatatacataaaaaaatcccaacagataataaaatactgtttgtttcaactagttatatgtattttaaagaacttcaaaaggaaaaataatcttttgtatttacccagaaatttaccatttctgttgctatttcttcattcctaaagatccacggtcctctctagtattattttcattcagtgtggagaacttgcattagcaatcttatattcagctctcctagtgatgaattatcttacttttcctttatctaaaaatgcgtttattttgcttgcatttctgaagaacgttttcactaggtatagagtttggggttgacaattcttttctttcagcctgtaaagaagttgtctgccatcaggcctccatgatttctgatgagaaatcttcagtatttccacccattcctgtctgtgtaatgaggcatatatttctagctgttttcaattattttttctttatatttggttttcaccagtttaactgtgatgtgtttaggtgtgattttctttgggcttgtgtattgctgagcttcttgaatctgtacatttatggatttgattaaatgtggaaagctttccagcattgtatcttcaaacaattttccttctcaatctctcctgtccttctggtactccaaccacattatttttgatcttcggaaattttcctacaggtccctgaggttctattcacttattctttattctccactttcattctctgttcttcatattagattatttctatcgagctatttccaagtgttaaattgagtttagcctaaagcagcctccttacaaattttaagttcagcctaaaggtttctctgtaaatcgtgaactaaatggagttgtatacagactgcagtctactcttgtgccaatcactgaatgttggccagtccaaggtggccaactgtccaaaccatgttcacataaggcaaatgccaagctataaacaatccagctgcttctgaacctcacttctgttttctgtaggtcactttccttcttcctatacataaatcttcttccagtgcatggctatgctggagtctctgagccttctttggctcaggaggctgcccaatttgcaaatcgttctttgctcaattaagctctgttaaacttaattcggctaaagtgtttcttttaacacacatttgctgattcttttctgcattgtttttacactgctttcaagttcacctagcgttttagtccgttttcatactgctgataaagacatactcgcgactgggtaatttgtaaagaaaaagaggtttaatggactcagagtttcatgcgactgaggaggccacacgatcatggtagaaggcgaaaagcacgtcttacatgacagcaaggaagagacagaatgagagccaagcaaaaggggtttctccttataacaccatcagatcttgtgagacttattcactaccatgagaacagtatgggggagaccacccccacgattcaattttctcccactgcgtccctgccacaacatgtgggaatcatgggagctacaattcaagatgagatttgggtggcgacacagccaaaccgtatcacctagtgagtttttcattttaaatgcagtaacgtgctgcattacaatgttttggtcaacaacagaatgtatatatgacactggtctcaagattataatggagctgaaaagtttctattacctagtgatggcatagccattgtaatgtcatagcacaatacattaccttttctatgtttagacacacaaatacatagcattgtgttataattgcctacagtattcagcatagtaacatactgtacaggtttgtaacataggagcaataggatctaccatataccctaggtgtattgtagactatgccatctgggtttgtgtaagtatgatgttcccacaatgatgaaattgtcgaatgacacatttttcagaatgtatccccatcaagtgacacgtgactgtactgtatatttcacttcccagcaatttaatttttttattgtttattctctattgagaatttttgttttcattcatttgaagagtgttcttacttataaagcatagtcgtaagagctgcttaaactttcttaaactagctagatcatcaggtaacttgagaggtttttggtttttttgtcatgagaattggtctttttttggtctactgagtaattttggatggtatggatattgtgaatctctgttgaatacagtctgttagaacattcctaatatacttattttagcaagcaatcaggccacttaaattcagactgtaagttgtgtgtcatcttctatgagaggtagttcaaatctcagttgagtttttaaattcttggctttatcgggtttgtgtccctcctatgcatttgcaattcaggggttagaataagacttgtgcagacagctcaaatctctgtttggcttccaaagcatttgtgatctttatttgggactgtctcatgtgtgcttatttcaggaattatgctgatagttttgtgaggttcattcacaaattaaaggattcccttcgctttctgttttatctgtgggattctccttaaactctcaggcttgcaggagtctttctttttggtttcttttgccagagaaacaggatttatctcagagtttatctgcttctgcagctgccatttcctcaccattttgcaactgaggtctacccttgagatcatattgcacaagaaagaagcaacatggaaaactcaccactgtgcagttcactttttcaacttttgcctctcttctatgcttgcttttgagaggtggttgttttcttaaatgtattttattcagtttttagttgtgattagaatgaggaatgggctgccatgattgaactagaatgtttattaattttttttgccagaaaaaatactgattatatgtcaaggtatagaacctgtcttttaaaattaaccaaaccaagccgggcacagtggctcatgccttttgagaggcccaggtgggaggattgcttgatccccggagtttgagaccagcctgagcaatatagtgagaccctgtctccacaaaaaaaaatttttaatttaaaaattagctggatgtggtggcttgcacctgtaagttccagctactccagagggtagtagttgagcatggtaatatggtagtactgagatgggaggatcactggaggtcaaggcttcagtgaaccatgatcgtgccattgtactctaacctgggtgacagaacaagaccctgtctcaaaaaaaaaaaaaaaaaaattaaccaaaccattgtgatagatgaagttctgtcttcatgagtcagttgtgtagaaaagagcaaaagtgattgttaaattgtgactattacacacacatgcacacacacacaatttaataaaatagctgcttgtgatactttagatttcacattccacctattctgtgtacttagtattattgtcagtgagtaaaagacaacactgtgttttccttctccactgggttattaaagataaaaccaattgtatatttgaagtgcttggtgctatcagaatcaagatgtatgtaaattaaagtggtattatttttctaatgcataactaattcttagatattgttaaatctctttacgactgattctttgagatgatttacatataaggcttagttaaaaatcaagtttaaaattaacattggtgacagtgtttcttgttgtcaagttcaaatagtaggtcagtgacaacttccttatgaagtcgagtttacatagtgatacaatataaaaatcaaaggataaattactgtgtttgatgcacattttggatgtagtatcgttttcttttcttttttccctcagaataatcaagggctaatgtgaatcctgtattatgtatttctacttttttgatggtgattagtgacttttaaggaaatgaaagaatgagggcagcaaggccattttatgtagcattgaagttaaattgttctttaaaaaaataaaggatgtatgggcatatgataaaccataagattttccatatgcttatgatacccttctgaccctgaattggatcaaattatttaaatatggctcagataagaagcacattgcagttcagatgaaagagtatcctaatggacactttccaaacatttattattcttgtttgccttttgaaattgtgggcatagaaatagcaagtctctgaatttatgttattatttgtgaaatgatgaactatttagacattttgttatatgattatgagaatttaaaaaatacttatctgattaatctctaatttattgtatcacatgacctcagtattttacagttttcaaagttgagatataattggcactcggtaaaatgcacagatcttaaatgtaaaattcaatgaattttcacataaagtctatacagtttttacatatattacccagatcaagatataaaacatttctgtcattcctgaaatttttattgtacccttttcctttcaatagctcccaccctgcaactagagtcagtcacacctttgtcagcatagattagttacctgctcttcaggtgcatatatatatatagcagcatacagtgtgcactcttttgcataatgttttcaagattcatgcatgtgttgtgttttcatccatgtgttgtgtgttatttcatttatatatttggggaatattcagttgtatcaatattccccagtttcattgttcatttttctcttgctggacttttgactcacctccatttttgagctatcatgagtaaagccacttaggacattctgtatgtctttttgtgagacagttctcattttttacattagataataaatttattatgaattcatatgtaaatttgcctagttggatttctgtttcatgtcaacttttagaatataatttgctatgaaaagtggttccaaaaggtgaaagttacactaaaaaattctaacattatttgaaagattattcttccttttttaaaacatggattatccatatttgattctcctgtgtaaactgcaaggaaaattaaactttataaatctgtaaaaagcatatgaaaattaaaacactacacacatggcattcttactttttccaaacaactgatgtgaccatttctcccttcaagggccagccacatggctccatatcctttctccaccatgctattttactatattatggtaagcagtgtattcacccatctccccatgagactgtaagctccctggagacaaagaccatctgtgtcttttctttttatccctagcttctagtgctttgcctggtacatggtaggtacacattctatgttgaatgaactgaacaactgccttttgtctagggtatatatttgctttgcaaaagttgcttttgctatggaaacacaacatacacttagctttagctcaagaatttactattccctttatgtcttaaggcttttgtttaatacatgagctgacttatcctagtttcctgtttatgtaaagtatgcttctgatgaaaatatacactactagaaacttataaagggttgctgttttattagtttaataacattgttaaaatttactgatgtgtcattgagaaaaaacaacttcaagtgaggacaacacacacacacacacacacatctttaactgatttttttcttcgagagtatattgtacttagcacactatatacttagtgcatggaatataaacatcactttgcttatttttattgttggcaaaagatacaatatctgttttacacaattaaaagaccttgaaattatgcatgatttttattactactgggatttccatgttggatcaaaggtcatcattccaatcgtctcaggctccctttttttcttctaattgatcattgcagtgcccatctgtctgtggctcacggtataaccttttttgataggggcagggtggcagatggacagcagatgggagttttgccctgcctcgtggttcagatcttggcccaggcacgaactgtcagagactgtcagtttgtcgtctcggcttgtgggctccagtgctgtgtttggcacctcagccatgggtctgaattgatgccaagctggaccagctatttgtcattgtgactagttaatgaccaacattaagggtgggagcacctagtgagtgtgtaagataacctagtagaattgtgctttctactgtgagctggatccccaggacccgagagtcagctcattctcgggatagaagttacagaattagaaacatgtaggtgtcttataggtatttacccactttaaaaagaacacaatttccccaaagatttcctttctatacaaaaccacatgaggacatgagtgaaaagtagaggtagatagacagtggcttgtgtttttgtctaattgttggacagttgtcatcttctggaattcctaggggtgctgcatgattgaaactttgactattgataacattttgaatgcaataactgtgactgcttctgccatcacattaaaagacagttcctaagattgctagtcttttcaaaaggaaagaagaaagcctttaaaaaaatttattctgaactatcagcacactcttttttttttttaatgtgtgcatgaatttactgctttacaagtgactcttttcatttcaatagaaaccatattgaagtagacagacgaggctgggtgaagtctcctaatggagggtaaaccttggcagtgaccgtgaataaaaggcaataatgagtcagagtggatgctgagttctgtgcttttccttatttatttaatttctttagacttagagctccacggagatcatatcgtgccattctttagctgagctgaatcccaattttgatgaatgacacgagagtttatataatgaacatgtgcccacagatctctaaataaatgtccacaataagtatggaaaactgtcccactgtctctaccagggccatcagtaacttctcacccagttgtggagatctttagaatactccatttctttcctgtcctctgaactaaatcaaaatattatgtcctgatggttaatagtatctctgttcatacaataggtacatgatgacattattagacagtttattaatatgaattgtccacatttgaatattttcttgtattctgggagtcagaggttgctcctacatatttgtaatgaattatgctgctccaaattatatgaacaacattggattgttatgctcaaataaattatgttttcattcactccagatattctctcagtttgatttagatatctgcagtgttgaccaccacaaggcactttaaaatctacattataacagatggctagacaatcgtttacttaaaccttgagtaacccccgtattataaaataaatatacattttattccatattccatcagatattcttttatctcttcaattttcttctttcataattgaatatatttaaaaattgtaaaactgtgcttatatcctcaggtaagatagtgtgtgtatgcatttgtctgcttatctttgtaattattgttcaatttatatatctgacaggtgaccaaggtgcttgtattttggaatcttggcattgtatctgtggcttccttgagaccaactcatttattctttccttttaaaggaatcttgaaatagaaaaaaaaaaatcttattacagtgctactcaggatggcctaaaggactgtgttataccccggctagctattaatgtactttaacttggatcttgctaacatgatttcaggtgaggtgtggacaggatctaattagttataaatctgtaaatgcttgaacagaggctagcttgatattctccatctgactgatgctgctgtaatactctaatcccagaaagctgtctaaaatgaatttccattagccatggagttaagggaaagtcatgaacttgaggaaattaagcaatgtctgtgacttagccagttagatagaagctttgctttgccagtacgctatctgcttccccctagtcttgttcttgctttgggatggcagttcttaaattacaaccaccatgagctgttctacagaaatgtttaagctatctaacaccgaacgtcttctataaatagctaatttcttgtgtttaatcatcctttaggttatatagtacttatggattacaaagtgtttcactcctgctttgtctgattttttaaaccccccattaggcaagcaaagaagaaacctacataaccaagaaaacaaatcaaagttcagcatccagctatattaattattgccttttattcatagtcattgctattggatatagaacggcaaacaagaaaaaaagtcttcaccttcaagaagcttacattctgataaggccggcagtaaatagaaaagcaaatactagaacatcagatctaaagaagtgctatgacaaagactaaggctaacgtgtcagaaaatgagggagagggaggtgaaattttatgtagggtggtcatagagagcccatctctaattgtgtgtgtgtgtgtgtgtatttacagattgacaggttgtgaatcgcacaaatcttaagcacgcacacacacacacattgatataacctgtacctccgtcaatatatagaacattttttcttttctttctttctttttttttttttttgagacagggtctcactctgtcacccaggctggtatgcagttacataatcgtggctcactgtagcctcgacctctcacctcagcctcctgagtgccaccacagctggctaatttttgtattttttttgtggagacagggtctccccatgttgtctaggctggtcttaaactgggctcaatcgatcctcctgccttagcctcccacagtgttgggattacaggcgtgcaccactgtgcccagcctatgtagaacatttctataaaatataaagattataaaatataaaggttataaaatataaagcttgctcctgcacttttctcccccattgcccccaaggggcacactgttctgattctttcttcatagatgacttttgcctgttctggaatcacacaatatgcactctgttgtggatggattcttttgctcctcttaagatttttggtgtgtacctatgttattgctccattgggatcgtttctttttattgtgttctgttgtctggatataccacaatttgtttatccattcacctgctgaagaacatttggatgttttcggtgtttgtccattgtaaataaagttgttaggaacctttttataccacattttttatgcgtatgtacttacatttctttggggtaaataccaaagggtagatggttaactttaaaagaaagttccatactggttactaaagaggttgtaccattttacgctcccaccagcaatgtaggagagttctgttttttcatatcctctttgacatttggcatcatcagtctgttaaattttagccatgtgagtgggcgtagggtgatttctcatgtggttttgatttgcatttccataatgactaatgatggtgaacattatttcatgtgctttttggttattcatatatatttctttgtgaagtgcctattcaggtcttttgcccatattataaattgcattgtctttttattattgagttgtaggagttagaagtcctttgtcagatatatatattgtgaatattttctcctagttggtagcattaaccacttattttccttatggtgtcttttcttttcttttttctttttgagacagagtctcaccctgtcacccaggctggagtgcaatggcgtgatcttggctcactgcaacctctgcctcccaggctgaagcaattctcccacctcagcctcctgagtagctgggattacaggcatgcgccaccatgcctggctaatttttgtgtttttagtagagacagggtttcaccacgttggccagactgctgttgaactcctgacctcaagtgattcgcccttctcggcctcccaaagtgctgggattacaggcatgagccactgcgcctggcctccttatggtgtctttcaaagatcaaacattttaattttgatgaaatccatttgtatattttttctgttattttaaatgttttcttatgctaagatgttcgtctttcccaagatcgtaaagatactcttctatgttttccttcagaaggcttatagtcttatgtttatgttaagatctataatctaggatacagttttgtatatgatctgagatatggggtatttccccaaataaatagccagttgtttcagtataactggttgaaaagagattttcctttatctattgaagtactttggggccttggttgaaaaatcaagatttggggcatccaattaggatgtagaaagctgaaaaaagaatatttccacccttacaaaacaacaaaatagcagaaaatttgcaaatacatgctgttcttgaacctatgagagagccgaggtctcagggaaaccagctacaacttaaaattcaaggagggacaagtgtctctcaggagagatgaggggctagcccttgcatacctggagcagatgcctaggatactggtaagaagaattccactaaaatgtttaacaagttgataaaggccaatattaagctagttagagcaactaaaacccctggggactgcagacacagggagatttgcactccttggcaggttcttcttcactgatgtgcaggatatgcataaaaaggatagggcaagagtccaaaaaaaaaatttccctcatgcagacctgagagggtgttcaggggagggcatgaagacccacctgtatcgctttcccctctctctcctacggaacaaaagccttaaacttcatggggaagagcaacaaaccctgttgtccttagggaactggggaaaacttactgcagctgaagggaggtacagaaaaatctctcttcccctgggatgaggcaggaatacatcttaggcccagacctatagatgggggaggagcaggaaccaaaggatagccctaccttcaagacccaggactcactgtctgcccagttaatcattgcaacagagaacgtctcccatccccatcacctggccgacaagtgacaagtggctataccaggatgatccccaggttgcaaatggaaaactaagaacagggaattaaatgggttgcccaaagtctcacagccggtaaatggaaaaacagatttgaacccagatagtctggtgccaaagtccccataaccaccatgcagtattgcagaggcaagagaatggggacttggagggaatgaggcaaatcagaagagtgactctcctggaacggacagaagtggccaacagagcatgtggttttaggaaagaggatgcaattgacaagaccaaatttaacagagctgttgaaacaggtgagaaatgaaaagtgtccattggatttagcaatgtagaagattttgtttaacttttaacagtaagccgttttactataattgtgaagattcaaaccagaattcactggattcagaaatgaatatagagtgatgaagatgagttagtaaaaatagcccactttcaccaaaagtttggagaggacgaggagttggagcacaggtatggagtgacatgcaaagaggagtggtttttaaagataaaagtgggccgggtgtggtagctcactcctgtaatcccagcactttgggaggccgaggtgagtggatcacctgaggtcaggagttcaagactagcctggccaacatggtgaaaccccatctctactaaaaatgcaaaaattagctgggtgtggtgatgtgcctgtagtcccagctacttgggagactgaggtaggagaattgcttgaacctgggaggcagaggttgcagtgagtcaagatcataccactgcactccagcctcggcaacagagcaagaccccatctcaaaaaaaaaaaaaaaaaaaaaaagatagaagcgatttgggcttgcttacgagacagggtgacaaagccagtaggatgagaaggtttgtcctcacaagaaagaagagtaaacagagtacaacgtagttggtaatagtttataaaataggcataaagaggtttgttgatttatctggggtatgttttgtggcagttttctgagtgtacaaacacccttacttttttttagcttcttgtagtattattttaagtgatatataatttgctcaatttcagtatattccttatgtgagctaagtttttatccaaacttaaatacatatgtgaatttcacatacctcttgtgtaaattttttttgagtaggaaaaagttgtttcatctttgctgctgtgtgttgatatgcattctgtcagaatacagctttttggtaatgctgcaataaactgtcactctaatgtaatagatacatgtaatagatacaataactcaatcattccatattacttgacataataaaaaaaatggcttgaaaaacacagcctaaagaacaaggttgaaactctagttagcacaggtgttaggctttctactgttgtagtcaatactttcggagctgatacctttggaggcaaggactgtgaaaacgttcatgtctttatcaccattgcctagaatggtggatgcctgaaaatgtcagaggtatgggaaaagaggatacatttatttaggtttattatcaatattttaaagcatatggctattttaaatgatttaatcccgtgtttgacaaatagtagaacctccagaagccctggaatttcaactacctccatgaagtttcagctgactttagagatttagtttaatggccaattactgtgggcaacctaaaaggcgttgcacctggcagaagcactggacacatcctttccttatgcttctaaaccttgagatgatatcatcaggtccagttccatagtatccatcttattctcaatattcactctctccactgatacaagtgtagcacatctgttaattttttaaaatgcattagtttttacttcaaacatgagatggttttgtttacaccagtatctcaactattaacacgtattaaggaaaaaattaaaagtttacctttggaaattgaattgacattgggaactttaggttaactatcacagtgggtcacaggaaagaatctggccaaatttgtcaaccatatttggcctagttttctgcatatgtttgccaggtgcaacagccagcttattgctggagggcacaaaaatctggaggaaaggcttggcacttgtgctgtttaacccattgaggggtcttatttttgctgagattttgcctacagagatctgattatacaatagcgtatgaatgggaaagtgaggcttctctttgccttccgtaaacgagagatttatagaatgcacctgtcaagcatttttgggaacacagtcgcaaaaaaaaaaagaagattaaaaatgttatctgtattgggaagaatacagttctaggtgtgaatggtcaggcaaatgggccaattaacaaacatgtactctttattagggggctctcaatttcccggaaagttatcacttaaaatgggaagcatgaatatatatatatttttataaagttagcctgatatgtaaaagaatttcagaatttttgacaaatcgtataattagaggttatatatttatagctgattcaaatcccaaaatgaatagagatgtcaaagccttgagcatattgaacgtttacacatgaataagcaagatggcagaaactgttttcaagcagacctatttttttgcctttgtatgtttttggtggttcttcaacttgcaatttccatataatattttttcatgtttacattagcatgtaattagcatacatataattccatagtgggatatgtaaatgctccccactccccaaataggtcaaatggctgtgaatttttattttgtttaatactatacttctagactatttgttatttagacagtaattgtattttctttctttttaattattagtttgagtcatgtggcagcttattaagtcccatttttaagtcaaagacattaatgtttcaggacaggtgtttgagtttcagaatttggaggaatagaattgaacacatttatattacttttccctttcaccacacttagtatttgaagactacagtcactctttaactatcaaatttttttccattattttcataaaaccttcatacaaccaggcacctaaatactatctcaaagtcataacttacttctggaggtagtctctctgtaactcttctcagatcactgggaaatatctgggaaatgtttgaggaaaatattttaatgaagtttaccaaatttatttttaatgctctgtgtgtgtatatacgtgttgagtgaaaaagagacacacactatagagaatgtatttcaatgattaaaacacgcagagaataaaccagttgaagtatcatttatttggacatcttatctttcacctaatacagatgtatgaggattatgagtaaagttatacatctttatatatatgtgtgtatatatatgtatgtatgtatatatatgtatatttatatatgtaagtatatgcatatatatttatatccaaagacctctgacacaggtgcgtgcatgtatacacacacacacacacacacacacacacacacacacacacacgcctttgcatttctttttctttttttttttgagatggattctcactcggtcgcccagtctggagtgcagtggtgcaatctcagctcactgcaacctccacctcctgggttcaagtgattctcttgcctcagcggactacaggcgcctgccaccatgcctggataatttttgtatttttagtagagaagaggtttcaccacgttcgccaggctggtctctaactcctgacctcaagtgatctgcccgccgtggcctcccaaagtgctgagattacaggcgtgagccactgtgcccagcctgcattttgtttctggttagctcaggtcagtgagtcattactgctgggtacagatgtgaagtgtagatgatttctctaacactgctgtgggaacaagtggggctaactgtggctgctccagagaggtacagtttttagggcactgagattgttgaaaaagaaaatgaccagtgatacatgtgtaggtagctggagtgggtggccctcatcacttccatgtcactatataccctgtatttctatctttcccttggtaatttgcagatttattgagacaaatattttcaactaagtaattcttcacatcctaacatgtatagtgaaattcctacttgtagagttactgtgtaaacttagtaaccattggaagcatggaaaaaattgatttggaaaccctgaaagccctatgataataaaaatcatacagcactgaacttgcctaggtgtattataattacatttgtctgcctccccccacccccatactgtgctttcattaagagcagggacaaattttaaatttccagattttaaatttcacagtttgttatggcagaagcacacaataaaggatagttgaatgaagaaaatgatgaatgaagtttaatgaaacatcaaggtctctctattttgttatctttaccaaaatcattattttttttgcttaggtaagtggcaggaatttatatttatatttctctttttttgtatttactgatactgtcaaggaactatgatgttagtaatgaaaagaatgctggaataataataccaatacctgagtttaaattttggcgtcacctcctcgagccttcatttcttcatctgtaaaatgggctaataatatctataccatataagtgttatttcacagttatctttctttattcaggaaactcttgaaaatctcccataatcctaaactgcctagctaatatagtaaggatacaattttgaaacatttcatgatgctttaaaaaaataaatccctgtaaatcttgctctgcaggtgccatgctcatggatggggaattgagagccactgttgctttaggagtagggcagggacagcctagattctagaacaaatgtgccctggtagccatcagagaagttcttataaaaaccaggatttgttgaaaattctaaagcttacatttaaatattaagaagaaaccctgaggatctgagacaggatcttatgtaaagtgagatgcaaccacataggaaagcaagatccttctggtggatcaaagtgatgcttgaggagagattgaggatggggatcaagaacaaggtgattaaaaacaacacaaaacacttcggaaggttgaggagggataggcagaggaggccgtgtcttcctgatcctctggaaccctgggggagtgccttttgaggatctccaaaccatcttggcacaggtagtagagttgaaaagtggcctgttgaagaaaaagccattctactcacgtcttttccaggtacctcatatcttaaaattgagccagatgttctggagagacagatgatgaagtgacctaataagtaggcatcagcacaccttgcagggtcctggtagctctaagcaaggaaatcggtggcagagattacagggtgcccctctccaagctggagtcacagctgagtctgagcatcagatagagctgagatgaggagtctagtcagtcgggggagatggccacaagcaggcattgtttggtgcctatgaccagaggaccatcccagacacttcagaaacagttacagtgaagttagaagccaacatccaccagcgaccaggcaagattagctgtgccttactcagacttcagcagcccacccaagaagggcagtgatgagagcagatgttcttttgccaccacagcgttacatacgcttcctctgaggaggtgctagcatgccagaaggagggggaagagagaaaacaacccgaaagactgaaaatctgccccaaattgaccattttccagagaacccgagtgatattaaatgaaccagcttaaaatgtttgttttgttttgcatttttatcaccaagggagaatggagacttgtgagcaacatgaagttagttatgtgacgggaaacaccattttttaaaaaattattttttgcacatctgtattataatgaatacatttccaatcagccacaccagtgtgtctttctctctttttaacttgtggatgtatagtgttcccatttgtaatgtatgtatttggagcattttatggtatacagaacgctttcccatacgccctctcatctgttccttaccgtaacacaatgaggtaatgtcaatattattatgcttatgtttcaggaagttgaagatttgtccaggagcagatagctgaagagagagagagagaagagagaacggcttacagctcaggtcctctctccatgcttaggaaccactacaaatgctactgccttgagtctcattttgtttccctctggaaaccacatgtgtaccttgtttgcaacagtatgggtatggatgttttggtagttcttacacatttattttaaaatttaaagaagtagtgccataaagctttatcaggatgtatttaaaatgaaaatagtctcttgttatctagcatgcaactgattctttcaatttggtttggttagtcagaatcttaccagaagtctgtccaggtgataggttagttgagagcatcaagaccaaccaaaataaaacaaaaacaatagcctatggcaaactcattctgatcatttcacatcctagagaaaagtgcagagaaacaaaaatgagtcaatattttataaattcagggtcaatattgtatgcaatgtcaatagtgtatgagttccaaaggttttgtgtcactattaaattagaaatgatccatttttattcgacgtatagtagatcgggccatataatggccaataaataaataaataaataaaacccccacaccagaatacaaaggatagtgaggaaacgtattttgtacgacaattgcaaaccacttatgggcttcaatacaaagtaatagagaccatctcttctctttggctttccattcatttttagcattagtgaatttatgtcctgtgctcttgaccttgagccctaagaggtgtatgtctttgccatgcttctgtggctacattttaggagagtgagtgtgcattacatgtccgtaacccagatcttagatagtagaagggtgctgttataatttgtggacagaggctgtaatttggtgctcagggattacctcctttgtatatgtttgcctactgcatgctaccatttattgtaagctttttattcatgatcttcattctagttgaatctgtggagctattggtcatgagtagagaaatagatctatagggttttcttgaatggcatttctcattgctaatgtgttctgtgaccagccaggtttatggataaacccagtttttgtgtttctctgagaggtatgcatcaaagcagttttttcctcttcacttaggaattttaattttccttcagggttcagtgggccatttagtacctccattatctcataagttattcttactatttaaatgacttttttttttaggatgttagcatgttggcccttttacttttattttcaaagtcagaccaaacaaaccatcagagtgctgtaaatttacaccttacatttgtttggaattctttttatattaatatttttagagtcttcatatgcaagcagaaattttccatcccctctccactgatcaccattgaggacagggcatgagatgggcaaacccatgcttttgtgtgcctgtaatggctagcctctttgttacacactttatattggtcgttatctgatagaattccaacaaatgaaaacatgcccaagttaaagaaattaaatctccttatccatcaccttagaaaaatgacaacacagcatgtatgtaatttaaaatgacttgttggaatatttattgctagattgggagaacatttctactgataagaagctcctttgatttatcaaagttttccatattatttgttaattaactccatgtccttaatatccacagctcatttttcctatgataatgactccattgtgaaacatataaatataatgaaaaatatccctacctgtattaaaaattgagaaacctcaattacttcacacccattgtattttgtagtcagctcaggactgtagttacataacttcagttattattgctggagcaacaagataagagagtcattgaaacattgcaaaagagaatgcagtggaccagggtggtaatgttgtccttgtaataagcctactcctgccattgctgttagatgaaggttttctttttccaagtgttatataattatatgcaattatttttgtcgtttggttttcctattatctttttcctcctctttttgacacgaaaatgatagtaactggaaaatataaaccaataagatttgagctatttactatgttaaaagagaatttgccaggtttcaaattatttcctcatttggatctagcgtgcagcacttactgataagaattctctaacacatgtctatttaaaagtattaaaagtattgtgtacacatttcagcaaattttggcaaaagggtgtcctctgatggggaagtgactgttcctttcttttgccatttcccagtcttaaacccttgtttttacatcaagctcctttgttaaggattcaacataaaagtctttgatattattgagtccatctctgactcattattagccaacactttgtgtctggctggcagcttttccgtaagtggtaaggtcagcctcatacagtattgcacagcctttcccattccttttgcgtcagtgagaatcaaatgattcaacagtgaaaagcaaactcttggactggaatagcaagatgacccatctctaaacaaagcaaactgactaggattctctcatgcttaacatgcatcttactggttctttatgaagagctttctcttggtaagagtactctttaatatttgtctttactacaggtaatcaggatctgtaattcatgatttctctcctcagttaacaaggctatggaatatttcaaagcaactcagggtcagcatggtatagtggagaaggcgttgagtcaatagatacgtctaccatctgggtgctcattgagagagaggcctgttaccttctcttagtctataacttcatctgtaaaatggaaataatcttatctgcttcacaaggttgatgcaaaagtgaatatgtataaaattacttggtaaaatgtaaaaccctattcatatataagggactgctatccttttaagaagcagaagtgtttgctatcatcatttgagagaagttgagaatactggaaccttttaaaaattgcagcataatgtcttggagtgatttgttaaatattggcttaaactagtaggattttccttttttctttttctttttttgagacaagttctcgatctacacataggctggaatgcagtggtgttggtgtgataagggtcagtgcagtctcaacctcctgggctcaagtgatcctcctgcctcagccttttgagtagctgggaccacaggtgtgtgccactgtacctggctaatttttgtagtttttgtagagctgtagtctcaccacgttgctcaggctggtctcaaactcctcggttcaagtgatcctcctgccttggcttctcaaggtgttaggattacaagcgtgagccaccgtgcccagccaactaataggattttcagtagtcaaattgtagcattttccttagtctttggctctgtaagattatcatgttacattggaaaatctttctttgaccacaaaatttaaaatgaaactggatttgagttagctagtactccttcagtaaattgtatgtatttcctcttaagtaatttgcttcttccaattgtttcatctttatcattcattctctttcctcagtcctttattcgctgctgaggggaagcaatgaagaatttcctttgactctgcccagttttttatggacacaaacaaaccatttttttttttaaagaggcaggtattaattcaaaggaaatgtaatatattttttaaacctagtggcgggggtgccagttaaggaacttgtaagtaaaagttgaactttggagccaaaacgattgttgggactcatcatcttcataatgaaagtctttgcaattataatttcatttggcaaagatgaagttgtacccttgggagatgccttgccaaatctttatccataattctgaattgattccagccagactttgttatcggaaaactacttcatatcctttccttatggtgtgtgcccttaacctcaagaattcagtttgtgaacactgaaactgttcacagaaagtgtttggagaagagcgccctttaaaaattagtcattaaggtataatgccatatgggctcaaggggtggcagagatgctgagtggcttcttgttcgttaagactgaaatatttatatgagcagtaataataacagcatatttcagagtctgtgtggtatgaaattgagcagcgatgcaattagataatattgacagcccctattgtaattatgtaaatagtagtaagttcagctctccttttatctttcatttccatgtgcacatgtaaggagaaggctagaaaatatataaatgttgggcaggagtgcttggctatttatttataggacagagtagcctgaagcttgtgttcccctgagttattttttttttcttcgaaattaagcaagtccagtgggttcccagaggggacatgcaaatgcttagtgttaaagcatccacttgaggatcctgacaacgtcataggtccattctgagtacttttcttttggagttgtgtgttgggatcctacttgactaataccaatactttttttttttttttaacctttcaaacagataatttaaagttgttctccatagagatgttttctatgtctagctgcctatcaatctttccatctcaatgcagaagtatttgattagtgtatttaaagtaataaagatgccaacagtagtgtcaccttgattgatgctaattataagtctttaatggttcctctgcttcggccactgtctctgcagattgtgatttttatggttaaaatagtgccctgctgtccaaaggcttaatcataaattctggtctccctttctttaatgattttgcatgcagtggtataatcccagtaacatacattatcttcgttaaaagcaagcagtgactttcataggggcgattaatgcatttataaggagcttgaggaatcctcgttgggatcatagcagaggttacgatgattgtgcttcctgggcattagaattagcagcaatgttgcatagactgtctgaaaataattgaagattttgatgcagtccctatttagcacactaatgttgtaaatgagactataactgcaatggtaaaaaggcaggatttgtaacctgaagatgctatcagtatgtggctgtcagaccagtgaaatgaaaagcaagttaaattatatgagggctttccttctttagaacagtcttaaacagatttggggtcactcagtttgaaatatctgttgatgaaaatatctcttatcctgaagtttttcaggctgaattttcacagtgttaatatatgtttagtctttaatctccttactcaagtccacagatacagttttaaataagaagaaatgtgcctagtaatacacacatttatgggactttcaaggtatggataatttgcttatgtaaatatatgcccatatacactacacatactaatacttctctgaaatgacatatcttattgcagacaagcttgacataaattaaatcgatgctttgctatcttgtaagagcagtttactttcacatcaattacaatgcatagcttcttgcatgtagcgggtattttaaaatagtgctttaatgctcttattgaaaaaaccttgataattaaaaaaattgttttttaaaagcacattaatactggcatacattaatattattatgtacctattttctcctatttaattttactatattctatgcttacaaactaagctagatggaactataataaaatgttaggtgtttatatcatattgctttccactagttattcagttctaatgataatatcatactataatatcctctgttagtgctaaccactgacatctagacaaaattgttaacttctagtaaggagaagatacttttaaaatttttgaaccatttacattttcaaagaagggaatgctaaattgctttataggaaggtagttatttcccaagtggttccggcttatagggagaaaccacagacctcagaagccaagcttgaaagagtattcctcttgaaatagcatctattccacatttctgggggtagctgtagttaataattctggatgataagcaaaagtctacccaatatttatttttttggtggaaatttgaggagatatgcccagctgcatagtggttattagaaaatgcctcaatttacaagccttatattgagaaacttgtgacatctactttgggtatttacaataatgacttacttgcaaagtcttttattttgccatagtatagtttaaggtgattgtttgaaatgttaatgttcagatgttctgaggtgctcttttaggtaatggttatcatcggtgagccattggacatcttttcaccagagtgataatacggaaaacatgtacacagaatgtaacctctcccacagggaacgtttatcttctagagcgtcactcagacattctaaacatgggcagaccagaaggcggtgttagaaagcttgcgatggatgaggagggctgggattaaatgaactaggattgactgcggaagaagactggtatgggagcctatgggattattactggggatctgtatggtaattaatcccatatgaagacaatacctaccctccaatctgtttgtctactcattccaccattgtcgtgctctactgattatcaatagtgtcattagaaaaaccagagaaagactcttctgtgggtgtcaacagtcagcagaggtctgactaagcattcgaatgacatcttgtgtgattctacaatgagagttgcaaactgcttgatcagaggaggtgtgagctgcattgtttagtctgtcttgctgtgtgataattttcttttgtagttttgataaattaacattggcttatgtattcagcaatattcaacaggaatcttttttttctaagcccccgggcttgtgtttaaaaatgcaggttagttctcagaggctttcaaagcatttctgcatcatgctactaattaagataaggttatcattttaagttataccaggaatgcaattagagcttctagtgagaactgtagcaatcaattttctacaaattatgcagacctggtaaggtagaatacagttttaataggacaagtgaacatacagtgatttattagatataatgtgaattcaaaagacacctggacacagcatctgtaacacatcgtgtagcccaagtcactgggactctagttcaacagcccttcagtgggagagatttaataatatgccttccattctccattgttcagtgactgttattttggattttgagagggatttttgtttttcagtttgaatggttttagacatgagaaaggatacaaagcgcagatgagtgaggcccctcgtttatctagactgacccactgcggagctgtgggtcagtcctacctgtcattccttttacttttgtgggacccacagagtccaggtgactagctgacagtgtaattaactaatttttctacactgtccatctctgctaagagtatttggtgttggataagaaacttacatgccttatctgccaactgtcggtaattacttattcattgaatggatacctgttttctaaggatgtacgaggactgcaaggttgaatagctcccgaggaggctgtagatcttttcttcctaggatcactgcaggtcttctggagctctccattaggtcataaattacagtacttctgggcttccttttcttaaacctcttaaaaatatctggaacaccttttacttctccctggttgacttttattccatttgacctatcagcttgttctacatttttccatgcacctaaattcctcaaattgcagttgttcattcaatgtatatctagagattttccgttgtgtgccatgcattgtgctaggtattggacacatcgtggtgaaaaaggatacttgtgctaatatctgtaacatatgcctgcctttcccacctccaccattaagcacgtaacatcccttcccagcacttgtgaccttgccttgtaatttacagagaagataaatatcctctagtacaatctcctctatcttctcctttcttccatatctgccattatctgcagctgaaaggtgttttctttctgttccgtctcatagaaagtgtcacatctcctccattaaattgccatgattaagataaattttctttaatgtttctatgcattaatttttccaataatttctctttttgcgataatttttcttttcttttcttttctttcctgcataatttttttctactttatctcaatctttcttactcttctgctatttccctttggccaacaagcaggctcacattttagctcaaccctatccagaaacaaaaagtaaaaaatctgttatcttacctgttactcattcaaacttcctagttgctagtttcttcaaagtgtgcctacacaaattctgatttttcttcttcatgtctcttattacaacagtctggcttctggaccagcaaatctctagaccaaaacacaccagtggccaaagtttacttctcacttcacttagcctcgtactaacatttgttattgctgcgtctttcctacttctgaaaatcggcagctgtcttcaatctatggtgtcatttcttcgtcctcaatttcttaggctgagttgtcctttttttgctaacccttttggtgacaatgtccctcagggtttcaactttagtattcttctttacttactctgtgtgaggaggttcttaaaacaagaggcttcaaaggtgaactgtgaatgccctaaaatcatatgctaacatatatggtgtgggtacctacatttttctgagaaaagggtttgtagctttcatgtgattctcaacaggtgccaaagaccaagctacagctgaaacctcattctttgaatggtggcatcctcttccatggtgtcctgctccaaactctcacctgcgtttgtgctgtattctatctcaggctgacacattgctgttgacctaagttcttaaagaatcttccagtgtgttctgtttccacactcagttttatgccaaattctttccattatgattcagaaatataattagtctgtcatggttttgtcttagttagattccctgtcacctatttcttaccatcctggtccaatctgcacaatatctccagaaatatcttttgatgtatcctaaaattaaaaagcctgctcctaggattttccctcacttactattcttcagtacattctttccctcctcctctacaggtcaggttccaggtgagaaatcacttgaattataaaagtcttcaatataattctccttacttatatcactcttcctcaacttatgaacactttgaaccctttgcaattagccaagagaaaactcccccttcaccctttaaaggtttgcttaaaaatcaactgacaaaagacagattaataggagaagaggcatacacgtttattaacatgcactggagtcttaacaaaatataagaactcaaagaaatggccagatggttgaccttttttttttctttttctttttctttttctttttctttttcttttttttttttttagatagggtctccctctgttacctcggctggagtgcagtggtgctatcttggctccctgcggtcttgaccttctggactcaggtgaacctcctacctcagcctcctgagtagctggcaccacaggctcacatgactacacccaaatagtttttaaaaaattattatttgggccaggaacggtggcttacagctataatcccagcactttgggaggccgaggtgggcagatcacttgaggttgggagttcgagaccagcctggccaacatagtgaaaccccgttactactaaaaatacaaaaaaggtagctgggcatggcggcatgtgcctgtggtccccaggtatttgggaggctgaggtgggaggatcacttgaacccagaaggcgaaggttccagtgagctgagattgcgccactgaactccagtctgggcaacagagtgagactctgactaaatatatgtgtgtgtgtgtgtgtgtgtgtgtgtgtgtgtgtgtgtgtatatatatatatatatatataaataaataatttgtagagacagggcctcactaggttgcccatgctggtctcaaactcctgggctcaagcagtcttcctgccttggtctcccaatgtgctgggattacaggcatgaaccactgtgcctgtactggttgacactgtctttttttttttttttttttttttttttttttgagacggagtctcgctgtcacccaggctggagtgcagtggcgcgatctgggctcactgcaagctccacctcccgggttcacgccattctcctgcctcagcctccccagtagctgggactacaggcgcccgccaccacgcccagctaattttttgtatttttagtagaggtggggtttcaccgtgttagccaggatggtctcgatctcctgtcctcgtgatcctcccgcctcggcctcccaaagtgctgggattacaggcgtgagccaccgcgcccggcctacactgtcttttcttttttttcttttatttttttttgagatggagtctcacactgttgcccgggctggagtgcaatggcacgatctcggctcactgcagcctccacctcccaggttcaagcaattctcctgcctcagcctcctgagtagctgggattacaggcacccatcaccacgtccagctaattttttgtatttttagtagagacagggttttgctatgttggccaggctggtctggaactcctgacctcatgctccacccgcctcggcctcccaaagtgctggcattacaggagtgagccactgcgcctagcctggttgacactttcataccatcttgaggttacagaaagaatgaaaactttgattacagcaaaacaggttatgagagggcaagaagagcaggcctggctagcaagggtggtcttcttatgtagatgaaacctcacaggtagcagccctcagagagaatagatggtaaatgtttctttagacttataaggtgtcagactctcaggtcatgtttcctaactctgcacaagggagaggctcagagaaaaagcatggatgcatccctgccaattttctctgcagatgtaaatctcccctacagaagacagcttttcggctgttcttatatttctagcccttctgaatagccatcttgaaatatgtcaaagaagtatgttttggggtgaaatattttggtttccttcacatttcgccagatgtgttatgctgcggttttctctccctgaaaggaacccctcttgtcttgaatctacatagatgtttcctatttatctcccacagtccagcagagccattaccctggtcccagccagcgttcagcatggcttccctcttgtccataactctgttgttgcattgacaactattcaatatcctcactttgttcctatctctctctccaacaatatgagaggccagggaatttgcagcaaatttttgttatctgagtctccttagcacttcaagaagtgcatgttgacagatcacacactctgaacttcaattggacatttatttagatataaatggcattttagatcattttttggatcaaacaaacacatcaactttttcagatttgctttctgagtgagactccaacagctgtggttaaaacagcagttgccatccctgaaattctccgcatagtgtagtctacataaatgtgcatcatatgtaatgtatattgttatacatgtaatatatgtgtatatgtatgtatatatatgtgtgtatatgtgtatatatgtatatatgtgtgtatatatatgtgtatgtatatgcatatatgtgtatatatgtatatatgtgtatatatgtgtgtgtatatatgtatatgcgtgtgtatatatgtatatatatgtgtatatatgtatatatgtgtgtatatatgtgtgtgtatgtatgtatatatgtgtatatatatgtgtatatatatatgtgtgtgtgtgtgtgtgtgtgtgtgtgtgtatatatatatatcactcccaggctggagtgcagtggcatgatctagcagaaagtcctggatctattttatgaaacaaaacaaacagcatatataagcatataatatattttctgtgatacactttttaaagagaaggtaaatcttgagtatgttgacaacagctctgggatagttgatgtgtgacttcagtggtaatttggtattttgcgacttttgagcaactttgtgcaaggagagatctctcccactccccccttccatggttcttattctccttcttgcccatggttaaggcaacatcagaccaaagcaactgatatctctgtgccttaaatttcacagtgtcacatattaataaaagtgatggatatttttctcttttctgagagtttgttagatttgttaaggtaatttattaacaagatgtatcctagggaaatacattttttcacctatcactatcttagtaacattttttgctaatgaggaaactaggtcacagagaagttaaattactttccatggagtttttgtcagagaaccattaagtgtgatatcattaaaagttacagcaaatttattctagaaaaaaatgtagtgcttaatcatctgtattagtactttatccttaagtcaacctggtaaatagtttctagatacagtacaaagttagagtacaataccttctgatccattgagccctcttccatctttccttctgctctctgtatcatttttttttttttttcctgaggtggagtcttgctctgtcgcccaggctggagtgcagtggtgtgatctcagctcactgcaacctctgcctcctgggttcaagcgcttctcctgcctcagcctcccaagtagctgggactacaggcatccaccactgcgcccggctaattttttttttttctttgtaattttagtagagatggggtttcaccatgttggccaggctggtcttgaactcctggcctcaagtgatccacctgccttggcctcccaaagtgctgggattacaggcatgagccaccgcacccagcggctctcttcatcttatgtagagaaaaataacacagagattcttattcatatttttatgaaaaatttaaaaaggaaacaaagatttttgtaaaaggagtaggtatagaaagagttaattttctttctgacacttcttaacatatgaaaggaattaattatttggctgttaggtagattaattaggtgatggacattctggtttttgttgttgctgttggtatcttttctgaatacctaaacacttctttggccaggcgcggtggctcacgcctgtaatcccagcactttgggaggccgaggtgggcggatcacctgaggtcaggagttcaagaccagcctggccaacgtggtgaaaccccatctctactaaaaatgcaaaaattagctgggtgttgtggcggccgcctgtaataccggctaccggggatgctgaggtaggagaattgcttgcaaccaggagacagaggttgtagtgagccgagatcacaccactgcactccagcctgggcgacagagcgagattccatatcaaaacaaacaaacaaacaaaaagacttcttttcccttttaaatgctttaatatttgggtttgaatagacagaatttgaatcaaagccattctcttttacctggcacttttgttttgtttttgtttttgtttttgagacagggtcctgctctgtcacccaggctggagtgcaatggtgcaatcacatcttactgcagccttgacctccttggctcaggtgatcctcccacctcagcctcctgggtagctggaactataggcatgtgccaccatgcctggttaattttttgttgttgtcgttgagacagggtttcactatgttgcccaggctggtcttgaactcctggactcaagtgattcacctgcctcagcctcaggctcccaaagtgctgagattacaggcatgagccactgcactggccttacctggaactttttcttcaaacttcccttcagcctacaaagagtcgtgttacaaaacctctgaatccaaattctgcctccttaccttgtcatgtcttggcatgagtctatgcattagtctcagactgatttgattcatgttagttgtggccacctcatatgtattttcttgtgtacaagaatggagcctagttttataaatgtgataaaatgcactggattttttttttcttttttctggaaggaattttgaaagcttgaactgttgtctcctggagtatgttagagtataggaatgtctcgagatacctgactttgtccatgaacttctgcatatccttgattatcaaatatcacacaccacaactgaaagtatgttttatgatcattcattaatcctctccattgcaaaggctgagtggcacatttaagaggttggggaacatgaactgatgggcacactccttttaacattgcttcattataaggcagattgattagggcccctgctactgtcctgaaaattgtacatgtcctctgggtccaaattactgttactcctgtttcactctgatttttttgatgacttttagtacctcctaggtttttattcaagatctcatgtgaactttctgtatcttatcctttctgcctttgtgatgctaccaattagattatagatagaacatcacatctgcttggtgcatcccagaatgggccctatatacattaattatccacttttctgcccctgttcaatcctgatttagcaatagcaatcttatcagattgaagcttgctgctttaagcaatatctttgcaggatattttcttttgggtcttgatttctatagatgagtctaaaggttctaccaccggcattagctctctgaaggcatttaaacaatgttgttagtctgtgggcatgatgagaacgtataccttactaccatagacattagattggcctgttaagagtcaacttgcataaatctgcacaaagtgatttatcatgagtaattgttaactcaaaattttctataaatagagactcaagagattacagaacccatagatgctaatcaaggtggactctgggaaaaatctgagaggcaggactggaaagtggttatcatttgctaatcagaaacattatcggagtattgtatcctgttttgaaaagggctatacaaatataaccaggttagcaactaagaaaatgtagaaaaggaaagtcacaaaggcaaatactgttgatgttcatgtaagcaaagtctggtggagaggaagtcttgaataaaagacttgaaccttaccagcaaaactactgataaatttagcatctattgtgccaggcatatgctaaaaactttatctgcactattctcataacttcttaaaaggacttttgacctactgttgcatttttttctttccaacttttgttttaggttcagggatccatgtgcaggtttgttacatgggtgaattacggtcactggagtttggtgtacagattattttgtcacccagttaataaccatagtacccaaaggtggtttttcgatcctcacgctccaccctcaaataggccctggtgtctattgttcccctctttgtgtccatgtgtactcactatttagctcccacatctaagtgagaacatgtggtatttagttttcttttcctgcattaatttgcctagggtaatggcctccagctgtatccatgttgctgcaaaggacatgatttcattatttttatggttgcatagtatgccatggtgtatatgtactgcattttctttatccagtccactgttgatgggcatttaggttgattccgtgtctttgcttttgtgaacattcctgcagtgaacgtatgtgtgcatgtgtcttcatggtagaacatgttatgttcctttgggtatatacccagtaatgggattgctgggtcaaatggtagttctgttttaagttctttgagaaatcttcaaactgctttccacaatggctgaactaatttacattcccaccagcagtgtataagtgctctttttcctctgcaacctcaccagcatctgttattttttgcctttttaaaaatagccattctgattggtgtgagacagtatcttgtggttttgatttacttttctataatgtttagtgatgttgagcatttttccatatgtttgttggttgcgtgtatgtcttcttttgataagtgcctgttcatgtcctttgcccattttttaatggtattgttttttgcttgttaatttgtttacattccttatagatccaggatgttagatctttgttgggtgcatggcttgcaaatattttctctcattctgtaggtagtctgtttactctcttgataatttattttgttgtgtagaattaggtcctgtttgtcaatttttgtttttgtcacaattgcttttggagtctttaaaatgaaatctttgtcatggcctatgtcctgaatgtatttcctttatctttttctagggtttttatagttttaggttttacatttaagtctttaatccatcttgagttgatttttgtacatagtgtaaggaaggggtctagtttcaatcttctgcatatggctagccaattatcccagcaccattttttgaatagagtcctttccccattgcttgtttttgtcagctttgttaaagattagatggttgtaagtgtgcagctttatttttgggttctctgacctgttccattggtctatgtgtctggttttttttgtttgtttgttttacaaataccatgctgttttggttattgtagtgtatagtatagtttgaagttggatagtataatgcctctggctttgttctttttgcttaggattgctttggctattcagcctcttttttggttctgcataacttttagaatagtttttttttctatttctttgaaaaatgttgttgatagtttgataggaatagtgtagaatctgtaaattgctttgggcaatatggccattttaataatattgattctattcttgatcatggaatgttttccatttgcttctatcatctctgatttctttcagcagcattttataattcttgctgtagagatttttcacctccttggttagctgtattcctaggtttttttttttctttttttcttaatggatattgtgaatgacattgcattctcgatttgacttggacattgttgatgttgatgtattgaaatgcttctgattttgtacattgattttgtaccctgaaactttgctgatttattagatcaaggaatcaatgagctttttggcagggactgtggcgtttcctaggtataaaatcatatcatctgtgaagagagatagtttgattgcctctcttcctatttggatgccttctgtttctttctcttgcctgattgctctggctacgacttccagtaccatgttgaagaggagtggtgagagtgggcatccttgtcttgttctgattcttaagaggaatgcttccagcctttgcccattcagtatgatgttggctgtggtttgtcatatatggctcttattattttgaggtatgttccttcaatgcctagtttgctgagggtttttaacatgaagagatattgtattttaccaaaagacttccctgcatctattgagatgatcatgtggttttaaattctatttatgtgataaatcacattgattggtttgcatatgttgaagcaaccatgcctcccaggaatacctacttgattgtggtggattagcattttgatgtggtgctggatttagtatgcgagcattttgttgagaatttctgcatccatgttaatcagggatattgacctgaagtttcttttttttgttgtgtttctaccaggttttagtatcagaatgacactggcctcattgaatgtgttagggaggaggattccctcctcctcaattttttagaatctactgttgtgttttgaactgtcagggattcgttctaataaatttcttattaccaagtaattcagttataaagctgggatttgaaccaaggttttagggttccaaagactacagtctcactaactgtgctatataattttcttgtaccaagactatttgctataagtaaaataaacttcttatactccttgaagtacccacttaacacatagagtcatacagccatcaagataatcaaatctctcctgccactttgaaaacaatccctatattcctactctaagtacctggaagccattgctctgtcttccgttcccacctacattttaaaaatgtatttttattttaaaattatatttacttgtgtaaacttaaggggtacaagtggaattttgttatgtgcatttattgcatggtgaagtcttggcttttagggtagccatcatctgaataatttacattctacccactaagttatttttcatcacccactctccttctgcaccccgctttctagtctctaatgtctatctttttttttttttttcatcttccccttacaagcgggaacatgcggtatctgactttctgttttggagttgtttcacttaagataatggcctctccgtccatccatgttgctccaatacatgattttattcttgttttatggctgaatagtattcaattatgtatatataccatattttctttgtccagtgttgatgaacacataggttgatcccatatcgttgctattgggaatagtgctgtgataaatataagagtgcaggtatctttttgacacaatttcttttcctctgggcagacacatggtagtgggattgctgacctgagtggtagttctatctttagttctttgagaaatctccatactgttttccacagaggttttactagtgtataagagttcccttttcttcccatcttcgccaacatctgttgttttttgactttttactaatagccattctgactaatgtaagataatatcattgtggttttaatttgcatttctctgatgattagtgatttggggcattttttttcatatgcgggtttaccatttgtatgtcttcttttaaaaaatatctattcatgtcctttgcccacttgttaatggggttgtttttgttgttgttgagttgtttgcattccttgtaaattccggatattagttttctgtcagatgcatagtttgtgaatattttctctcattctgcaggttgtctgtttgctctgttgattatttcctttgctgtgcagaaacctttttatttcattacgtctcagttttttatttttgttttttgtggcttgtgtttttgaggtcttagtcatgaattattttcttagaccagtgtccagaagagttttctctaggttttcttctggtatttttacagtttcaagtattacatttaagtttttaattcatcctgagtttattgttgtatatggtgagagatatgggcctacctacattttttaatgtaaggtttaccaatctgtggctggcttggccagggtaaaaatatgcattggtcagattaacaaaaatatctggttgaattgacagttgtacatctcattgtaaattaatagattgacattctgattagaatttctttccgtgttgtttgcttagtaggagagaattaattgacaggtgtgtgtctgcttaaaaatactcttttgtataaaataataaaatggcatatgcatatgtttttatatttgtaggagggatgaatatgatcatggatataaaagtataactaaatattagactacaatgccttctttaattatgattcaaatttatattgataaaaatacttattggtgaccaaaatcagaagcaaatatccaaaatcggattgagtttcagattgggttttgatatggttaggcttcgtgtccctatccaaatctcatcttgaattgtaatccccataatccccgcgtatcaagggacagaccaagtggaagtaattgaagcatactgatagtgagtgagttctcacgagatctgatggttttataaggggctcttccaccttcacttggcacttctccttcctgccaccttgtgaagaagatacctgcttcccctttgccttccatcatgattgtaaatttcctgagacctccccagccatgctgaactgtgagtcaattaaacctctttcctttataaattacttaggcttgggtagctctttatagcagtgtaaaaacggactaatacaggtttgtttcagtaaatgttttgaacacaagttgttcaaccaatgactgtttattgaacatcttcatcaggctagaaactggttgaagaggtggggcattggatggagtgaaaaacattcttagctgagaaaaacagcaagtgcgatgtgtccgaagtgagaggaacgtggcatatggagtcatgaaggaaggcagggatagccaaagagaaataaggaaaccaatgggtatgagagcagagtggagcataggcagggcttggatctattactggtttctgtgacatgtgttatgaagagtatcatttcactgactggctctgcccaaatatgtttgaccatatttacatcccatctctctcactctggactgctgaagaagcttacactatcaacgtactcctttttttttttttttttttttttgagacggagttttgttcttgtcgcccaggctggaatgcaatggtgcgatctcagctcactgcaatcgatgtacttctctcatgtgtactcaactattccctctcaaatgaatcctttccattgactttcagacttgaatacagctctcccatctcacctgtaaacaaacagctcctccctgactcctttagctccctgcaggtattgctttctttcctactctttatagcgagatgtgctgaaagcacttccctgtcttcactttcttgccttccatgcacccttctctaatttagcttccagcttcatcaaaacaacttttacttgcaatgactgactgttgtccatcccatagtcctcttcttagtaaacttaacagcattaaataaaaactgtcttcttctggagcaccaacttcccttggcttccaggatagcccagcctcctcctccttcaggtctggtgatatactctcagtcttgtctgccaggaatcagttactaatactggcaacgtcaaaatccctcttcttttttaccccctaccgtctccaaagttggtttcaacgcccttccttggcttgctatgagaatgacataggctagttataggatctgctcatttaataattgtgaggatataatgagttcatatatggaaagtacttaaagtaatgccaggcaaatgatagttgccccttgagtcgatagctgtagttacaatttgtggatgaaacctgaatgacatcagtccatacctatgtattcagtggcctataactatctccatattcaactctaaaggcacatcaaactcagtgtatccaagaccaaatgtatgtcattcttgtgcttcatcctgacaaaaataaacctggtctctcctagtgtgtcctgcttcaatgagtggtccaaccattctgtcatttgcacaagccagcaaagtaatttggcccactaaatttctatgaaaagcttccatttctcaacattccctctgccagcacaatagccagagataccatcatctctcttctgagttctataaaaagagattgccttgttttcattctgtcgactcatcaccccctataagttctccccccaacccccattgccagaatgcttatttcagaagaccaccctgagcccccctttgcttccagcctttccatggcttcccgtgactctcaggataatgaccaaaatccttcacatggtttgccaagcccagcctctgaggactgtcccacacatctcccatcccacctcctgctgttctctccactccagctgtgcatgtcactttcagctgctcacacacactttactctccctgaccagaggatttgtacatgcaattcatcatgctggaaagctctctccacctttataagcaatgtcttatgcatccattatcacagctcaaacctctctttttcggggaagactttcttgacctcctagtctacttcaggttactatgttataaactcccacaaactatattcttcttctttagaatatgtacctcattttttaattgtagtattgtgttggggatccccaagataattctcaggctcagtgatttgctggaaagactcacaggacccaaaaaagctgttatactcatggttaaagtttattacattgaaaggatacagaaaaaactcagcgaagtgaaaaggtggatagcgtggagtagaggagaaattaagcaccagcttccagttgtcctctcccagtgccattacatggagtacacttaattttctcagcaacaacgtgtgacaacatatgtaaagtgttgccaaccaacgaaactcacttgaggcatgtgtccagggtttttactggaggtcagtcatgtaggcatgcagcaccttagctaccagtcttcaggcctcagatcaaattggtacagcatgatccaaagcctcaggcatacaaaaacaggtgtttgccataaatcacactgttggcataaactcctatctcagccaagggctcagaagtaatcttcccaggagccaggccaagaccagtcttgagactctgggaatacgcaaggtttgagcagcccaggcctgttgacgtaaccctttcctgcacaagtgtcaatagtgccattctttgattaatgtctctcttcctgcagactacatgaaagcaaaatttgtaactgtgtaggtaatatacctaatcttcagcacagctgctgataattggaggtactctgtaaatttttgttgaataaatgaatgaataaaatcttctgattgtctttatctccttctagtctatactgtgttctatacctttctgccctatagctttcagacacttctttataatggagtcttgtcatgcattttatacgtaaagttacttttgtgttaatgagtaatatgtagtaagtacttaaaatatttattttattactctaattcccaattatatccctatacctccaggcattattctgtctacatattaaactttaaactggcaaatgtttttcacaattatacttgaaatatatgtataattatgaaaaacatttatatatcagattatatgataccacataatctgattatatatcacatatatcagattatgtgatatcatataatctgatatgtttttcacgattatatatataatatcagtgtatcagattatgtgatgcctacttataagcaccaaagttatttctaagagaatgagttaatgatccaacatctgccttaagaattctagtaaacaaattatgcttaactttgaagctactgactatatatattgaattttatcctggatatattagaaatataggaagaaagtttcctggaatgaggaggtatatccccattttctctgtgagatggaagagcaaatatgtcctgatgatccgtagtttcttaaccttcaaagtccacatgacgtcacagtgctttgctccatccagaatctctgtttagccaaggtcaagaggtgtcaggcccattttagcaacgaatttgaatgcatctccattaaaaatttctttattgtgttagtattggattataacccaaagtataaaagaaatacccatgagtccatactgatataaaaaaagatcaaataaataaataactgggagagtgagatgattttcctatgcagaagaatgccaaacaaattatgtagattttctgcttacaaatgggtggagcataacttcccactccttaaatttgggatgcatatagtgactttcttccaaagagtacagtacagaaaagtgggtgatgagaagagtaactttacagtgaagaaacatgacaaacactaccacagccaggcaatcaaagttcacatcaatagtataaggcatgctgatggtatgtacctttaatataatttggtgagaatggtacttcacctctgtggtcttcctccccaaaacccataaccccagtcaaaccctaagaaaaacatcagccaaactcaaatttagggcattctgcaaaaataactgactgactagtactccctcaaactgtcagggtcaccaaaaacaaggaaagtctaagaaactcacagccaagaggtacctaaaatgacaaataaattcaatgtggtggcccggatgggatcctggaacaaagaaaaagaatgttagctaaaaactaaggaaatctaaataaatgtataggctttagttaataatactctattgaatattcattagttgtgacaaatatgagaggttagtaataggaaaaaaatgggaactctgtgtatctttgaaatttttctgtatatctgaactattctaaaattttagtaccactaaaggtttttattacataatagtgttttaatttaatctccatgctatttaatgaaatttaccagttgtatttgtgtttgattagacattatctcaagttgattggaattactcatatttcttaatgccattgttgcagctgtaataaggttgacttttctacaatagacacagaaatcattacatcaccatttaatttttgaaaaataatccgatcccctgtgattataaacttgagattctttaagaaagtagaaaggttgtaagatattatgagtcataggatatttccagttttgaagtaataagacaaaaatcattaactaaacaaattggcattaaaaaaaaacagtatttttgagaggaccagtccagacaatgtgtctgtaagatagactttacaaacttagtttgattaatttttgtttttccgaggatatgattcttttctataattactgttctgtttttttctgacaggctatcaaatattggctgccttaagctctctgtgaactgagttattctcaataatactctgtattatgaaggcattatttgagtggctgtccactgtgatctggttatttggagctttacataaaacaggtggttcttgcatctcattgacatttcttattatccagaattcaccatcctttttctatggctcatcatatgcaggccatcacagacagggccctatcctatggtttgcccgagtttatttggtttttcatttacattgtggtcttttctcttagatactccaagtttgcatgtttttggactttatcaaggctcttgctatatggttatgtgtttatttacactgggaataattcccaaaaggctttgcaatagctaattgtatttgtttggctctgtgagatgacccaggcacctccgattccaatcagaggggccacttactttgagtggacatgaggctgatgcccagaaccaaagaggaagcagcctctgatccatgatcctatagtcacagtgctgctcaatcgtgccgtttctgctgacccaaatgcctggagttgaccctgtttgtctctccaaacctctttactggttttccttgacttagatgatgctttgaacttgatctgttgtactatgactgtaattccaagagcacaggctttcccgtcatgtagagcaatatccaaatcctgcctcaatcgtttgttaccttttgatcttgaggatgttacttcatctctgtgggtttcagtttcttcatctgtcaaaggagaataacagcacactggcagagttgttataacaattagataaaatgtttctaaaactcctttagaaagcctggttctgtatcatggacactaactatgaggcctgagcagattcaagagagggatctgcctttgatatggttttgggtgttaggggtcaggtgggagaagagaaaaagaaggaagagatacaaggcagagtaatggactctggggcaagaattgtggagcctcactacctgaatatgcagcctggctctcccatgtgttagctgtgtggccttcgtggttattgaacttctctgttgctgcacttttctcatctataaaatggagattgaaatagtgcctaactcagtaaatgcgaagtgctcagagcagtacctaacatgtagtactaattgtccagtattagtagatttactcttttcccagggttttacactttacatttaactacacctgataatccgcttactgatcaatacgtctttttgcagcctcagtaacctaaaagtattaagatcattttggcctttttagtatactcgtataaacaaaagtttctcctttcaaagaagtcatatgaagaggtgctacatttatgtcactacatcaacatatttgaataattatttttaaattttccttagattctgaaaaaagagattcttttcagtatcctcagtaataacaaatctttgtccttgaatacagagtatcaaaaattaagccaactctattaagataagttatctatgcagatactatcttctatatgtataattttgcatacttgtacagttagatatactttataactttataatctcaataaaacatacacatatctatttatatataaactgtgagtgagtgagtgtgtgtgtgtttgtgtgttttgggaaagggagtatcaggaaccagtgtttaatgtaagctgaactattttcatgaacataaattcaatcattgagtcacagctcatatgaaaaaaatcacatgtgatttattgcatgtttcagagcttttaaaataaagcctaattagatttttgaccttatgggatgaattctacataaagcatgcattgagtctaatggagtaaaaaatgaacatcttttctttccagttctgccgtccttttcctcccttccatatacctacatcctatagacaccataatactatagcactgatcttggaggaacctgcagaaaaggccatcaaatgcagtgggggcggagggggtgctgtacttcaataagacactcaatctaaccttgggcataagcgtgcctcctctttgcctgagaaagctttactgctttagcagccagtgatatatctgtatgcatttggcatcctgaacgtggccactttaattattttaaggtttcctctaaaagtctgccttgctacttgaatggagatgtggtcatttgtgctaattgcattttagaatctctattttattggttacaataagctaatgtttacaacttttgttcatatcaaatgccattgggcacttaattatgtaacaatttgctacctaggtatattttgcaaacatcaaaaggcaccagtccatctccacatcactatgtctgtactatgtgtgcatcatatagctgtggctttttttttcaggctcattgaagtgctgcattcccactgctactgaagcccagggtcttggcttgagagccctctgcctgatgcccagaaagggatttgagactgagacaatattgttgcactagggtctttgccatgaagcttttaagaatgagagaaactaagatacaatatgacttgtggatctccaggatcatacgctgcttggatagcttacttgttgaaagcaggggatcttcaaaagccaaaaaacatgcctcctttctgacatatgggcagagagcctagacactcagagacctcttctattttacagaagatggcgctgaggtcaggatggtgaaggaacatgcacagagaaaggctgggccaaaactgggcccagattttgagaaaatgaagcccactgttccaatttttattttatttcttttgatctaagagaaaaactgcatagtctagtaatatacttagtaaaaagaccaactattgtactctgtgaagttaatgttatgagggttggatgtgtcttagaatctgatcatggagttaattttactgtattgcaagattttaagatgagctggtgttctcttgttatgcccatatgccatcattccctcccccctcacccagaatgtgaatagtattcccattgtgggaactgctgattgacatcaaggcactctgttgtcatggctctagtttaaaaatgtgaaagaaactagatcttttcaacctaaaggttctctctgtatagttaattaaagacattttaagaagacatttggattataggaaagtgatgatatcacgttatgacatttattccttaccccaagaatctcagtaattggttcacctattcaaaactgttattttatcagagggtaaagattccaggacccccagtcagacttatctaatttccctaattggcatattaaaaaaaaaactctggacacaagaactttctgatttgtgaatatgccattcactcacttaagacaaaatttaatgtaaaacttatctaatgttaatgaaagtctatagaaaattttagccggggcttaaccactggctaatatacaatttatttcattgtattaaagaatagatttacaaatttcattagaattccacagaaatataaactattagaatgcggtacagcgcagggtgtgtattgagattctcactttacaatgaaggaaactatagcttggaaaaagataaaatgacctttctataattatataacagataaacatatagtccatagcaatatagataccagatcccacagcttttgacttctagtccagtatttttcctactaggccagggtattttatgtaatcagagttattttattctatgcagtgctgttgtgatagatgaaaaacagaaggtgtactcaatgccttctaagaacttctgctctcataagtctcatatcttaccatggatagatatgtgtatttacaggtttatctatgactccttcaagaataacttactactacttctttcctttaaaacaatttttttttttctttgagacagggtctcactctgtcacctagcctggagtgcagtggtgcaatcatggctctctgcaacctccgcctcccaggctcaagtgatcctcccacactcaggtgatcctcccacctcagcctcctgaatagctgggaccacaggcacacaccaccatgcctggctaatttttgtgtttttgtagagacggggtttcagcatgttgctaaggctagtgtcaaactcctgagctcaagttatctgcccccggcctcccaaagtgctgggcttacagacatgagccactatgcctggcttaaaaatgttttaaaatatacctaaaatctgatcagatgtggtaaccaaaaccaataacaaaacaaaaccagtcaaattaatgcacaaagacattgtctgaagatggtagaaatgtgatttaggtgaaactgtatgaataaaggcacaggtgagcccagtaagagtcaccaacatgaggtacccactaggaaagcaagtgcaggttagtctgcactaaatgaaatgtgatcagtttgaatgatggaagtaataggactattttgctttgtgtagccacatgatgggaccttgtgttatgttttgtgtgacacatcattcaaagcactaccgatcaactggaatgtattcctaggctcagaaattgaatgttgaatagacttgaagtcacagagtaatgtctaaagaagttgcagatattttgtgtagagaaggaaaatctggatgggggatgatagatgccctccagtaactgaggaaccatcatggggaagtcacactagattgagctcccaaatcaagggctaataaacagaagctccagtgaggctcctactgtcatagaataggacattttggctcagaggtttttcttttcttttcttttctttttttttttttgagacagagtcccactctgtcacccaggctggagtgcagtagcgtgatcttggctcactgcaacctccgcctcctgggttcaagtgattctcatgcctcggcctcttgaatagctggaattacaggcgcatgccagcacgcctggctaatttttgtatttttagtagcgacagggttttaccatgttggccaggctggtctcaaactcctgacctcaggtgatctgctcgtcttggcctcccaaagtgctgggatttcaggcatgagccaccgcgcccggccttagctcagggttttaaatactgaggctgttgcattcaaaagatggaatggcttgtctgtctcccagggcactgcgtttatagtcaccagaggtgttccccttgagcctggatgattacatggaggaggttttaaagggcagcattcacaatttagatttgcagttggaccagatgacctttaaggtgctttccagcacctggggttttatgattctatttctattatgcatctacgctgggtatgtgtcacattgtttgaagcaaacactgagaatgaacaggagcacagtgtggaatgttgatggcgctcacatctattttgtgtttcaatttctggaagcagtctttgtctttgaggcagtttggtccctgaccttctgtaacatttggagcccagccacactgtctttgtttactgtaaagagcatggaaaaaccgacttcctgacagtgctctgcaaagtctaaggtcaaaccactcacaggtgaacaaacacagttcttccaccttaaacttgccatttggtccctgtaaaatggacgagggtaataacgctggacagcagagagaggggaaatcagtcctctgccagcagccagcaattagtcactttgtcagtctgctttgggaagggctcatcttaattcagcatccattttgaagaggttagaaaccatgacatgcagttttaagtcctctagcaactctgctaaataaacctatagaccctgcctttcttgacactatcagcacatcattaatatttcccaggattgcacagataaagcatagcattcttattcacttaaaggattgaagagtcacattcactgaatattcacatcatgcaagccatttctgctatggtaagatctctaaggtgggttggctccctgtcaagagagcatacccttctttttttttttttttttttttgagacagtgtcttgctctgttgcccaggctggatggcagtggcatgatcatggctcactgcaacctctacctcctaggcgtaagtggttctcccacctcagcctcctgagtagctagtactacaggtgcacaccaaaacacccagctaatttttgtactttctttggtagagatggggttttgccatgttgcccaggctggtctcgaactcctgggctcaagcaatccacccaccttggccttccacagtgctgggattacaggagtgagccactgcacctaccctgcctcccctgctattttttgctctcatcaaatgcaatagcttccctctgtaaaaggaagggaagtgtcttcctgggtaagtgtattgtaagctctttaagggccctagacaatgcctaccacactgtcttagattagcaggtccacataatgcatttgtgtgaacatcattgaatcaaacaatgaccttgctcacacatttaccccctttactcaaaatcacttatttgtgagatccaagttttcttcttactatttaaagattattagagttgatctaaagtgatataaatgaaaatattgccaacataaattcacatttttcttttctcttggaataaattcagctttggctgtattttttttttctcttgttcttttttttttttttttttttggtctgtggtgtaagcaggctcttgaaatgccctagttatctaacactgctcttgaactccacttacagatgatatactagccttttactaaaatatatctgggtattaaaagctcaattctttactgctgatgagaaagattattaacacttttttttccccagctataatatgaggcagtaacacccctttttacttccagagccagaggcagtatgtcacattaaccttcattaactgcccaagaaatgaggtacgttcgttaatttagtattctggttagctaaaattgtgtgagaaggctgataaacgtctgtggtttctccctgtgctattaaaaaaaaaaataaaagaatgttaaagtatgttagcccgcttatcttatcatcttggtaagttcaacattctgattagggggcagatctggacaggatgagtctacagctggtgggcaaggatgggggtcgctggggcagggtagaggaaacgcagcctgactgagatcagcctgaggaagagcatctgaggcgtgtggtgggggaaatcaggtagcatctgaaaagcaagccaaaggtggaaagagaaaacaaattctgtttatatataagtaatggcatgatggaagccaacccacctaagccactcagataccctgtgaattactaaattcactgtagagatttttgttatatgtggcgtcatcacttctgatgttcccatttctaccttcatcaccttcatttattcattactttaaaaaggcatatcaagcattttgctagctactggggaaaaaaagatgaacgacacaactcctaagctcaggaacctgcgttctttcttcagctgagctttaaaaaatgtagagtcagctttaccatcacctcttctctgttttccaagaataccgcaataatgtcatttcttcataacacctccagaatccatctcaattttcctttcaccgctaccaagatttgggcaccattcccttttagccaggcaattgcagaagcctcttgattagtctccttatacccaatcccttcctcccccatcaatcttagatttggctaccggacttattatcctacaatttggttgttggtcccaatgtttatgaagagggtaatagctttatattgtggctctcctcaacctagtcccgcttctacagaactaacaccctacttgattccttcatccaccttcagacatatgcatgtattttcacctacctggtctccctcccacaatttttttcatttccaaagcaggacagcacggtggttaagaccacgcactcgggggccagatatgctttactacttacttgctgtgtagtttgggcaacttatttaacctccctcttgtgcttctgtctgtgtatcactgaaaataacttattaaaaatattttctcataaaattaagtaggttaatgtacctaaaatgcttagaatagatgctggcacatagtaagtgctaatttttagcgactgccattgctattgttgttaatacctaaatcctgccctactccctggcccgatattttatagctcactgcaaatcccagagaactcggggaacctccgcagacatttaggtagaagtgtttgttcccttttcagcccatctgtggtaccacttatctgacccacacttagcaagtggattgagacttactaattattttcatgggaaataaaacctgaagaaatgactagcaataaaagataataaatggttagtaatgattgatagaaaaaagtagcacaggctctatagagtatgttctctgagggcagggacaatgcttcgtgtgtctttgtttcttacacaatgctttatgcgttgttattaacaaaattgagcccccatttttttttctgattcaatggaggatgtgatcagaagatcattaatagaccaatctgtttaaatagacaatgaataatcagataatagattgtcttgactggtagtgtatgaacgtgaagaaataaggagccaccttggttttggacaaagggttgtctaacccatctggacagtagttctggacatcatgaatgtggtggtttggtacgattagtttggtggcaggctgccaaatggaatgaaacaaaaagagggtgaccagattggagatcattgggtgggagggtatgagaacctgagcttggactctaggaatgaatggagaagaaatcttaaatccaagggcagatggtaaagaaacaatatataggatttgggagatcatagaggatgttgaaaaggcaagggtaaaaagtgactgctggatctcttccttggttaactttggagaattcaaattgggaaaaggttgtcttgaaggacaaaagatgtgtgcagttactggaccttgagctccaagatggcagagaccatgcatctcttgctcatcattggaaccccagggtctgggaccatccttgacacacttatacagtgagaggctgaaagggcatctcaaatgaattaaaggccacttaccttgatatctacacagtccaataagacatgttgtagacaattacctcccacctgtttaatgattctccggttctagttagccggcataatcaattttgctaaaaaggtatacctctcacgtcttgggaaggacgtcccaaataggcaacttacttaattccaggatgagtgacagaatctacagaccctgaggccatctcacttgtacttgccttaatgtaactagtaaagcatacctggcagtgcagcacctccacaggaaggtgctccagaaagcaattgtttgctctcaccctgctgagaagtagcaatatccatgtggcttaagggctgtagctgcagccatgagcagtgttagaaaaatatcaccaccatttgccagcatgagatgccaaactgcaaataagagacatgtcgattcaatgaagcagaaacatttcacttgtttttaagattacttgcgagaactttattgctatgtgtttgtctgcctttaaataagaaattgcatttttaaaaaaccatctcttctcttctccctacaaagggacgaggctttcctactcgggtgaatattgcctgtgctgcttaccgaagaaagggagcagtcttggcaagcatcttattagtctaaaaataaattattcagaatgcaggttcagatacagattgcagggagagataatagaataggttttccaagcctgatcatgctatgaagacgtggtgtgtgcttttcaggaatccacttaagtggaatcagctttgactaatacatactagaaataatattgctgccatccagctagtgtctgtggtacagcatcctcagaatgtcttcaagtatccacggcctctttagtctctgtaagtgcgcatatgtaaaagtgtatatgtattcccaagcaagcttcagaggcatgcttctcattgttcttttaaggaaatgtcttcctggccgcctgagaggggcatgtctcacttgaggtttgtctccctcctgctccccctgcctgggtgaaatagttgaccacatcagcagccgactgcagtttgtcatgtggtttctcatgtgatgctgggtctgcagcacttgggagcaagagtctttgtgactggcactcatggacagacagtggtgttcagggacagaacagattttggagggggtggggaggccaataaaccaagaaacgtcagaaataaaagtcgcatgaagtactctgatctctgtatttccttttttttttttttttttttgaaatttgattttaactcttgcttttttttatggtttgtgtctgttttttccacccccgctggcgccgagctgcgctgttttgtgtttctttttttttttttttttctattttttttttttaaattctgaagccagaccgtctttcctcacagctccacggctgcatctccgtgggcacgcaagcttcccctggttacctgagctgctcctgccgtctcccgcctgggcttcgccgtggtgcacccgatcccggaatcgtgcgtctgcgccctgcgaaagaaggacctgctggcggagctccggccggggtctcctgcctcgcagctgggcgaggggacttggaggacagggtgaagctgcagaagacctggggtgggatggctagagaggacgccaaggactggggaaggggaagttaggaataccttacatccaatgcccacccgtgctccgcagggcaagggcagccgtcgcctcggccgcgtgcacccagctcaggctgttcccagggatttagtctggggggacaacccatggcgagatgtggtggcattttacctcagagtggagctgaagatggataaacaaggtatctgatgtatctgcctgagaaggcagagctggagaaaggcggagcgagggagcgcgtgaaaagaaagagatgccgaatgccgggtgattgtctgccgcttgctgtgcattctcattctagggaggatggcataatttataacccagcacatggatagaggaactgtaaattgtagtctggatgtccccggcgctgtcgacgaaggaactgatgggctaggtgactgtaccagtgtccccagagaaaatcgcagcctcgcagcatggatttaaatgcatgtgcatgcatgtagagacatgaaaaaaggtttctgaccattttacacaggaagtctgtcactttgctggatcgggcttgattgcagcttgtgttttcagctccagttcaacacccatttcctgactagtgagacagcatggccaaagcagctgcatgcagaattttctttttactgtgaaagcaagccccctctgttttaactccttccagttctgaatgctctgtgctttgctaggaccgattgtggggttttgttttcttcttctacaaatccctgtaaacacagctgtattcagtaatggcaaaaaaattctatcctgtaaatagaaatctgatcaatttaatcaaaataaatgtatcccagatgactttgagaccagctggctaccacaggcttcagatgctaaatgctcagtggagatgaatacagtgttatatttacatgtttcagagtgccgggatcagcctataatttgcaaaaagaaattattttctaaagacgagaggtggtcctaccagctcacagctgatggttaggtacaggtgtaaatgctgttcatgtgatttggagatttgcagtgttgcatttcaaaaggcatgtgccatgaggcagagtatggctgttgttagtatggagaatgcttgcttctaacttgctgttatggagagccgaatgccctctgaatagcttctagtgaggttgagggcaggcacttgaggcttgttgtagattcagatgtgagagctggggttctccaaccccagctcagtggagtcagctcaaccctgggggtgaggaggtttcccagttgtcatggggagctcttctgggacgcctgtctggcccttccactgtttgttactaattctacaaaggcagctctgtgtgttggattatgtttggccagctgttgatgcattcctgcggatggggctgggtgaggatcttattactgtactttcaaactgtagatctgtgtgcagggatagtacagaaggaaaggaaaagcaataagttacagaatctgatcattcttacctctttctccagatagtcctagagtgaatccagaaaggctttaaagtgaaaagaggaaagagagagtaagtgattgggggtgggtggcatgaggagaagagaatgaaacagagcaagcgcacaagagaaaaacagccttagaacttcaaagctgcatagacaagcagaatgtcaccagcttgtaattagcagttcatggttgcgtcagtgactgtatctatccaagaataactatgtgatatgtgccacaaagtgaagaagatagtcataactaagttatcaaacccagttcaaacaagggcaaatggattaagaaattttctgtttgtaaatcaaatactgatggattacacagataagacttaactgaattctgcgtaattgaaggctgaattatcaatttgtcaggggggatatgttcattaaatgaaactgtgaacgcttaaacatgcaaattaatcatgcgagaaaatatcagtgcaagctctatcaatacaagatgttttactaaatagccaaaaatggcactgccagtctcctatctctgtatccacacataaatttttttgtttgtttttgtgcatttcaatagagagaagtcaaaagttacattcgagtaaatagggtaaattaaattctaaaattcccactttagaatttaaaaaacaactaaggagttttgatttttggtgatctcccgagtttaaaccttgaaggagcttttgctgtcttgaagccaaacagcagctagtcagtaatcgttatgggaagtcagggtaccacagttgttgagatttcaaggccacgttcacttccctcccttgtctcttgtgcttggagatttgggtgctactacagcctccacaaagagacagtgggaggagctgattggtccgtaggcttagaatgtttactcttatttgttttcagtgctcctccatggcattcattttctgtttgtatttgtgttcatgctgcacaattactcctgacctgctttgtttctctgcccaaagagaagtcaattttagttcagctctgtgtgtttagcttgctgggtaatatgtgcatatgtattgcattacccatgtatgcatttttctttttttaaaatgtggattagggaaaattgtagcatggaaagctgcatatattaaatcaatagctttttgaatcacatgtaatataatttaaatatactcactttgaggttgccaaaactgacattgtctgagcccgtttaatttacatcttcgatttagtcaagaagcggaacctgccagatcagaatagtgtattctgtgcacccaacagggtggaagacattattttgtttgtgttagttcaaacagctggtcattaatgcagtccccatttctagagcgaagtgctgctggacatgaatgcccgcctgattaatgctgcccctccgagggtccttcacccagcagtcatgctcgcagcagaataatgtagcatgatgtgattgcactctaacaggatagtatgtcattgtgtcaccaagcaattgaggttattatggggcagggcagacagacgggacagtggggttactagaccgtagcatttttagaaatacaggcctgacctacttagagttattctctctggctggcagctgcatggtacataaagtctcctgataggctgagtctgttgctagggggaattagcatgaatttttccacacacagactcagtggctgaatgataaaagctgactggaattaaagagatttggtttagtattatacagatttatgtgcctccttttctttctcaagtgcagagaaagagtgcaaaacacagattttgtttccatttgttctttgaccttcttgttctctccccctcccctcaagatgcatgaggggaggagggcagggcagttatgaaattttggttaatctctcactgttggggtcactgaaacgatgtcgcaaattgcaagatatttaagcttaaaaactgttgggaatgactaacagaaggttagattatttttcctcttctgtgcactaagctgttttgaagttgggcatgcatctttcatgcactgtatatttaaactctctttcccttttgggcttgaacaaaacatttatataaattcttttctatccaaacagattgaagcttgcaatctctgtcttgtttaaaacaaggtggtcaggattccagatttagataggaaaaaaatatatataccatttttgttattacaaaatattattttctggggtattgtgggtttggctcccttttcaaaaaccagcctgatgtggatgcttatggatgaaactgaactgctcctaccctaccctgttggcttcacaatgtataggaaaacataggtttttctccagaagaaaatctgcctgcagaatgtatctggaggttgttttccttgttgctgacatatgcactgcatgtagacaactcacataatcaactgtataagatgacccatttttttccttctcatggatctccaagtgtctgtggcttttaatagatcttttctagaggaggagtcttgatagatctttttaaggtaatctgaaaagccatcaggagaaaaattaaagcaacacatatttaagaatactttaatttttcttgttcttaattatatgctaactgtgcttaaactgcaatttctttctgttaccttttactgctgaaagtagtgattatccttgccttttagatttgaaattaattttcgtgagaacaccctgggatatcacaagtaaaaaagaaactgggctacataaaggaaaagaataatagagattcttgtaaacttgtcacattagttttttttgcccacgtgaaaaaggcaagagaaaatttaggtgtagatttttcttttcatttacattttaaaaaatatttggaactatttagatacataatgctttaaaacagtgattcctacttatagcggagactacagtcaaaacaaaataaaacaaatcctctaatgctatcagagccaagaaatctatcaatcatatatacattttttaaatccaggagtgtttacatttcagcatataaatcttatcaagctaaaatagagtatatattctgatgttgtaattgatcgatcataccctcactggctttgagagtccccaaacatttattgtaaaggtttccaactacactagcaatcttttgtaattgaataaaatgccaatttatatttgttgaataaaagattatctggggtactgctccttccgaaatgaagcaatttctttgttgttttaataagtgaacattttttggttttcttttgcagtatttattttgcttaggtcaatggacaattatttaaatatttaaatgcaaatatatagaaataaaatgtcactttaaaatcacttaagaaaggaaaaacgtcaacatacttttattaacattctttaataaacatatggctaatttgtatgtaaagcacagcctgtttccaggtacccagtccaatcaaatgtttatagtttgattaaaaataaattgatcacattataatagttcaatataagtcttatttggctgtttaggttgctaagaatttcccattgtttttatccattaccagggaggtaagtattcaataagtcaaaaacaaaaacaaagcaagcatattttaaaatgtcatttatgctgacttggctaagcttaagcttatacttaagcttgaatcctagatattcacttagacaatgtatgtcatagtattcatttcatcctttgccattcattaaaacaccaaaggagcgatcatcctcactcattgcatcaatcatttatttattaggtatttattttctgctcacacaggaggctaacttctccagttataaggttcaacatagaccaatgaggttttggtgggattggtgggtaaacaaaaaagggaatataagcagttgattgtggtgggccacgaagcgcaggtgaatcttgtgttgaatagtttccctgactgtattctgtctgacacctaatgttacttagtccttacaactttggggaagaactggtgcccttactatcagatgcttggagatgatcagctctcctgatgtcacagagaagctacatctcttccaaactgtctcaacacttttataatatgaaagatctatcagtaagtcagaatgtgccttttgtgaagtcataaaagcataatgtaaaccagtgatttttgacatcactgttaaaatgggtaatagtatctcaaccataatacctgaagcgcccaaactgtacactgccggagaccttatctgattccctcagcctgatgcctcctgggcttcctttttaccaggctcctgtcttattagaccagccatcacctggtggtattctttagtctgtttccccactagtctctaacccattcttcatctgtgtgccaggggcacagaagatgtttcacagacattagttgattaacaaatgaatgaatgagtgaattgatgagtatccagaagacagatgttaagaggaataatgaagtcttctatctgtggatgtatcaatggcatagggcagggatcaacaaagtttttctataaagggccagatagtaaatactttaggctttgtggactgtatggtttctatagcaactactgaacttggctggtgtagctaaaaagcagccatagacaatagtaaatgagtgagtatggctgtgttccaatcaaactttgtttacaaaaagaggcaaggggttggatttgcctgtgggttatagaccccaagttataatcattacctttgatattttaaggatgtgatttacacctataggtttactgaagatcagtgtattaaaaaaggaggaagatttcaaacaattcaataaaaattaagaagaagtgttggataaatattaattatttgcgatgagaactcagtgctaatcaaccaaattttcttttctcactgatgacacggaacaatttattttaaaactcaaagaggaaagcaaggattgttactctttcttaaaatataatggtattttattgctcaatatgtaaaaaggaagaatggaaaatttttaccttcaaaattatttttttagtgttggttgcccaggggcaaagaggaagtccagcctctttgtttgaagagctggaaaaaatttaaaacgtgtgaaatggtaactctggaagcacggccactgtgcatcatgttatcttttgcatattcttttaatcaacgtaaatactgtgctatttcaacaaactaggtcagatctttcctttgtcctatctctccagtcccttctctgttagtaattaatctgcaactgtagaggttctggatgaacccttttcctcctttctcttgctctacttgaggcctttccttgcctttctcctttgttgtagggcagctggtgttggccttatatgttggtggatggttttggaggcagtaaaccaggacggatcatgctctaaaaaccacaggcctgggaattaggcaaccttgtgtgtacatctcactcctgtatccaccagctgtggggctggagatgcttcagtgaacttccctaagcttgaacttcctcattcataaactaagggtgatgataatacttaccatgcagaggctttgggagggtgagatgagattatgaacataaagccctcctagaactttctaaatgtgcagcagaatttcactgctggtgctgtgactcctactaccgctcttgtttttataactgggagttgtcctgctatcaaggaagtgtgcattaggctttgacatcctgatggcatccttaagggtaattctccttaatgagagccttcatcaagagcatttattttggggagtcggatatcagaagtcttgaagccaagagcagagcagacacaggaacttagaataagtctggaggtatccagtatatttcaaggaatttgtgttcttgctgtttcacctctaattttgttgttgttgttgttggcttggtgtgttttagcatattctcttttaggattgtcctagagacaccgtttgtttcttgtctgtttttagagtaagaccaaagacagatagagcaaaaaggactgcccctctaccctaaggctgtgatttccttattttgaaactgtgctcaaggctgatcttctccagaaaatttgtcctgattaggtggcttgggagcaacacatgctcacaaacattcgtcagtcttcagctgactttgtgtgcaatgattttttaaagcacatttattcatcatcacctgactaacttttctatcacttccaggcctcttacgttccccttgaagtttttatggccccaaaatgtggccgaggttgtcctcttatgtaagcgcccatgagctcacaaagcaaagtacttatttttgttttttacctccctgatcacctccattagactgcagataccaaagggcttaccttaatatgatattcccagcaactagaagagccataggcacattctaagtgctcagtagatatttgtatagaaaataactgtcagagccttgttcattctgcatattctaataatttatattaaataagtcacttggaatattgctgaactattagtagtaactactactactaaattgatggtgaaattcatgagttaatctatcccagtaattgtagaatattacttaaaaataaagggttctatccacacagttttggaattagtagatgagaaaatgcatatactattgtgactccttctgagattggacccaactaattatacatttttgtttagacagcatgcagcatagagatgaagaagagaaaccaatttttttttaaaagcaggaagaataagaattattccaaagcaagaataatcattcttcttttgtagggatttcataaaacatgtatcttattctgtgagtgagacatgttctcagttctaacaaaccattgagaggcttattaaatgaaaagtgttcaggaatcatcaattgaacgtgatatttgatattttagcttgcctttatatttttcttaataaaaaaatcctttagttctctaacagaaatgttagaaaaatgttactttgatgcttttaaggaccctttcctaacccacaaggctaaagtatattaataacagagaggtgtaaggcaggaggggtgggggtgtaattgaacgtgtctggtcttcctgtggttttttccttgtggctgctggtggctacaaatggccatgtaccccaggggaagtgaatgcaacagcatgggagtgagagcgtttttgtgttctctgccaattattaggtgtgattgaatattttgaaagaagccagtacataaaaatggacatttggctagtgcctgatagaagtgattctttttccgcctgttttcttttcaaatgtgtttgatattctgactttagactctgcctacccctcttgttatcagaggtagacatcagtcttacaaaggacactcgatagatatggggaggatgacactgggtttagaatgttttttccttctctagctcccataggtctgtgttttcccttgttctgttatagggaagcctttgcttcatcttgttttgttccaagactgtagtaatcaaagtctataccaaaaaggcctttggatttaggcttttagttgtaagaatgaggaatgccaatattgtttcccaagcatgaccactgatacttttaattttatggtattttcagaataaaaggcataacagaatttgtaatttttataattttaaggaaatttctttatactcctttattggaaaacatcttctatagaatgttgcatttcatacttttaacagaaaacacaatagtagcaggagcagtgtttggtgatcattaatcttcactaggatttgagaactcttaattaaagaattatggaaggcctgggaattttttggcaacacatataaatataaaaagagagagtcttctagcaaaatattaatcacttacagccaattcaaatgatggccagcaaacagaatttgaacattgcatccctccttttgatcaattctccatgttgctaattgttagaaatcaggagtagagggcttgtcttcattctggagtcctgtttagagttttgaggaatcactttagcataaaggatggtactgtattgtcaggaatttgtatttccagcattctctttagaaccaatgtgccagtttttgccatcttagtcacatgtacaggtagcaaggtaaacatggattatggtctatatgtttgtacggctgctttgtgggggatcagtttttgataactagaaggatgacatgacgtatgatgtactcagtccttaaaggagcatttagtttaattttctttagacctatccaccaaactataagatccatggggacaagtttgtcaatttagctcatcatcatgcgatgcctggcccagcaaaaatgccatatacacatctattgaatgaaatggaagtaagtgggagtagtgttaagatatttgaaactgaaattttccatataaaccagtagctttctgttcaaaatgtaaaaataaaaatgtctatccatacaatataattttatgaatttctcacttttatttgtgtgaaataaaattttctgaagagaagtgtaattttaaccatgctattgctttttataatgcttagtgttgtaggatggttgcttatagataaacactattatggtagttattacttgagatttaacatttttcttctttataaaatcattcagtattatttgattaatttttagaagtatccataaagagaacaggtggcaccgtttttttccctctgagtagaagactaacttagaaaggttattatgatataatcatttgtttagcaggaattagaataagtatcttagaatggaagggaccttagaaataatctaatcctcccactgccagtcattttgcagataaggagattgggtcatggagcggttaagagatttgcccaaggtcacacagctagttttcatcagagctagaactatagctcacttttttttcttgattccagtgttctgccccgctatatcttaggcctcatttctgtagttcagaagtggtctacatttcttatattttagaagttatttgagcttgttcatcacctaagaaatgtatcactgagagctcgcatagggaaaatacgaggaaatactaatgccatgccatagaaatatatatacagtagcctccagtaccatagtttagtatggtaaaattcaacatactgcatcagaaagttcatggactgcaaactagaattgtggattaccaacctggctctgctgctaactagctgtttgagcttagctgggtcatttgtctctctagacagtgagagaatagcactttgatagttgcttgaggttgcctctagttctgttcctccaacagtctatcattgcccagaaaaagtgatcctgtatttttgaagctgtgcccaaaatatctctttattcaatcatggtctgtgaactagcgtgaatgaacagaagtctgtttccaggtggactaaagacatgacagttgaaattatattgtaagaaactgttgccctgctattgtttcccatattcaaggaaaaaggaaaaaaaaagtactagatggtacgctgtccagtatagtagccactagcctcatatggctatggagtacttgaaatgtggctagtacaaattaagatgtgctgtaagaaaatacggtctggattttgaaaatgtaaaatgaaaagagaatggtaaaatatgtatttcatttaatgcttgtgacaaggtaaatgataatattttggatgtgttgggttaaaatgataatattttggttgtgttgggttaaaatgaaaatattttggatgtgttgggttaaaatatgttattaatttttcattttactttttaacaaagtagctcctagacaatttaaaattaaatatgtagctcacatgatatttctatcggacagcttacatccatactacagcttgactcctttttaatttggagaataactctttgtgtcttagaagccttgtgaataccatggtgtgttgagaacactgagaatgtgctggagaatatgggaatgacaggtgactatgaagtcattgagaggagtaagattctcatggttgaggtaggggtttccttctggaagctgctagctatgctcccacatttatattttaatgttaatgagcttacttggaatgcttacaagtaacccggagatgggtacagtcagctaccaattcacaatcaatcaacagattgaaatcaatttccagggtccctctaatctctacagtgccaaatgtcttgccttttaaaggatttttccttttctaatgcagttcactggcttaaagtagatttagtctgaagttcttacaatgccaaaagacacaattacccacaggattcatgatgtttggaaaattacagaatttggggtagaatagatggaatagacaccctaaaggttcataaaggagttattataactttgccagtaacacaaaacatttgagcaataatgattgtaaacttgtgggataaccaccatcatcataacaagctatagggctctttgaaaatagcattgaatttaagtcttgaaagaatgaatagagcactgaactgattatgttgtttagtgtgtgtcaatattgccttaaactaagaaagtgtaactgtttattgaacatagtaatatttagacttacatatcttagaggttttctctatatggctgaaagctagctccagccttagagttgaaacggacatttttagcgaatggaaaaatagagattcaaacatagtaagtgattcagtggtgccatacctggggcccacatctgttgatttcaagtcaaatactgtttccatgttactgtggaaatacacttccataaatctactgttattttttaaacgttaactttaaaaagcactaaatcccaagattacaagatcacatcactaaagcacaagtcttccagctttataaattttcttgatgacttgtttcttaaattacagaataaaatgcagcaggacctattcagaacccccaaccctctatgaaagctacttatttataaacaaattaagtaggaaaataaataaattttaaaaacagagtattgagaaacaaatactctttaaacactaatggaacatcttgtttgctggctagaagaaaggaacacttgtgttgaacaactaatagtgactcttgaggtcaggacctcctgaaactaaaacaagtatcaaaggaaaaggaaagaaggatttgctttacctaatgactaagtaggctcctagggactgacacctctgcaagaaaacaactatgaaatctgggtataatgcaaaaagcagccacttgacaacactatagcagaaacacaagtaggcagagtctattagaggagtatcttcttggaggaggggaatcagatagagttattgctttttgtcaggacttttcctctttagacatggcatgcaggataacagagtgctgctgaaggaatctacagtccttcaagaaaggggaccagaaaactgaatccggggaaacctcagccaccagagaggaaaagagttacacgtgggattcccatattctgtctccaacataggtggcttacccatgattcacatatacatgaaacagattcaaagcctccagttaaagataaaatatctgaattgggaccagagttgtcatccagaaatcagaatttgcagttctgaggtgaaacaagataattttgtggtaaatttaaagggaagaacactcataggagaaaactaacaatccagagtctctacatctcaatattaataacgtctaggatgcaatccacaattacatgacacacaaatcattaggacaatggtgtatatcctcatgaggaaagaacattaactgatgtcaacaccaagatggctcaggtattggaagtaacagacaagatttaagacagctatcacgaccatactctatgcagtaaatacaccgtgcttatagtgaatgaagagatagaaatctctgccaaaaaataaaaaagataaagaaccaatgggctgggcactgtggctcacccctgtaatcccagcactttgggaggccaaggcgggtggatcatgaggtcaggagattgagaccatcctggccaatatggtgaaaccctgcctctactaaaatagcaaaacttagttgggcatggtggtgcttgcctgtagtcccagctactttgggaggctgaggcaggggaatcactcaaacctgggaggtggagattgcagtgagctgagattgcaccactgcattccagcctggcaatagagtgagactctatcaaaataataataataataataataataataatgacaattctagacctaaaaaatgcaatatatgaaaaagatttaacttgatggactaacagccaatagagtttacaaaagcaagagtaaatgaactttaatcaatagtaattattcgatatagagaatagagagaaaaaacagattgaaataaaaatgaactgcgcttcagagatctgttacagcaggggtccccaacccctgggcaatggtttagtaccagtctgtggctattaggaactgggtcacacagcaggaggtgagcagcagatgagcaagcattaccacctgagctccacctcctgtcagatcagcagtggcattagattctcacaggagcacgaactgtattgtgaactgtacatgcgaaggatctagtttgcacattccttatgagaatctaatgcctgatgatctgaggtggaaaagtttcatcctgaaaccatccccgacaacccttctgttctgtggaaaaattgttttccatgaaaccagttccttgtgccaaaaagttggggactgctgtgttagagaatattaactggtttaatttattacatgtacttgtagtctgagaaatagaagagtgaaacgatgaaacagaaaaaagtatttaaagaaataatagccaatattttcccaaatttgataaaaaacataaatatacaggttcaagttgacaccggataccaagccgaataaacagaaaggccacacaaaaacacagcatagtcaaagcagtaaaagtcaaagataaagcaaaaatcttataagcattgaaagaataataatgtgattagcacctggcttttcctcagagacactggagacagaaaagtatggaacatttttatagtgctaaaaaaaaccctgtcaaccaaagtgtctatatcccagcaacaatatccttaaaagtaagtattttctagactatcactgtgcaatacaattggacaataacggaaatatctgtgtctgtggctatctagtagagtagccgccagccacatctagctattgaacacttgaaatgtggctagtggttttgagaaactaaatttttatttaacataattcaacttaaatagccacatgtggctagtggctaccatattagaactctagaatacataaacttgaaacactaagataataattaaatgattctcagtagccaaagaacataaagttattgccattaggactgtcacaattaacaactaatatttaacatggtaagtttcatatgatttatccataatcgttattcagctattctcattactggaatggtaaactaggtaaattagtattgactaaagatagtgttataaaattaagatagcttttgaataagaatatttaagaaatatattgattgaacagctaatataaatagttcaaaagaatatcattaaatctttatatatttttatatttaaatatatatgtttactgtaacacttacaaagaaatacatttaagcaatgtgatgtctctcaagtagaaaggggaaggcctcctttgccctatctctgctccctactccagaggtgatccccgtgaacagtttggtgtgtatctttccagacttgtttccatgcacatctgtatacatgcacatctgtgtgcttctacttatttggaagctttacttttttttttttatttccataggttattagggaacaggtggtatttggttacatgagtaagtttttcagtggtgacttgtgagattttggtgcacccatcaccctagcagtacacgctgcacccaatttgtagtcttttatccctcacccccttcccaccctttccccctgagtcccaaaagtccactgtgtcattcttatgcctttgcatcctcatagcttagctcccacttatgagtgagaacataacgactttggtattttattcctgagttacttcacttaaaataatagcctccagtctcatccaggttgctacaaataccattaattcatttctttttatggcttagtattccatcatacatatatatatatatatatatatatatatatatatatatagttatatagttatatagatagttatatatatatagttatatagatagttatatatagttatatagatagttttatatatagttatagttatatatagttatatatagtcatacatatatacacacatcatatatatagtcatatatatacacacacatatgtgtatatatagatgccgcagtttctttatccactcattgattaatgagcatttgggttggttccacatttttgcaattgtgaattctgctgctataaacgtgcaagtatcttttttgtataatgacttattttcctctgggtagacacccagtagtgggattgctggatcaaatggtagttctacttttagttctttaaggaatctccacactgttttccatagtggttgtattagtttacattctcaccagcagtgtagaagtgttccctgttcaccgcacccacagccacttctattgttttttggttttttgattatggccattcttgaaggagtagggtggtatcgcattgtggttttgatttgcatttccctgattattagtgatgttgagaattttttcatatgcttgttggtcatttgtatatcttcttttgataactgtctattcatgtccttagcccatattttgttggaattgtttgtttttttcttgctaattgtttgagttcattgtagattctggatattaggactttgtcagatgtatagattaaaaaacatttttaattgacacaattttatatatttgtggggtactgtgtgacatttcaatacatgtatataatgtgtaatgatcaaatcacagtgattagcatatctgtcacctcaaacctttattgtttatgttagtaactttccaaatcttttagctgtttgaaaaaatacaataaattattgtttactatagttacctaaagttctgtagaacactaggacttattctttctatctagctgcaattttatagacattaaccaatctcttcctgctcctgtctctctatctcttcccagcctctagtaaacactgttctgctgtctacatctatgagatcaacttttttaacttcaacatatgaacaagaacatgcagtatttatctttctctgacttatttcacttaacacaatgtcccaggctcatccacgttgccatgaatgacaggatttcacttttcttttatagctaaatagtattccattttgtataaattccacatattctttatccattcttctgttgatggacacttagtttgatctcatatcttggctattgtgaatagtgctgcaataaacatgagagtgctgatatctcttcaacatactgatttcttttcctttggatatatacacagtagcaagattcttgaatcatatagtaattctatttttagctttttgaggaaaatccccataatgttttccttaatggctgtagtaatttatattctctccaacacagcatgagagtttcctttttcccacatccttgccagcctttgttattttttgtctttttaataataacccttttaactgaggtgagatatctcattgtggttttgatttgcattttcctgatgttatttttttaatatacttgtggccatttggaaatcttctctggagaaatgtctgtacagatcctctgcccattttaaaattggattatttgtttttttagctcttgtgttgtttcagtaccgtgtatattctggatattaacctattgtcagatgtatagtttgcaaatattttctcccattctgtaggttgtctctttactctgttatttgtttcctttgctgtgaaggaactttttactttggtgtaatcccacttgcctatttttgcttttattgtcattacttttgaggccttaactataaaatatttgctcagaccaatgtcttgaagcatttcccccgttttcttctaacagtttcatagttttaggtcttatattgaagtcttttattttgtgttgatttctgtacatagggagagataggggtctagttttattgtttatggatatccagttttcctagaaccatttattggagagggtgttctttcctcaatttatattcttggcccctttattgaaaatcagttgtctgtaaatacatggatttctggcccccttattctgttccactgttccatgtgtctgtttttatgtaagtacatgctgttttggttactaaagctttgtagtatattttgaagtcaggtagtatgaggcctccagttttgttctttttgctcaagattgctttggctatttagggtcttctgtggttccatatgaattttaggatttttttttttctatttctgtgaagaatgtcattggtattttaatagggatttcattgaatctatagatcactttaggtagtatattcgatttaataatattcttccaatccatgaatctgggatatctttccatttatttgtgataagtttctttcatcagcattttatggttttcattgtagaggtctctcatattgttggttatatttattcctattttattttaaattttttaatagctattgtaactggaattgctttattgatttatttcagctagttagctgttgatgtgtaggaacactactgatttttatatgttgatttcgtatcctgcaacttcactgaattcacttatcacttctaaaaatttcaatggagtctttaggttttctctatataaaattaggtcatctgtaaacagggacaatttgacctcctcttttccaatttggatgccttttatttttttctcttgcctaactgctttggctagaaattccagtactacattgaataaaagtggcaaaagtgggcattcctgttttgtttcagttcttagaaagctttcagcattttcttgaatagtatgaggttggctgtgactttattatatattgcttttgtgtttaggtttgttccttctttacctaatttgttgatggcttttatcatgaaggaatgttgaaatgtatccatgctttttctgcatctattgaaatgatcatatggtttttgttcttcactctgttgatgtgatgttttgtatttatttggtttgtgatataatttggctctgtgtccccacctaaatttcatctggaattgtaatacctaggtgtcaaggggggggcctggtaggaggttattggataatgaaggcagttttgcccatgctgttctcataatagtgagggagttctcaggagatcgcatgctataaaagtgtttggcagttctccccctttctctttctctttctctctctctctctctctctcttctctctctcctgctgtcacataagatgtgccttgctttccttttttttatttttttatttttattattattatactttaagttttagggtatgtgtgcacaacgtgcaggtttgttacatatgtatacatatgccatgttggtgtgctgcacccattaactcgtcatttagcattaggtatatctcctaatgctatccctcccccctcccccaaccccacaacagtccccggtgtgtgatgttccccttcctgtgtccatgtgttctcattgttcaattcccacctatgagtgagaacatgtggtgtttggttttttgtccttgtgatagtttgctgagaatgatggtttccagcttcatccatgtccctacaaaggacatgaactcatcattttttatggctgcacagtattccatggtgtatatgtgccacattttcttaatccagtctatcgttgttggacatttgggttggttccaagtctttgctattgtgaatagtgtcgcaataaacatacatgtgcatgtgtctttatagcagcatgttttataatcctttgggtatatacccagtaatgggatggctgggtcaaatggcatttctagttctagatgcctgaggaatcgccacactgacttccacaatggttgaactagtttgcggttgaactagtttacagtcccatcaacagtgtaaaagtgttcctatttctccacatcctctccagcacctgttgtttcctgacattttaatgatcgccattctaactggtgtgagatggtatctcattgtggttttgatttgcatttctctgatggccagtgatgatgagcattttttcatgtgtcttttggctgcataaatgtcttcttttgagaagtgtctgttcatatccttcgcccactttttgatggggttgtttgttttcttgtaaatttgtttgagttcattgtagattctggatattagccctttgtcagatgagtaggttgtgaaaactttctcccattttgtgggttgcctgttcactctgatggtagtttcttttgctgtgcagaagctctttagtttaattagatcccatttgtcaattttggcttttgttgccattgcttttggtcttttagacatgaagtccttgcccatgcctatatcctgaatggtattgcctaggttttcttctagggtttttatggttttaggtctaacatgtaagtctttaatcgatcttgaattaatttttgtataaggtgtaaggaagggatccagtttcagctttctacatatggctagccagttttcccagcaccatttattaaatagtgaatcctttccccattttttgtttttgtcaggtttgtcaaagatcagatagttgtagatatgcggcattatttctgagggttctgttctgttccattggtctatgtctctgttttggtaccagcaccatgctgttttggttactgtagccttgtagtatagtttgaagtcaggtagcatgatgcctccagctttgttcttttggcttaggattgacttggcaatgtgggctctattttggttccatatgaactttaaagtagttttttccaattctgtgaagaaagtcattggtagcttgatggggatggcattgaatgtataaattaccttgggcagtatggccattttcacggtattgattcttcctacccatgagcatggaatgttcttccatttgtttgtatcctcttttatttccttgagcagtggtttgtagttctccttgaagaggtccttcacatcccttgtaagttggattcctaggtattttattctctgtgaagcaattgtgaatgggagttcactcatgatttggctctctgtttgtctgttattggtgtatgagaatgcttgtgatttttgcacattgattttgtatcctgagactttgctgaagttacttatcatcttaaggaggttttgggctgaaacaatggggttttctagatatacaatcatgtcgtctgcaaacagggacaatttgacttcctcctttcctaattgaataccctttattctcttctcctgcctgattgccctggccagaactgccaacactatgttgaataggagtggtgagagagggcatccctgtcttgtgccagttttcaaagggaatgcttccagtttttgtccattcagtgtgacattggctgtgggttttgtcatagatagctcttattattttgagatacgtcccatcaatacctaatttattgagcgtttttagcatgaagcgtcgttgaattttgtcaaaggccttttctgcatctattgagataatcatgtggtttttgtctttggttctgtttatatgctggattacatttattgattttcatatgttgaaccagccttgcatcccagggatgaagcccacttgatcatggtggataagctttttgatgtgttgctggattcggtttgccagtattttattgaggatttttgcatcaatgttcatcaaggatattggtctaaaattctctgtttttgttgtgtctctgccaggctttggtatcaggatgatgctggcctcataaaatgagatagggaggattccctctttttctgttgattggaatagtttcagaaggaatggtaccagttcctccttgtacctctggtagaattcggctgtgaatccatctggtcctggactttttttggttggtaagctattaattattgcctcaacttcagagcctgttattggtctattcagagattcaacttcttcctggtttagtcttgggagactgtatgtgtcaaggaatttatccatttcttctagatttgctagtttatttgcatagaggtgtttatagtattctctgatggtagtttgtatttctgtgggatcggtggtgatatcacctttgtcattttttattgcgtctatttgattcttctctcttttcttctttattagtcttgctagcagtctatcaattttgttgatcttttcaaaaaaccagctcctggattcattgattttttttgaagggttttttgtgtctctatttccttgagttctgctctgatcttagttatttcttgccttttgttagcttctgaatgtgtttgctcttgcttctctagttcttttaattgtgatgttaaggtgtcaattttagatctttctgctttcttttgtgggcatttagtgctataaatttccctctacacactgcttttaatgtgtcccagagattctggtatgttgtgtctttgttcttgttggtttcaaagaacatctttatttccgcctttatttcgttatgtacccagtagtcattcaggagcaggttgttcagtttccacgtagttgagcggttttgagtgagtttcttaatcctgagttctcgtttgattgcactgtggtctgagagacagtttgttataatttctgttcttttacatttgctgaggagtattttacttccaactatgtggtcagttttggaataggtgtggtgtggtgctgaaaagaatgtatattctgttgatttggggtggagagttctgtagatgtctattaggtccgcttggtgcagagctgagttcaattcctggatatccttgttaactttctgtcttgttgatctgtctaatgttgacagtggggtgttaaagtctcccattattattttgtgggagtctaagtctcattgtaggtcactcaggacttgctttatgaatctgggtgctcctgtattgggtgcatatatatttaggatagttagttcttattgatgaattgatccctttaccattatgtaatggccttgtcttttttgatcttcgttggtttacagtctgttttttcagagactaggattgcaacccctgcctttttttgttttccatttgcttggtagatcttcctccatccttttgttttgagcctaggtgtctctgcatgtgagatgggtttcctgaatacaacacactgatgggacttggctctttatccaatttgccagtctgtgccttttaattggagcatgtagcccatttacatttaaggttagtattgttatgtgtgaatttgatcctgtcattatgatgttagctggttattttgctcgttagttgatgcagtttcttcctggccttgatggtctttacaatttggcatgtttttgcagtggctggtaccagttgttcctttccatgtttagtgcttccttcaggagctcttttagggcaggcctggtggtgacacaatctctcagcatttgcttgtctgtgaagggttttatttctccttcacttatgaagcttagtttggctggatatgaaattctgggttgaaaattcttttctttaagaatgttgaatattggcccccactctcttctagcttggagagtttctgctgagagatccgctgttagtctgatgggcttccccttgtgggtaacccgacctttctctctgtctgccttaacatttttctcttcatttcaactttggtgaatctaacaattatgtgtcttggagttgctcttctcgaggagtatctttgtggctttctctgtatttcctgaatttgaatgctggcctgccttgttagattggggaagttctcctggataatatcctgcagagtgttttccaacttggttccattctccccatcactttcagatacaccaattagacgtagatttggtcttttcacatagtcccatatttcttggaggctttgttcttttctttttattcttttttctctgaacttctcttcacgcttcatttcattcatttcgtcttccatcactgataccctttcttccaggtgatcgcattggttactgaggcttgtgcatttgtgacatagttctcatgctgtggttttcagctccatcaagtcctttaaggacttctctgctttggttattctagttatccattcatctaattttttatcaaagtttttaacttctttgccattggttcagacttcctcctttagctcagagtagtttgatcttctgaagccttcctctcgtcaaagtcattttccatccagctttgttccattgctggtgaggagctgcgttcctttggaggaggagaggtgctctgatttttagagtttctggttattctgctgtgttttttccccatctttgtggttttatgtacctttggtcttcgatgatgaccacatacagatgggtttttggtgtggatgtcctttctgtttgttagttttccttcttacagtcaggaccctcagctgcagatccgttggattttactggaggtccactccagaccctgtttgcctgggtatcagcagcagtggctgcagaacagcagatattggtgaaccgcaaatgctgctgcctgattgttcctctggaagttttgtctcagaggagtacccggccatgtgaggtgtcagtccacccctagtggggggtgcctcccagttaggctcctcaggggtcagggacccacttgagaaggtagtctgcctgttctcagatctgaagctgcatgctgggaaaaccactactctcttcaaagctgtcagacagggacatttaagtctacggaggttattgctgtcttttgtttgtctttgccctgcccacagaggtggagcctacagaggcaggcaggcctccttgagctgtggcgggctcctcctagttcgagcttcccagctgctttgtttacctactcgggcctaagcaatggcgggcgcccctcccccagcctcgctttcaccttgcagtttgatctcagactgctgtgctagcaatgagcgaggctccgtgggcataggaccctctaagccaggtgcgggatataatctcctggtgtgccgtttgtgaagcccgttggaaaagcacattattcgggtgggagtgacccgattttccaggtgccgtctgccacccctttctttgactaggaaagggaattccctgaccccttgcgcttcccgagtgaggcgatgcctcgccctgctttggctcacgcacggtgcactgcacccactatcctgcacccactgtccggcacttctcagtgagatgaacccggtacctcagttggaaatgcaggaatcacatgtcttctgcgtcgctcacgctgggagctgtagactggagccgttcctgtttggccatcttggctccacaccgccttgctttcctttcaccttcggctgtgattgtaagtttcctgaggcctccccagccatgcagaacagagccaattaaacttttttcttcataaattatccagtctcaggtaatacctttatagcagtgtgagaacagactaatacagagaattggtactgggatagtggggtactgctataaagataacctgaaaatgtggagacaactttggaactgtgtaacaggtagaagttggaacagtttggaaggctcagaagacaggaagatgtgggaaagtctggaacttcctacagtcttgttgaatggttttgaccaaaatgctgatagtgatatggacaatgaagtccaggatgaggtagtctcagatgaagatgaaaaacttgttgggaactggagtaaaggtaactgttgctatgcattagcaaagagactggcagcattttgcccctgccctagagatttgtggaatttttaacttgagagagatggtctgaaattggaacttatgtttgaaagagaaggagagcataaaagtttggaaaatttgcagcctaaacatgtggcagaaaagaaaaaccaatttcctgggaagaaattcaatctggctgcagaaatttgcatacacaacaaggagccgaatgttaatcatcaagacaatgtggaatatgtctccagggcatgtcagaggtcttcacagcagcccctatcatcgcaggcctagaggcataagaagaaaacttggttccacaggctggactcagggccttgctgctttgtgcagtcttggaacgttgtgccctgcatcccagctatggctaaaagggaccaacatacaactcaggtctttgcttcagagggtgcaaggcccaagccttggtggcttccaagtaatattgggcctttgagtgcacagaagtcaagaattggggttgggaacctcagcctagattgcagatcatatatggaaatatctggatgtccaggcagaaatttgctgttggggtggagccctcatggagaccctctgctaaggcagtgtggaagggaaatttggagtcagagctcccacacagagtccccactggggcattgcctaggggagatgtgagaagagggccaccatcctccactagaatggtagatccaccagcagcttgcaccatgctcctggaaaagccacaggcactcagtgctaacctgtgaaagcagccttgggggcggtaccctgcagagccacagggacagagctgcccaaggcctttggagcccatcccttttgtcaaagtaccctggatgttagagatggagtcaaaggagatcatattggagttttaagatttaataactgtcatgttggcttccagacttgcatgcggcctgcagaccctttgttttggccaatttctcttgtttggaatggagtcatttacccaatgcctataccctcattgtatcttagaagtaactaacttgcttttgattttacaggctcacaggcagaaggaattttccttgtcttggatgagacttttgacttggacttttgggttaaggttagtataagctaagattttgggggactgttgcgaaggcatgattgattttgcaatgtgagaagaacgtgagattttggaggggcgagttgcagaatgatatggtttggctcagttccccactcaaatctcatctggagttgtaatctctagacattgagggaggggcctggtgagaggtgattggatcatgtgggtggtttctgccattctgttctcacaatagtgagggagttctcagaagatctgatgctgtaaacgtgtttggcagttccccacttctatctctctctctctccctctccctttctcctgctgccatgtaagacatgccttgtttcccctttgccttccaccatgattgtaagtttcctgaggcttcccctgccatgcagacccgtgagtcaattaaatctgttatttcatagattaccaagtctcaactagtatctgtatagcgcagtgtgagaatggaccaatacagtgtgtgtatgttgaactgtccttgcatttgtgggataaagctcacttgatcatggtgtatgatgtttttgatgtgctgttgaattcggtttgctaatattttgttgagaattttgcatctatgtttatcagggatattggcctgtagttcactgttgttgttgtatccttatctggttttgatattagagtaatgctggtcttatagaatgaatttggaacaattccctccccttagatttttctggagtagtttgataaaagttggtattagttctttgtcccccccccccacttttttttttattatactttaagttttagggtacatgtgcacattgtgcaggttagttacatatgtatacatgtgccatgctggtgtgctgcacccactaactcgtcatctagcattaggtatatctcccaatgctatccctccccactcccccaaccccaccacagtccccagagtgtgatattccccttcctgtgtccatgtgatctcattgttcaattcccacctatgagtgagaatatgcggtgtttggttttttgttcttgcaatagtttactgagaatgatgatttccaatttcatccatgtccctacaaaggacatgaactcatcattttttatggctgcatagtattccatggtgtatatgtgccacattttcttaatccagtctatcgttgttggacatttgggttggttccaagtctttgctattgtgaataatgccgcaataaacatacgtgtgcatgtgtctttatagcggcatgatttataatcctttgggtatatacccagtaatgggatggctgggtcaaatggcatttctagttctagatgcctgaggaatcgccacactgacttccacaatggttgaactagtttacggttgaactagtttacagtcccaccaacagtgtaaaagtgttcctgtttctccacatcctctccagcacctgttgtttcctgactttttaatgatcgccattctaactggtgtgagatggtatctcattgtggttttgatttgcatttctctgatggccagtgatgatgagcattttttcatgtgttttttggctgcataaatgtcttcttttgagaagtgtctgttcatgtccttcgcccactttctgatggggttgtttgtttttttcttgtaaatttgtttgagttcattgtagattctggatattagccctttgtcagatgagtaagttgcaaaaattttctcccattttgtaggttgcctgttcactctgatggtagtttcttttgctgtgcagaagctctttagtttaattagatcctatttgtcaattttggcttttgttgccattgcttttggtgttttggacatgaagtctttgcccatgcctatgtcctgaatggtaatgcctaggttttcttctagggtttttatggttttaggtctaacgtttaagtcttcaatccatcttgaattgatttttgtataaggtgtaaggaagggatccagttcagctttctacatatggctagccagttttcccagcaccatttattaaatagggaatcctttccccattgcttgtttttctcaggtttgtcaaagatcagatagttgtagacatgcggcgttatttctgagggctctgttctgttccgttgatctatatctctgttttggtaccagtaccatgctgttttggttactgtagccttgtagtatagtttgaagtcaggtagtgtgatgcctccagctttgttcttttggcttaggattgccttggcgatgcgggctcttttttggttccatatgaactttaaagtagttttttccaattctgtgaagaaagtcattggtagcttgatggggatggcattgaatctgtaaattaccttgggcagtatggccattttcatgatattgattcttcctacccatgagcatggaatgttcttccatttgtttgtatcctcttttatttccttgagcagtggtttgtagttctccttgaagaggtccttcacatcccttgtaagttggattcctaggtattttattctctttgaagcaattgtgaatgggagttcactcatgatttggctctctgtttgtctgttattggtgtatgagaatgcttgtgatttttgtacattgattttgtatcctgagactttgctgaagttgcttatcagcttaaggagattttgggctgagacaatggggttttctagatatacaatcatgtcgtctgcaaacagggacaatttgacttcctcttttcctaattgaataccctttatttccttctcctgcctgattgccctggccagaacttccaacactatgttgaataggagtggtgagacagggcatccctgtcttgtgccagttttcaaagggaatgcttccagtttttgcccattcagtatgatattggctgtgggtttgtcatagatagctcttattattttgagatacgtcccatcaatacctaatttattgagagtttttagcatgaagggttgttgaattttgtcaaaggctttttctgcatctattgagataatcatgtggtttttgtctttggctctgtttatatgctggattacatttattgatttgcgtatattgaaccagccttgcatcccagggatgaagcccacttgatcatggtggataagctttttgatgtgctgctggattcgttttgccagtattttattgaggatttttgcatcaatgttcatcaaggatattggtctaaaattctctttttttgttgtgtctctgctcagctttggtatcaggatgatgctggcctcataaaatgagatagggaggattccctctttttctgttgattggaatagtttcagaaggaatggtaccagttcctccttgtacctctggtagaattcggctgtgaatccatgtggttctggactctttttggttggtaaactattgattattgccacaatttcaactcctgttattggtctattccgagattcaacttcttcctggtttagtcttgggagagtgtatgtgtccaggaatttatccatttcttctagattttctagtttatttgcgtaaaggtgtttgtagtattctctgatggtagtttgtatttctgttggatcggtggtgatatcccctttatcatttttattgtgtctgtttgattcttctctctttttttctttattagtcttgctagctgtctatcaattttgttgatcctttcaaaaaaccaactcctggattcattgatatttttgaagggttttttgtgtctctatttccttcagttctgctctgatgttagttatttcttgccttctgctagcttttgaatgtgtttgctcttgcttttctagttcttttaattgtgatgttagggtgtcaattttggatctttcctgctttctcttgtgggcatttagtgctataaatttccctctacacactgctttgaatgcgtcccagagattctgatatgttgtgtctttgttctcgttggtttcaaagaacatctttatttctgccttcatttcattatgtatccagtagtcattcaggagcaggttgttcagtttccatgtagttgagcggttttgagtgagattcttaatcctgagttctagtttgattgcactgtggtctgagagatagtttgctataatctctgttcttttacatttgctgaggagagctttacttccaagtatgtggtcaattttggaataggtgtggtgtggtgctgaaaaaaatgtatattctgttgatttggggtggagagttctgtagatgtctattaggtctgcttggtgcagagctgagttcaattcctggatatccttgttgactttctgtctcgttgatctgcctaatgttgacagtggggtgttaaagtctcccattattaaagtgtgggagtctatgtctctttgtaggtcactcaggacttgctttatgaatctgggtgctcctgtattgggtgcatatatatttaggatagttagctcttcttgttgaattgatccctttaccattatgtaatggccttctttgtctcttttgatctttgctggtttaaagtctgttttatcagagactaggattgcaacccctgcctttttttgttttccatttgcttggtagatcttcctccatccttttattttgagcctatgtgtgtctctgcatgtgagatgggtttcctgaatacaacacactgatgggtcttgactcttcatccaatttgccagtctgtgtcttttaattggagcatttagtccatttacatttaaagttaatattgttatgtgtgaatttgatcctgtcattatgatattagctggttattttgctcgttagttgatgcagtttcttcctagcctcgatggtgtttacagtttggcatgattttgcagcggctggtaccagttgttcctttccatgtttagtacttccttcaggagctcttttagggcaggcctggtggtgacaaaatctctcagcatttgcttgtctgtaaagtattttatttctccttcacttatgaagcttagtttggctggatatgaaattctgggttgaaaattcttttctttaagaatgttgaatattggcccccactctcttctggtttgtagggtttctgctgagagatccgctgttagtctgatgggcttccctttgagggtaacccgacctttctctctggctgcccttaacattttttccttcatttcaactttggtgaatctgacaattatgtgtcttggagttgctcttctcgaggagtatctttgtggcgttctctgtatttcctgaatctgaacgttggcctgccttgctagattggggaagttctcctggataatatcctgcagagtgttttccaacttggttccattctccccatcactttcaggtacaccaatcagacgtagatttggtcttttcacatagtcccatatttcttggaagctttgctcatttctttgtattcttttttctctaaacttcccttcttgcttcagttcattcatttcatcttccatcactgataccctttcttccagttgatcgcatcggctcctgaggcttctgcattcttcacgtagttctcgagccttggttttcagctccatcagctcctttaagcacttctctgtattggtttttctagttatacattcttctaaatttttttcaaagttttcaacttctttgcctttggtttgaatgtcctcccgtagctcagagtaatttgatcgtctgaagccttcttctctcagctcgtcaaagtcattctccatccagctttgttccattgctggtgaggaactgcgttcctttggaggaggataggcgctctgcgttttagagtttccagtttttctgttctgttttttccccatctttgtggttttatctacttttggtctttgatgatggtgatgtacagatgggtttttggtgtggatgtcctttctgtttgttagttttccttctaacagacaggaccctcagctgcaggtctgttggaataccctgccgtgtgagatgtcagtgtgcccctgctggggggtgcctcccagttaggctgctcgggggtcaggggtcagggacccacttgaggaggcagtctgcccgttctcagatctccagctgcgtgctgggagaaccactgctctcttcaaagctgtcagacagggacatttaagtctgcagaggttactgctgtctttttgtttgtctgtgtcctgcccccagaggtggagcctacagaggcaggcaggcctccttgagctgtagtgggctccacccagttcgagcttcctggctgctttgtttacctaagcaagcctgggcaatggcgggcgcccctccccccgcctcgctgccgccttgcagtttgatctcaggctgctgtgctagcaatcagcgagattccgtgggcgtaggaccctccgagccaggtgcgggatataatctcgtggtgcgctgcagtccgaaaagcgcaatattcgggtgggagtgacccgattttccaggtgcgtccgtcacccctttctttgactcggaaagggaactccctgaccccttgcgcttcccaagtgaggcaatgcctcgccctgcttcggctcgctcacggtgcgcgcacccactgacctgcgcccactgtctggcactctctagtgagatgaacccggtacctcagatggaaatgcagaaatcacccgtcttctgcgtcgctcacgctgggagctgtagactggagctgttcctattcggccatcttggctcctccccctctgtattagttctttgaaagtttggtagaattcagcagtgaagccctctctccctaggcttttctttgttgggagtgagttttttttgtttttttttttaaattactgactcaatctcatttctcattattggtctattcaggatttctgttactttccgattcagtcttggtaggttgtatgtgtccaggactttatccatttcctctgggtttttccatttgtttggtgtacaattgttcataatagtccctaacagccctttgaatttctgtggtattagttataatgtcttcttgttttgtttctgttttatttttgtctttttttttcttagttaatctagctaatggtatatgctagtcgattctcgcactgctataatgaaacacctgaggctgggtaatttataaagaaaagaggtttaattggcatatggttctgcaggatttacagaaagcgtggtgctggcatctgatcagcttctggggtggcctcaggaagcttacaatcatggtggcatttgaagtggaagcgagagagagaagaggagatgcaacacacttttaaacaagatttcaggagaactcattcactatggtgagaacagtaccatgctatgagggatattcccccatgaaccaaaaacttcccaccaggccccacctccaacattaggcattacatttcaacatgagatgtgggtgaagataaatatccaaactatatcatgatgtgtttgattttattttaattaatttagagacagtgtctgcctctgtcccccaggctggagtgcaatggtgcaatcttggctcactgaaatctccacctcctgggttcaagcaattctcatgcttcagcctcccaagtagctgggattacaggtgtgtgccaccacactcagccaatttttgtatcaatatttttagtagagacagggtttcaccatgttggcaaggctggtctcgaactcccaatctcaggtgatccacctgcctcagcctcccaaagttctgggattataggtgtaagccacctcacctggcctatttactttatttttaatttttttaacttttattttgggttcaaggctacatgtaaaggtttgtttacatcggtaaacttgtgtcacaggggtttgttgtacagattatttcatcacccatgtattaagcccagtaccgaatagttatctttgctccccttctccctccttccaccctctaccctcaagtagaccccaatgtctgttgtttccttctttgtgttcagaagttctcatcatttagctcccacttataagtaagaacatatggtatttggttttctgttccttcattagtttgccaaggatgatagcctccagctcatccgtgttcttgcaaaataagtagtctcattattttttatggctgcataattttccatagtgtgtatgtaccacattttctttatccagtctgtcattgatgagcatttaggttgattctgtgtctttgctatcgtgaacattgctgtagtgaacattcgcatgcatgtgttcttatggtagaatgatttatattcctctgggcatatacccagtaatgggattgctgggttgaacggtcgttctgcttttagctttttgaggaatcatcatactgctttccacaatggttgaactaatgtacgctcccaccaacagtgtattgtgttcccttttctctgcaacctctccaccatctatttattgagtttttaatactagccattctgactggtatgagatcatatctcattgtggttttgatttgcatttctctaatgatcagtgatactgagctttttttcatattctttttggccacatgtatgtcttcttttgaaaactgtctgtgtcctttgcccactttttaacggagttttttttcttttggaaatttaagttgtttatagatgctggatattagacttttgtcagatgcatagtttgcaaatattttctcccattctgtaagttgtccgtttactctgttgatagtttcttttgctgtgaaaaagctcttaagtttagttagatcccatttgtaaatttttgcttttgttgtgattgcttttggtgtctttgtcataaactctttgcctgtttctatgtccaagatagtattgcctagattgtcttccaggcatttcaaaaaacctgctgtttattttgttgatcttttgcattttttgtctctttcatttatttccactttgatctttttttttccccttctagtaattttgggcttggtttgttcttgctcttctgtttacctcaggtgtactgttaggttgtttatttgaaatttttctactttttgatgtggacacttattgctataaagttctctcttagtactgcttttgctgtataccataggttatggtatattatttctattttcatttgtttcaagaaatttttacatttccttcttaatttcttcctcaacccattgatcattcaggaagatgttgtttaatttccatgtgtttttatagtttccaaagttcctcttgtcgaattctagttttattccattgtagtcagaaaaaatacttgatatgaattcagtttttaaaatgttgttaaggcttgttttgtgacctagcatatggtctatcctggagaatgttctatgttctgatgagaagaaggtgtattctgcctttgttggatgaaatgttctgtaaatgtctgttaggtccagttgggctatattgcagtgtaaatctgatatttctttgctggttatctatctagatgatatgtttgctgagagtgaggtgttgaagaccccagctattattgtattgaggtttccctctctctctttagagctaataacatttgacttatataactgagtgctctggttttgggtgcatgtatacttagaattatatcccgttgctgatttgatccctttatcattatatagggaccttccttttctctcttgacagttttttacttaaagtctaatttatctgatgatataagtatagctactcttgcttgttttggtttccatttgtttgaataatctttttccatctcttcaccctcagtctgtagtgtctttacaggtgagattgagtttcttgttggcagcatatagttgcatcttatttcttcattaattcagccagtctacattttttaaatggggaatttaatccattttcattcaaggttattattgataggtaaggacttactgttgtcattttgttagttgttttgggttttttttttttttttttttttggtatatcctttgtttcttcttttattgttgatctttgcagttttctgatttttttttttttgtagtaataggatttgattcctttctctttctcatttgcatatctgttctaccagtgagttatatattttcatgttgtttacgtgatggtagttgttatttcacttccagttgaagtacttcctcatgcatttcttgtaaggctagtctactggtgatcaatttcctgaagttttggttgtctgggaaggactttatttctcctttgtttctcagagataactttgctggacatagtattcttctctgacagcttgttttctttcagcactttgaatatatcatcccattctgtcctggtttttatggttttctctcctggtctgctgagaaatctgctgttagtctaatagggactcccctatacatgacttgacactcttttcttgttgtttttagaattctctatcatttacttttgacagtttgactataatatgccttggagaagaactttttgggttgaaactttggggagctttagagcattgtgtatctggctttgcatatctctcccaagacttggaagctttttagctattatttcattaaattttctatgacttttcccatcttttccacttctggaactgccataatgcaatcatttgtttgcttaatagtgtctagtaagtttgacagactttcttcattcttttctattcttttttcttgtttgactggattatttcaaaaggcatctcttcatgttcagagattcttctgcttgatgtaatgtgttgttgaagctttcaatgataatttttattaaattcagctccaatatttctgtttttttcatttttgatacctatctttttgttgaatttctcaaatgatggttttttcattttaattgaattgtctttttaatattcctttgcctctgagttttcttaaagttattattttgaatttcttttcaggcaatttaaaattttcatttttgaggtcaattactggagaattactggagaattactgtgctttgtggtgttatacttcactgctttttcatgttcttgtctcccttgcttgatatctgtgcatttaatggaacattcacgtcttccagttttgtagtgtggctttcatgggaaaaaactttcttctacagatatgtcctagggtgtcagttgggtagggtgcgttggcttttctttgggtgggtgcaatagtgtagtctttgtacagtttcttcagctatagtcaacatcagcaatgcctgtgtgtgcctcaatggcttaggctgtagagatttgtatggctattccacctacttgggctctgctcctcggggggttgggtgctgggctggtccacgctttggagaagtgaggggctggtaaatcagtggcttgagtcagctcaggctctgctcctcacattaaatcttgaaagatgtgaatttcattacctcttagttacataaagccatatacaaactctttgttgtttgttttaaatcttatctctgacttggttataaatgattgcacttttctactatttctaactacagtatagcagtgctgaaacatctggggggcaaaagaaagttagataggctagtaacaccaaagtaatgctgaaacctggaaggaaagaaaacacattactttcctctccattcttctttgctcccctttgaatatatgcttattataatagcaagctgtgtgaccttgagccatttatttgtctggagccacagcttctttacttacaaaataaagttaatgccatttacatctcagaaattgtgaatatacatgagaaatatgtttataaaatctcatgatatgcttgtcacacagtaaggtttggtaaagtgaatccttcaacagcgttccccaattctttctcttgtgctgaaagtggactatctatcttagaaaagaccatgcaaaccaaaatagaatgacttggctacagagcagtttcactgtctactgattaccaacctgtcttaatccagtgagatagaacactcctccacgcaggttacctgaagccagtgtattacttacagataggacaacagaagcctatgattcgtaaaagcctcaagaaagctagtttggcagatggggtttcatctgcatgtgccacatttgcactgcagtcgagggtcccaagaaagcactccaccctaggttttataccccagcataacatgattcactgtgctaatgtgttgaaggacatgctgtttctatgagggattagaacagaacctaggctgttcaggctagtttctccctatcttaagatgttgcattctcagcatattctatatttattcttgagaactatgagtaaaaaagaggggtaactgtgtcagtccaaagatacctgaagaattgtcctgtgctaacagcagaaaagtttccagttgatttaaaatcaagtgatttgcaatgtagttacaaacaaaattattaagtgcctattttgtatttgaccccatggtaatactgattatgataataataaaatatattaagcaattatttttacctgtcattctttgaagcattatctcatttacttctcccagaacccagtgaggtagttagtattattatctctcatttacagatgaggatatactgagtttgcatgtttaactcatccacagtcacattactatttgtggtggaggagtgatttgaacccaacctatctgactgatttttttaaccagattgttaagaaaataaacatcagccatcccaaatctccccatctaatccagaggggaagtttacagcttgaaataattactctcaagagatttcagagaagtggtagaaaaccaacatggccttggtcttctaccactaaggttttatttttaaaattaatgaataagtaggtcttgagttgccattttatagctttgttcttagtttaacaagaaggagcaagtaggaagacttttcatagcccaacccccaacacagttgaaatcagcattagcatagagcattagaaataagattcagcatgcatcttgccatgtgaccaatcctggcctccatcacagaattctagttacgtggtgaacctgggagaccactctctgtccccatcctggacgccccctatactgcagatcctccctgacatgggaccccggaccctagggctcaggaaggctcaaccaggacttaacagcagtttccgaagggccttctgagcccctcacccatctcctaagtctggccagactgacaggaccagcaagggatggggcatgggaaagattagaaatatagaataaaacagcatcgtggagagccttgaaaaccaatttaaaatagttttatcttctaatagtaggtcctagcttagcatcctagtttagcagcctttacgctttggatcttgactccttagtaggttgtaaaatttgtttattgggtcacaaccaacatacctgttttaatgaactgggatagggtaaaatggaaaatagaaacgtgtcttgcagttaataagggcttttgtgaaacatttgttttagttatatacagtcaattcttgttatgtgtagtagttctattctataaagtcaccaccaacaccgaattagtaattacaaaaccattgctccctgtgtaaatacaagattaggttcctttgttcctctggtcacaaaattttcatcaacagattaatacataaccttattttatgagtgtttctgtataaggacacctcatttaatatatattgttgattcattaacattaaactctaggctaaaagcactatcactcatacctgaatgaaacttctcgaacacatgtatttttctccctgaggtccatcacagccttcttacgctgtcgaacccagttaccactttagcactatgcttgggggccattttaaacatgaaatcaccaattaaaaaaagcacaaaaatgcaaaaaatgtgacatcaaataggccttgaaaagaacactttttgagctgaaataagaagacagagcatcacttttttcaacctcagctgggaacacatatgtcaggtactaacattttcatgactctacatatgtctgtgactgaccacaaacatgctttgagtatggatttgggagctacaaataaatttagcaaataggtgaatttgcaaatatagaatttgtaaataatgaggatcaactgtttgtgtacagacacacaaatacacaaatatgtttactaggtctacgagcttgtaatgtaaaatgtatttctcaaaagaaaggatttttggtttgttttttagacatacatccctaaataatcagattgctgaggaatgacacagtggacattgctttaagatgtaaacagtaagcagaatggggtttcgaggcaagcagcctagattagaagacttctatagtaatctaaccccttgaagcaatgagtgcaaaagtgggcctggggactagggagaattaagccaagaaaaaaaaagatgataacttggttacaaactgaatatgtaaataaagaaggaaaaattgatgcttattctgaaagtatctggtgtagaaattagaagggtggtaggtatagtgagatatgttatatcttggaaagaatagagctttgaatgctggtggaatccagtttcagtcttgcctctatgactttactagacatgtgatctttggcaagtcacaaagccttctgcctcatttttacaatcatgccatttaaatatcagttaattgctacagttaaatgagtcaatatactatatatgtgacattcgtagaatacactaacacccaggatgtagctgcaatataaataggtgatatatctgtattatgtgtaattattcataatatgtttattatatctacatatttatatatatacatgcaaactatagtataattacacctgaagaaatattgggacatcaaagaagagttactcatcaggccatgaaattaggagatggcaataaagttgaaaggccaggattactatatatgtggattatcagtttttcaaagcactagagtacaggtaatatatattaaaattgcctgacaaaatttaaactttgtttgagaatgcatgctaggatcttgcaaccgccataatcataaatatcaatttttaccatattggcacagctcaaaattgctagtagagaggaacttctgattgatggactaccaaatacgtaggcttttactgtaatttgttctacaggttacagttagtattgtcaaagcacggcaggcaacattatagattttaaggctgcagtatctttatatctcccatgatattaaatataattcaaacacagaaaaatgctcttctctcattatgtcttttctttttgatgagagatgaataggtccacttgagaaatgattatatcgactgttgtactttaaattttctttagcactacaaaactggcaagaagtggcaagtcagtaagtccaaatacacagctgatatgtgatttcatatcacagatattctgtctgcagcacaacagaacacagggtattgagttatcccccaatgaattaaagtccctcttgcatcctttacataccaatttcattaatattaataattactaattctagctaacacttgccaatgcataatgggaactgcgtttttaacaaatgttgcctaacaaagactgttatttttttctatatcttggttgtggtacagtctgatagctttcaaagaacaagccaaattgtcaaacgctgttggtttgtaatgtcatgttcgatctggagctgagaagtgcggcctcaggtttctggcctgtcttttatgtcacagaagcacagaattgttaaacaatctggggaaattgaaagcagcaaatgcgcaataaaattttctctgtagttcagtgctacataacaaaagagacccataaactttgttccattctggcattggatggtgacttctctttgggaacggcggccacaacagatgtaaagaaaaacagaactttaaaaaaataaacttcaggaaatagttttcaagtctttatttttccctgtgtttcagctaatgctcaaagctttcctaaaatgttctgttggaaatagtgggactggaataagctctattttccattttgtccccttgtttcagggctttcagatgtccttaataaccctgaacttgtagaatgttttaattaagaacttcactgttagagtataataacataaacctaagatccccctgtgataatcatgctttgtttatggttttacaacaaacttgtgttttatcctgttggtatatttattgtatcttggcatttcttttgatgatgccaaaaaaatcccagaagcttaaagagggagagacaacctttgaagccactttgacttttgttttttttcttgacaaagtgttttatctctgaagaattcaattcagtacatgggtcttatgagtacatttattgtactaaaatgtcatatttgcttagatcaaatgaagatcaactacactgaaaataagatagataactattttataaaagaattcctatctttctctgccaagaacactgtatgttttttccttgcattaggaaatggggataattttgacacttttcactttattttagaaagagcttgtacttttgttttgtaaggaaaataaaaaaggtaagcatggtagggcacagtggcttgtgcctgtaatcccagcactttgggaggtcaaggctggaggatcacttaagcccaggagttcgaggctgcaatgagctatgaatacaccactacatcccagcctgggtgatagagcgagaccttgtctgtgggaaaaaaaaaaaaaagtgtgagtgatactgtttattacgaagcttaatttgcattgaggttaaatgttaatgggattctcctctcttctttttctaactctgaaatcccattctaagccttgaaatgggcagagcaaggtaggagtctccagcagggaggaggaggggagttgtggtggctcagagcaacatgtcagacccgagagggtcagtactgatagggcacagcctgtcaagggctgtcagagccttggcagggtgacaaggatgttcacatgtggggacaggctggtgtggggttttggaggacaagctgagtgaggcaggtatctagaggtagagtggattggaatatggacccccaaaatatttgtccaagtgctaactcctagtaccaaactctgtattaatttctcagagctgctgtaactaattatgtttaacttgatgacttcattcaacagaaatttattctttcacagttctggagaccagaaggccaaaatcaaaagtatgggcaggcttgatttctttagaagactccagcggagaactgtgtctccttgcttctggtgggtattggcaatccttggagttccttggcttgtaggcacatcgcttcaatctctgcttctgctttcacgtggggctcctccctgtatgtgtctgtgttgcctccttttctgactctcataagaacacttgttattggatatagagccctccctaatccaggatggtctcatcttgagatctttatcttggttatgtctacaaagacccttattccaaataaagtcacattttgagattttgggtggacatgtgttttgatgtgccactattcaacacactaccaaagaggtcactcatcacgtggtttcagagatcaagaggagtgagaatggcatccctgtgaaggggtggtttcttgtggggcatgaaagcttatgcaggataggagagtatctatgctagaagtcacccagcataaatgtcagaccccaagtggggtgatgaggcgagatgagagattggttacatatggtagactgatccaataggcaagtaagtatattgagggtgagaggagccaagtttctgtcatagaagcaaattacaaatataaaaaaggagaaaattatggagttgaaggtactggtgtgaacttgtaatttgtaataaatgagctatattaatacatggagatgtaaatgtatgtgggtgtatgtgtgttttataatacctagctctgttcactgaaataggctggcaacatatccactgcgatagcaactagcacatttagcatccatatcttggcttctaaatactggtcttcaccagaaagagagagtttttcttgggaaaatgaccagatttcatagagggagtacattgtatagagggagtacaatatcaagcattttataccagaaagtaaggaagtcctttaaaaaaataatggagtcgtgtcaaaagggcgcaaaaatcatcctgaagaagctcccataagccaaattgggaataatttgaccatcaaagtaaacgatagtaatgtattaccgctcattaaagtacaaaaccgttaagtccatcattatcaaagtaagtgagtaaattgaaaatttggaatgaatgagatatttacatactttcaaatctatcccccacaaaatatttactaatcacaagggggaaaatgaatacattttgaatggagaaacatgccgatgccacctgaactgagtgatcaaagtgaacatcgtcagtgatagcataaatcaaaattacttgtcacccacctgatagaatgcaatgagaaacatctgtgatattcctgtcagatgcatcatctgaatcttatcatgagaaagcacaataaagccaaattgaggcatgttctaccgaataaatggatggtaattttcaaaagtcttagagttttgaaagccagggaaagactaatgaactaatgaaggcatctagagagacatgataactaattgcaatgtgtgtttctgaactggacacttattttgacaatcaaatctgaaaattagagagtagtaatatctcaacatatcaattgcttaataaatacccagagcagagtaagcactcagtttaactatgatgatgacaatgatgacactgacaatgattactgaaggaccgcatgaaaaaatacacctagcaggggtggggggagcggggagggatagcattaggagatatacctaatgtaaatgacaagttaatgggtgcagcacaccaacatggcacatgtatacatatgtaacaaacctgcacgttgtgcacatgtaccctagaacttaaagtataataaatatatatatatatatattaaaaaaaaagaaaaaatacacctatcatctatctactcaatatcctggaattctggaacaggagtgttctggattcatttgcaaaaaaactggttccccaggtctaatcaaattaaattgagaggtaaatttaaattatatgtattttttatccaacagagaaataaaaagcactttgccaaacagttaaacacttgcgacccagataactaaactcttcagacctaggaattctaaaattaaattgctttcatgaaagtaaaaaattcagtcttcttccaacaaccaaagaggaatgaatatgaaaagagaggctgaattgtcccaacactgaagagttgggagcaattcattgaattgtagaactggaagagatagtgtaagtgtgccaggatctttctataatgctagtttggaagactgatccctcattttccaagggaaaaataaatcccagtgtcatagctgcattcctgtgtagatctttgcttaggttttctaaaattcagagctcaaagtatatcatcctttgtatttaaggaagtcttatgggtatcctcacttactcatggtgcaataatattcctgcagattctacatctccatccatgggccactgtttcagcaacctcagccagtgcaacacaacctcagccaagaagagtatgcagagaaaggagtcccctacctgccacaaaactgttgtctgaaaactgtctcatattgtctcaagttgtcattcattgtgaattagacctgtttaacatgtaatctgcaacatgcttcactgtctaattttccagagcccctcatataaggaactgtattattggtataatcatcatggtgaagaagttggtatgtgggggagagatgacagaaacagagagtaagtcagagctggctgcctgacagataaaaaggaaatgaccaaaaaaaaaaaaaaagacacagaagaatactttgttgtccacacagaaaagggaagtgtaggtaagacagcagtagactaagattcttaagactcaagttctagtcttatttattagctatgggaggccttgagggagttctagaattaagtgatctctctttataaaataggaacagtaataacttcctggctaactccctggctgtctcacaatgctgtagtagtaagaaataattttataattaaagactattttagggctgattacatttttgggcagtggctcatacatgtaatttcaacattttgggaggccaaggtgggcggattgcttgagcccaggaattcaagaccaggctgggcaacacagaccttgtcactacaaaagaaaaaaacattagctaggcgtggtgatgtatgcctgtggtcccagctactcaggaagctgagacaggaggatcacctgagcctgggaggtcgaggctacagtgagccatgatcacactactgcactccagcctgggaaacagagtgagactctgtctcaaaaaaaaaaaaaaaggaatattttacacttcaaggttctatacaaatgtaaaatatcattctattacttatttataatgctgattattctttaaatgactttaaaatgttaatctctgcttgagcctacggagaagtatgtaacaaatttgtgaaggattggcattaaacatagtcaaaataaaacatagaaattatggtaaataatttaactggtaaaataatctaagtggtagttctcaggtaagtggaaattcgattagctgattgtttaggattcttggttataagtgacagagacctgactaaaagtacatgaagcacataactgagaaggttgtggtatggctcagcagaaatgggaaaatcttgggactggttcgtgttttatttacattatctttgttcccaggcagtctctgcatgtaagtggcaaagatgactgtctgaaaatatatacctacttttttaaagggctatctcaagccattctggagaagcaccaaaagccactttgcttatactgggagaatagtttgctttccctaatttgtgatgagtgaaacactgaacagagacatagaataatattctgtagttcagggttggtgtaatatggccagtgggcggaatctggtcctcagactgattttgcaaataatcttatagaaacacagcaacacccattcattacatgttgtttatggttgctttggggttacaatggcagagttgagtagttgtgacagagatcactaggctcaccacatctgagatatgtactgactgaccctgtacagaaagtttgctgctcttagaggaatgtgtgtttctagtgtcagcaataaacttcttggatttgttttgttttctcatctttacatgatagttgcagactagttgatccttgtgacctgtttttgaatgccactgtgtattctgtcagggccctctgattctgtttcttatggtgctgaatgcacaatttaatgccctggaatttccttctgtcttctgctaaactcatgcctcttcagatagttaaaatcctgttctaccttagaagtctccagagttattttcctaaattaagaagaactggctttgaagttactcattatgccacacacaatggttgaaaagagcatctcttatgtactgtgtatatttcagcatccactcagcttcttaggtagaaaaggaagagtcttccacagtgtattttatccatatttgggtcagaaactcttctttaccacggagcgtgatggaagaaagatatgggatggtaacagtaggccagggatgtaataatcacaaaatttgagatattttgtgactggtgactcacgcctgtgatcccagcattttgggaggccaaagcgggcggatcacctgaggtcaggagttcaagaccagcttggccaatgtagtgaaacctcatctctactaaaaaaatataaaaattagctgggtgtggtggtgcacacctgtaatcctagctactcaggaggctgaggcaggagaatagcttgaaccaaggaggtggaggttgcagtgagctgagattgtgccaccactgcattccagtctgggtgacagagcgagactctgtctcaaaaaaaaaaaaaaaaaaaatctagaaaaagatctccaagattcaatcatctaattatttcttttaaaaatgagaaaaatgactcctggtcagcttttaccttctttttccaactgtcttgacaatactttcatattgggcttttaaagtctcaagtaataggtttttaaaacctcagctgataaaagtataaaaataaagttaaaacatattaaagacaaaacccaagaatcagcttcctcttccttcattactcttgcatgggtgttggctctaatttctccatctagttaggcagtcctttgctttttattgcttgtttattgatgacatttgccatttgtagcaatagtaatagaatcatctatatatttgtggccttgttgaatgtagaaaaaggatagtggcattttctaattgtgtaaccctataacaccttgacgggggactacagttcatatgctggaccttttgtgtttgttcatggcgggtgggttgctttaatatacttagcacattgtcctaattgccatccttttggggagggctatatatccaagctaatatggtagcatttttgttttaacatagagctgacccaaggtagacgtaagtgttgttcatttttgcctaatactaataaaattacctaattgttgaagcttggagcttgaatctaggcattttatttcatttcaagtacaccctagtattttaaagcataaatatcctactatcctcaacaactttagaacaaaaataaatattttaacaagaaaaaagcatgccatgacaagctgtaacttagtaaagaaagacaaggaatggtctctatagaccgagaaaaaataggtcctcagatatatttataccaaaggaatgttatgaatgtaaaaaacagtttgactcccccccccccgccaaaaaaaaactccacaaccctatattttgttatcacaagactgttttagtgaataaaacagtatgaattggttttacctgtttccatttaatacttattaactttataatcgtatagcctgagggttttaacttcaagtacagcatgatgactataatagttttacacaaggcaaatgtgaaaaacagaagtaatttcttttaaaaagtgtgaaatatctaaaaggtatgacttcaatacatcaactcaggtgagacagacatgtaacttctttttccatgtttaaacctaatattgcttttgtgcctctgaaggctcggagtttccatgccttcttaggacatgccaccctctccacacctggatgtgttcaccaacccagaagctcttggaaccccatcatttggggtttttatggagtccccattaagtaggtatgactgattaaatcactggccattggtggttgactcaatctccagcctctcttccctctctgaaggtgaaggggtgggaaggtgaggctaagttccaaccctcggatcacagggttggttcctctgcaaccaggcttcatcgtgaaacaatacagggcccaccgagagtcaccccattagcaaactcagatgtgattgaaaggggcttattatgaatatcaaaagacatttctctttctcctattactcagacagttacaagggtttcagaagctcttgcaccaggaactgggaacaaagaccaaatatatatgtcttcttctattacaatgtcacaggtgtgacagagtaggtaaatggagtctcagagagtccccagagtattccatggagccacaaaatgaagaataaatggatggttctccccatgatcaaaagtggcctgaaaatacttgagaatgagtcataacttaaaaggctgtatagtagaaaagaatgcacagaggaccgaatgtaaaagaaggcaccccagtctcagctagtgtggatgcatgccagtgtagaaagatgctagtgtggctacattggtgcactgaagaccaaactcctgcatggccccacatccttgataccttagatctatatcatcccctaaaacttaggtgttatgacattcaggatatgctaccccatcattttttaggctgaaggaatttgagaaaacagaagcaggaatgtaattgcccagtgggttcttcctgccctgtgcacagacaaaaccagttcactgagaccatggtattgcagttaagaaagagtttaacaggaggctggccacatggaagaattacagttattacaaattagtctccctgaaggctcagaggtcagggtttttcatggatagttcggtgagcagtggattaggggtaagtgctgctgattggttggggatacaatcataggggtgtggaaaatggtccttgtgtgctgagtcacctctgggtgggaggccatgggacccattgagtcatgagtcacgaggctgggttgggtcagtgtgaaaaacatctcaaaagaccaatcttaggttcaaaataggtgatattacctgtaggagcaattgggaaagttataaattatatgacctcttggccccatgacttctgagcagtaagagatgatagaaactaaacctacattttatcagcactcaggcctcttccataatcctaatcttgtggcctttcgttagtcttataaaggtggtttggtaactgccctcaagcaaggaggggatcagttttagggaggtgctattatcatccttgcttcaaagttaagctgtaaactaaattcctcccataattagcttggcctacacccagaaatgagcaaagacagccagcctgtgatgttagaagcaagatggagttagtcatgttagatttctctcactgtcataatctttgcaagggaggttccaggaaggtcatcctacctttcccctcacccttctcatgtgacacaggtcataaagcctaggaaggattttccgacctttccctgaagcaggtcgtaagaccctcattggggaggtgccatttctagaccaagagaaaaggcacatccttatgtctgaagacacagggacacagagaagaatctgaacaaacaggtcttgctaagttccccccagtttgttttcattagatcatgcccctttattcaatgctgtttctccacaactatccatttcttcatcaagcctagcataaaaaatacaggtttcacggtttctttgggtcttcatttccttataaagtctcctgtaccatgtaaaacttaaataagtttctctgcttttctcttgttgattctgtcctttgttttataaccctcagacatgaacctagtgatgagtgaggggaagataatttattttcctctacagatgcaaaagggaaaagggaacaatccctaaacggaagttatgatccagggatcagaggctcaaaagcaagattaggtttaaatgtagaaaaatacattcctctttcattttagatatcccaaatgcccaaatcaacccagctatttctcagaagtctgtttcccctccaccctctgctcctctgtgtagtgaaactgtctcgtttgggagtaaaatggcctggctttccttactgagtatactctcaagactattgcctattacttttttccattccttcttgagaactacgctttttaaaacaagaattgactccatttatctttttcttttagccttctgctggggtatgccttctctaaagcaatgaataaaaaatgctttagctgaataaatggggcaaggatcaaggagtacaagctaatatttcacaatattatcctgccataaataaaagtatggtttaaatgacaatggtggggttaggagttacaggtcactgaaacaccaccttattcatgctaccagccccttggctttcctgatggcagcagggaagcaacacataggtagaattatgagccaacatcgtgactggagagggattgaaaatcttatttgttgtcttcctagactattacagttatctgttgaaattagactcaattctttggcgaaagtactcatttttaaggtccataataaattgtaactatgtagcctttgttgcatgagtttagtatgagctgattggtgggccacagtgaaaggcagagggaaatggatgttaactaagaggtagaagtccccttgaagttctgaccctgtcactaatgaagtctttatttccgtatttagtaattgccttttttttttttttttgagacagagtcttgctctgtcgccaggatggggtacagtggcacagtatctgctcactgcaacctccgcctcccaggttcaagcagttcccctgcctcagcttcctgaatagctgggactacaggtgtctgccgccatgcctggctaatttttgtatttttagtagagacggggtttcactatgttggccaggatggtctcgatctcctgacctcgtgatctgcccacctcagcctcccaaagctaggattacagacgtgagccaccatgcccggccaactgccttctttatatctcattttaaaaatttataacaaagaagtgggttgattttcaagacctagttgtgttagtttgaatgagatgcatacatttggcaagtctggggtctaagaaaagataaagatctgaatgctgaaaatctagagaattcaggttactgggggataacttaaagtcactagggaattcgggttactggggggataacttaaggtcactagggaattcgggttactggggggataacttaaggtcactagaacccaaatgcagggaagagttgggtgctctttggcaaataaacattcctgacttagcatttttcttaaacccgaacgtgccagctgtttttttgtttttttgtttttttgttttgtgacctcagccaggcttgcgtgtttattcatcacatattctaagctcatatacaactgtgacctgatccagccttcaaggaactcactcttgattttaggaatctttccaccacttcgatttcatcttactcctgaaacagtcagccagaactgtctaattcagtctatacttctgatacaaaactctacccagcaaccactatggttttgttgctttaggtacgtgttagaaagcacccacatcaatttacagaaaatccttaactgaatctctagtcccagaggagtcatattttattatatggtgctttttatttaaagagatcggtttaatagaaattactcaggcatttgaagtgatagctttaaaatgtgggactggggaaaataagaacacttgacctctctccataaaattgaattgttctttaggtttaaagttttgacagacaaagagaaagtgagagcaagtgagggtgaaaatatatccttatttggtaatgagtacccattaagaggacagtatattacatttcatcttcttacttcacattcctgttttaaggatttgtgagcaaagtgctgtgagacctctagagttaagaggctggagataggtagttttgatggtattttaaggagtgctccataatgtgtagtgtctgagtgctgaagcttaatcagcttcaattaaatccaaaacatactgaatagctcctatgtgtctggcattgagctgtgtgccaaagtggtggaaagatgtaagagccactgaggcttagagatgaaaaggatcttggagccactggtttcctgcctgctggagtttcaccatcaaggaccctttcgttattttccttctcccatgcattttattaaaatttttggtttagtaaaccaaattcactaatgggatgttattttcatatcaaagagtataattctgccaatcaaggcttctgatcagcataaaataattaggtttcatactgaatgcacaaattctagtcaaaagcaaagccatttgatgacatgtctgctatgttgccatttgctttaagagaggtaaaggtagcctgacttctgttcactctgtagtacagaatacattgttaacaagtcataggtatgttcttttaggtttctaattactgtcagcctctcatttcagacaggtgatgtgataaggtgaaatgattactatatttagactcaaaagtcctgagtttgagtcctcgtttaacgatctagtccatgagcttcagttttctcacctgttaaatggaaatgatgattatttcctggaaattgcatttccaggttgttttgaatgataaatgatatggtgtatatatcagctgtttgcaaaccagaaaaagctattctatggtaaacacatgcagtgggctgaattgtgtctcccaaaattcatatgttgaagtcctcacccccagggcctcagaatgtgactgtatttggatctagggtcttcaagagataactaagttagaatgaggtcatttgggttgatcctaatccaactgactgatatccttataagacgacgaaatttggatacagaaatacacagaagacagggagaagatggccatctacaagctaaggagagaggcctcagaagaaacacacctgccacaccttgaatttggacttctagccatcagaactgtgggaaaataaatttctgttgtttaagccaggagtcctcaacccccgggctgtggacctgtaccagtcggtggcatgttaaggactgggctccacagcaggaggtgagtggtgggcgagtgagcattactgcctgagctccacctcccgtcagatcagcagtggcattagattctcataggagcacaaaccctattgtaaactgagcacgcaagggatctaggttgtgcgctccttacgagaatctaatgcctgataatctgagattgaacagttttatccccaaaccatcccctccaccacccccgtggtctgtggaaaaattgtcttccacaaaactggtccctggtgccgaaaaggttagggaccagcggctcaagccacccagcctgtggtactttgttacggtagccctggcaaatgaatacaacacgttttagactatgatgttacacatgcagtgtgttgagagccaaagaacccaaatgattcgtggtatctgcccttgaagagtttttaatctttttgggcatgatgaaacatacacatggaaaataaaatagcatataaccaagtgcccaaatcagtaataaatacagttgactccataaacatttaggaaccttctatcccatgtttccacattctatcccagtggcttttgccactaaatttcttcacccactattagactgatgttttcatctttcagtatcagactcaagctttaatctagaaagagggggtggggggataaatgctatactttggaaccagtccggatattttaagtatgtttttaaaaagtataatcctcacaacatgaaagttattagttctatttttcaggtgagaagagttaaggtcaaacagacgaaagctagttagtggagggactggtattccaagcccattctggttaaactaaatcttgtgttctttccactagaaaactgctttttgtcttaattataattttgtgacaaggatgtatagtccattaaggaatatatacaacagaagaagcatttaagtggacttgaggtttgtgaatctgaactagtttctatcgactttcacatcagcagctcctattctggggaaagagaatggaggctgggagtgatcctgacaaaccttgatgtgcaggcttgtggagaaactggattcacacccaggctcgtggagtgtgggagaggctggcctgtcacaatatcaggacagcctctcttaataacactgcagaaggaatcgagggccctgtggtttgcggtcagtgtgcctcttgtgccaactttggcactacaatgtcttcaatcacattatcttccaaaccggctcttcatcctatgtccttatttctgctaatggtattcatttctcttattcatggactctgggaatcttggtggtattaaaacctgtctcttctttccccctcgatcttccacattccatttcctttcagcagaatcccaagccttcaccatttttcatttttggtgctgtttcagagttgctgtgaactttacctgggtcctctatcaccttacccagccatttgtcattctgcctggtaaagggttgagcagatttatctatatgaatgatcttatttaagctattctgtacaccttctgctacttaaacaggctctatgcttccacatctgctctctatctgcctatgtgactcaaacttcaattgtccatctcagacatcacatcctccatgaagccctcttgggttatttgaagtaatctctcttctgggctctcatagcattactgcttgtaactctttcaaaagatgaattttgtgctgttgtttacttaatgagtacaaatttagtgataaatttgaaaaacttgtgtccatgtttgataaatatgaaaatctcatcattttcaatatttcttagaatttcaaaatgtactaaatattattaaaaaccaatcatggcaattttaacattgagtattcttttttgaaatatgaatgctcctctctcaagactggtatactttctcactctactcccttttcaagtgcccttatcgaactttgctgatgaaatcatcttttcttagtttgttagactttggatggtggagacctgtgcctgctacttctctcatctcctgatacctaatgcatagtgttcagtaagtatttatttggtgataacaatatcaaaaactagataatgcttagaagatccaacaccttccaaaatctctgttaaccaggtactgaaatatggtcaaccagatgagctgaaatgtcaagaacttatagacacacatggtttcatggttgtgaaactagaagatgtggcatattttacacaatggagggaagagcaaaggttatgcatgtgcggaggcagagcccctaggcaggtttccctcttttccttcctgtgcactgatttttattttggtgaactgaaacaggggtctaacaaactggtatctcatttgtctttataaacagaactgccagattggctttgcaattcagggccctgtagggtgcccacctcctcagtttgggcagcagcattacatctgagtcttagaataaaaatggaaagcaatggctcaacccattggtttgtcaccatccacatgaaggatctctattggtaaaaaaacagactcccgtgttcaaggccctggggctggaatcaaatccatcattcatttatttcggttttttaaggctaaatacatagggaagaaaatgaaatgtgagaaagctgtgcattttcaatgtcatcttgaaagtgagtatctttagacacataaagtagatgagtggttaacttgggctgggagagggagtgaggagtggttgtacatggcacaaggtttctatttagtgtgattgaaatgttctataatttgattgatgattgtacagttctgtaaataaactaaaatgtattgaattgtataattaaaacatgcagattttatatttaaaatatactttgataaaagtgttttaaaaatgaatatctcatagggtagaatgaaatgaataagagaaacagtgaggcatccaggggactttctgcacagtgggtctgtcattaggcaggtacgttgccacagccagttctaatgcccactcataggccaatgcctaggacaattgctcagatatcgcctctgacaggcaagtgttccatcagtaacagcaggcatcggaagatgatgccattccctgctgttagtatgattatattgacttaggtttttaattttctttcttgctgtgttttttttttttcaccttcttagcctctaaagcatgaacatctgtgtttttcagctgccttttcagaaggcaataaaaagggtttgttcgatttctctcttctggatcttctggattatcagcgctccttactggcttaaccaaacacaaacatgaaacaacttggaaaggatcacaaaataaaagattgcagtgtgtctgctgtggactgaaccgtatcctccctcaacccccaaattcatacattgaagccctaacccccaatgtgattgtatctggagatagggtcttcaggagataattaaactcaaatgagttcttaagggtgaggccctaatccaataggactgtgaccttataaggagaagaaaagagatcatccccctcccaccaccactgtgggaggacacagcaagaaggcagagagccctacggaacctagcggacagctatacattgatcttggacttgcctacttccagaactttgaaatataaattgttgtgtaagacacccagtctgtggtattttatgatggcagcccaagtgagtacagtgtccttccagaaaaagaactatgtccctaagttgagggtattcacttctccataataatagatgctctgaaacattcatgccagtttgctcctgttgcagaaataaggacaggattgttttctttttgttttgtaatgcctccccaactaatttcccttaggctcttctcattcatataatctctcaagccagactgggtagagtcatccttgtctctgtatatgtcatccaagttatcttttctctatacctcagtcagtcactagatgtgatttgattttacttcctatatgatccttttatctgttctctcatctcattttttatcccccatgcttttgttcatttcaacatcatctctcatatgagttattataattacctccaaaatctactttggtgatacctttgcctgtcaataacttccggttacctccagaaatacaacctacttcaatgtctctcatgctctgtattagtccgttttcacactgctatgaagaactgcctgagactgagtaatgtataaagaaaagaggtttaattgactcacagttttgcttggctggggagacctcaggaaacttacaatcatggtggaaggggcagcaggcacgtcttacatggcagcaggtgagagagaggggatgtgtgggggaaccaccacttataaaaccatcagatctcatgagaactcactcactatcacaagaaaagcatgggggaaacagcctccatgatccaatcacctctcacccggtccctcccctgacatgtggggattacaattcagattacaattcaagatgagattggggtggggacacagccaaatcatatcacattccaatcccttgctatgtcttcagacctaattctactcattgctcttatattaatctccattactgctgtacttcttgcaggatatgagcatagcatatggcttcattcctatgtgtctttgacaggtcttttttcttcctgaaatgtcttcactcctgtatgtcctcatccatttttctgtacagcttaagtggtatttatggccagggtgaatttatattttaaactgggatacttttgagagtaaaagtaagcacttgttaattattactccagaaccacagatgtaaactgaaattattttaggtaaatagtaacaaatgttatcctaatctcagctaaaattttatactctgcctactttagaaatctataacacaatcagtaacacatcataactccccttttgtttcgacatggtcatggtcatttgcaaatagcagctgagaggctgacaagctgtgcagaactctagcagacttacagggctgaggagattaaaattaaatttctgggacttccaatataaagggacctggaaagaccccaggtttttgtctggagcctcaaaaaagttgcacaatagaaagagaagtgaaaagaaaatagaagagcatctataacaactccaacccagattcaaacagcaaaataccccatcaaacgaaagtgatttgctttaacttaattgaatatctgaagcaaaattaaacccaaatctcagaaaatatcatctggagcctcaaattatctctccagtttgtttttattacaatgccttgcatgtaataaaaaataattaggcacaccagaggactaaatagattgaacacaaataaggagaaataataaaaaataataaaagtaatcccacaagtcatccagatattgcagttatcagatgtggactgattaacatgtttaagaaattatgtgctaaaatgaaggataatagcaaacaactgaaaaatattaaaaaactgaaatcaagatcagaatataggggtttaatagccaattagacatagcttaacagacaactgggattataggtctgtttctgttccttttctctgaaagtaaaaaaaaaaaaatactaagactggaaaatgatacaaatttgtaaaagaagaaatatatgaaaaacagtgaattggtctaatatatatgtaagtaaaatcttagaagcggagaaaggaaatggcaccaaaacaatgttagaaaagatgtttaagaattagcaaaaactgatgaaacacatctaaacacaaatttaaaaagccttaccaacccaatgtagaaaaaacagaaaaccaaaataaggcacaccgtaatacaatacgcaaaacaaaggacaaaaagaaaatcttaaaagtattcagagaggatttcttgtttcagccaaaaatgagtaccttgtatcacattaacacttttgccaagcacagtgaaaagctagataaattttaaaaaaagaaggtcaaagccattggagtataactaatgcaggaaggatgtaaggtgccacaattaccaatggaagggtagcacattaagatgagcttcacagtcacactgacattttcctcaagggcatttttcagatcatggcgttgggggaatagtatctgagcagaagacaatagtatcattgacttaagaagacagaggttgtaacttggggctgtcaaagttgctaggacatgaaggccaatatctagagaggaaaaaactgtaataaaatgaggtcaaatgttgctatatctatgttgcacatgtacaaaataaaaaaaatcatgctgaaagcagcaaagatttgagcagttgtgactgttagggggataaatattggagtttcgagtcagctaaagcggacggaccctggtaactacctcagacttctgtctgagaattgggaaatgccacatcttaggagaaaggtctataccaaagggtaagggaaaaacctatctataaacgtagaacaaacctatcacaggatcagggtgatgtgcctatattctgtctgccacagaaaaattttctcttttcagatgaaggggtcattatccagagcctcaaaattttttattcataggtctattaccaaaactttttaaattgaggcatactatatagtacaacccaggccaggcgtggtggttcacaactgtaatcccagcactttgggaggccgaggcaggcagatcatttgagctaaggagtttgagaccagcctggccaacatggtgaagtcccatctctactaagaatataaaaattagccagcgtagtagtgtgtgcctgtaatcccagctactcgggaggctgaggcaggagaatggcttgaacccagaggtggaggttgcagtgagccaagatcacgccactgcactctagcctgggtgacagagcaagactccatctcaaaaaaaaaaaaaaaaagagaaactgcctgtaatgtgattcagatactgaagtcatcagagtcttcaaaataattttgaatagtatattcgagaaaataacatgaaaaatggatcttttcagcagagacatgaaatctgtaagaaggaatcaaattgaattttggaactgaaacatacattatctgaaattaacaatttagtagattgtttctattaattatgcaaaggaaaacaggattaataaacaggaagacaagtcaatataaaatgaccatattgaagcactgagaggagatatggaaaatatctaaagagtcatatgaaacaaaaataatatgtaaatagatactgaccaagaattttcaaacttatcaaaagtgttcaagatactccatgaattccaagcaagagtatcggcacctaggagaaactacatctaggcacttcatagtcaaattgattctttttaaaagtcaaagaggaaattttaaaaatactggagtaaaaagttacattaaaggaagcaacagtgatactgatgaatcccttttccacagaaatgaagtgagtctgatcgttgtagtataaaatctttgaattatggaaagagattatgtgccaacccataactcaatatccagggaaaatatacttcaaatgtgaaagcaaaatgaaaacacattcagacaaaaggtgagaacttttcaccatcacaaattctatattcttcatatagtagaatattgatctggaggaagcacagagatgcagaaaggaaaggagagcgtaaacatatgaatgataaaaacaaaattgattaatccaaaataaggccagaaaggtaaataatggaacagataataaataaaaacaaatggcaaaaaggtagatttaaccaaatgtattagtaatgaaatatgaatggattaaattctccaatgataagacaaagattgagagattagaataaaacaataaaaactggacatgctgtttacaaggaaaaaatttccctctgtttattaaggccaatgaaaactaattttagactgattttatttttaaaagttttgatgctgtctgaaaaaaattaatcattcaatatatttaaatatctgacaatgttgcaaatatccagttcttacatatttttactctagtcaatcttacatatggctaaagtaaaatctgtttaaatcagggattcttaatatgttgttaaaactaattaacagatgtatataactatttcatcttatagctgtattctggtttctcagtaaatagactgagttagctttgttgcagtaacaaaaaagaaattccctgataaaccccagttctgctgtctgagagctcagttcactggtttctacagctcttggttttattttctggggtgttcttcctgttccactgttgttcttgaatatctgaagggaacattggagaatatgtcctttttaggtactaagcagatttattaatatagtaactcatagtagaaattctgggccccccaaattcttttaactcttaatttgtcataatgtctcttactcttggttggtgaaacttttgccagtacagtcagtcctctggatctgtgcactgtacatctgtagattcaaccaaccactgatcaaaaatattttttaagtgtctatactgaacatgtagactttttttgtaattattgccaaaacaatacagtagaacaaccatcaaaacagcatttatactatattgttaatagacattataagcaatctagacatgatttgaagcatatgggaggaggatgtgcataggttgtatgcaaatactatgacattttatgtaaataattgagcagctcagattttggtatctggaaggagtgctagaacaatcccttatggatactgagagatgactgtacgatctgtcaaacttttgtgtccaaacagttctatgtgccaaaagctatacccacaattctttttgagatactcctctctctctagatttatcttgagtttactggcctcctggatgagccatgtgtacattctctttatcctaagcatttttcccccaataaaagattttctatgggcaattttgaaccattcacagtgtttaactaaggaggtgatgatcatacaaaagatttcgttgttttcttgagatatagtataagttttgttgcccaagcagttaattttttctctcactggttatagataaaaaaattaactgcatcttccagttctgctagaactgaagtttctagattccctctatatactttcatcccaggatcatctccatactttcatcaaaattctattgagcttctcttactcttgtaatacctaatcaaagacagctaaaaataacaacccaggcaccccagcaaaattcttacattgcaatctctttgtctaaaaccacaagttcaacaggtatatttgctcacttccatgatatcacagatgacatttaacccaaatatgacatcactgcgtaatatagatcatcattcttctcatcttccaataatattttccccattacctaccacctggctctgaggccagtagctcatattttatgtctttttgaagtcatcaccctacttctggtaccaacttctgtgtgctggttcagatttctgtgttttcttagatttgcttcagtagcagcaatcataaaatcccattaatttacaataacaaaatttattttttgttctcattacatttgggaagctagcagattggtagctgcagctctgctccccaggtcgtctcaatttagtttcccaattccctccccaacatatattgcaggtatcatagaaactgatatgggctggtttgcagcatacagaaagaccaagcaaaaaggggtaaagatctacaggggtcagcctgggaacagtgctccaagaggtttgaatctatctaagcacatctttcctcccacattccaggctcatcacttcctcctatttcaatgtggctaatccatacacagatatttagacagctccacatattcttgtccagctgtattgaatgagacatttcccataagctaagccccagctcaaattctgtataggaagctcccgatgctgtcccagaactcacaggccaatgtgctctactttgttgctgaagtttggtcacctggttcccttaacttcaactcctccagctcctcatcatttggcaatccattgctgacagtcgttctgggcttcccaatcactgctggagtacttcagccctttatgcctaaggctgcagcgacaggcataaagctctcctccaggccctggattccatttttccttcccttctgtaacctcgcagtgtatgtactgtgagttttcgacactctcagtttaaagccatgctctgactctggcctttcgatgaggcatcatcctctcgcttcagcaaagagcctgatacagagtgccctgcagagaatagtttcaagatgtctccagagccctggagctgcctgagtgagagggcaacccagctgtcttaaggacttttttttttttttttttccaaatcaggatcttactacctggcccagatgggagtgtaggggcatgatcatagttcactgcagcctcaacctcctgggctcatgcaatcctcctgcctcagcctcctgagtagctagcactaaaggagtgcacaaccaagtccagctaatttctaaaaccatcaaggtcctgctatagtgctcatggtcccactacattgctggtctggaactcctggtctgatgcaatcctccccctccacttcccaaagtgctgggattataggcaggagccactgtgtccaacctcataaggactttttgatccagcttcagtttctgctccaatgttggtacaaccctgcttttgaaaaccctttggatcacattggtgctgcatcaaagccttcagccaacctgggaactgaccaggatgctacaaattccttatgtaaataccagatctgctttatggacagggcacctggcgcctccatttacctccaaatttgttgatatcagattgcatttttctgtcatttcagggcaccgaggaagagaaccaatggcagaggccacatgtgcaagcaagatgggagtctggagagcctcaggctaaatcacgagtgctcagccctctcctctttgtaagggcaaccgggtcatatctgccagcatagaactgctctgtccacagccctaaaatctaatacctagaacaataaatgcacttaagcacgtcaaactctctcaaccagtgatgaaatctgtcactagcgaagggacttgtcccaagggagctgaacacctgccgctgcaccctgacaatgtataagaaacaagcaccactgtggatgcagccccagaggcctagtgtcatgggggtgcaaggccctgcttcaggctgggggcctggggaggggctggtacctctctacctcctgcagctcctgttcctctggctcctggtgaaaatctgggtctgaacccatagcaagtgagggccacaaggcttcaccttctgagatgcagctagaagaaacagctggtataatatatggtcatgcactacctaactacgtttcctcaacatgggactgcatatatgacaatggtctgtcccgtgagattataataaagctgaaaaatttctatcacccagtcatatcatagccatagtaatgtcaaggcccaaggtattgtgtgtctgtggtgatgccggtgtaaacaaacttgccacactgccagtcatatgaatagagcacaaacaattatgtaatatatagtacttgatcaaaatacacaactatatttctggtttatgtatttactatactatacttttaatcattattttagagtgtactccttctgcatctatgtgtcaactgcaaaacaacctcaggcaggtccttcaggaggtattccagaggaaggcaatgtaatcacagatgacagctctatgcaggttatcacccctgaagaccttctactgggacaagatgtggaggtagaagacagtaatattgatgatcctgaccctgtgtaagcctaggctaatgcatatgtgtgctgtgtcttagtttttaccaaaaagtttaaaaagtaaaataaaaataggaaatagcttatggaataaggatataaagaaaccatttttgtacagctgtacatgtgtttgtgttttcagctgtgttattacaaaaaggtcaaactttaaaaataaacaagtttataaagtaaaaagatttcagtaaagtacagtaaggttaatttatggttgaagaaaaacattttaaaaataaatttagtgtagcctaagtgtccagtgtttctaaagtctacagtagcgtgcagtcatgtcctaggccttcacgttcactcaccactcactcactgactcacccagagcaaattcctgtcctgcaagctccattcatggtaagtgccctacacaggtgtaccattttaaccttttacatcatatttttattgtactttaaacatatctacatttacatgtttagatacataggtgtttaccattgtgctacaattgcctatggtattcagtacagtaacacgctgtacaggtttgtagcctaggagtgatagcctataccatacagactaggtgtggtaggttgtaccatctaggtttaagtaagtatactctatgatgttcccacaacaacagaattgctgaatgaagcatttctcagaatatatccccatggttaagca

SEQ ID NO: 87 - DNA, 57268 bp, Homo sapiens
  source 1..57268: mol_type = genomic DNA
attttttttccttcaaaaacagtgatgtggatgaaaaacacatgttcactactgcacagggtataacagctgaaaactggaaacgataatactcacattcccttcagtaggggaatggttaaataaattttacaagccatctggtagataccaggcatgagctaaaagttagggtccagttagagatggaaagcacaccagtaatttgaaagggaaaatgtaatatgaagaattattaactagtaaaagaaggctaactgctaaaggtacaagagcactcaagctgtctgcagtcagcaggccccggctggtgagcaggaagctgcccgctgggaggctgccaaagttccctgaaggtgagcaccactggttctacaagctgctggcagtcatggcgttaagagcaggaagagaagcaccagaacccggaagagaaatccagtcctctgctaggccttgcaccgtccctctggcgccctctactgacaaagccagtaaaattgtgccgctagcaaaggagatctttttatgggatgtagcttggtgtcaccaaagagaacagagtggacttggagctcagatgcaacacaatgattgatactggcacagtatacttaccctgcttttgtaaacaaaatggtatatgtgatgtctctctttgtctctctgtatataaaacaatatttgtttctacttattatgtatttatgtctttactctgcatgccaggagctaagtattttgcatgtattaactcattttgttctcataataaccttcacatgcaggaatcattatagctactttatgaatgagccgaggaaggcactgagacgttaagtaacttgcccaaggtcacgcagctagtaagtggcagagcaagaattactatggctttataagcctaggaaaaagtctgaaagaatcaaaatgttaacagcggggacctcaaggaagcattgaagaggccatgggagaagttttcactttgttaaaaaatcagtccttcaaataaataaatacagtgaggcttccccagaagcagatgtcactatgcttcctgtacagcctgtggaactgtgagccagttaaacctcttttctttataaattatccagtcttaggtatttctttataacagtgctaggatgagctgatacagtttcctacactgtaacctaaggcaatgctttgcacaaagggatgagccagattgcttagtaattaaaacgcaaatacaaaccacaagcatatccattcatgaattggggggctgctttgtgtgcatagataaggtatattttttaaaaaaattatttttccaagaagaaaataaaccagttaataaacgacaactcacagtgccaggaagtgagaaacaagtgtgtgataaacggtggagaatgggagcactctccgcagtgggcgggaggagacgaggagggcgttccctggggagtggcagtggttggagcaaaggtttggaggaggtaagtcatgtgctctgagtttttggtttctgtttcaccttgtgtctgagctggtctgaaggctggttgttcagactgagcttcctgcctgcctgtaccccgccaacagcttcagaagaaggtgactggtggctgcctgaggaataccagtgggcaagagaattagcatttctggagcatctgctgtctgtgagattaagcactatgtatattgctttattcactccccacagcaaccttaccaagcagttcttttccacgtgaaaagatggaggctgggtggagcaaaaggaggtatttagagtcctcagcaagtgagaggcagagctgggatttgaatccagatctgcctgatactgaagtctaggctggttccacctctccggactgctttccagggagtagaagacagatattttaccttagctggctgcttctagaagtctgaccctgctggctcaaaacgactttagttccttgcccagaggctgcgggctgcgggtcaagacatcagtagaaggagggcccagccagagaggctgacatgggcttctactcaccgtcatctctccttccttccaggagcagcccctgggtgcgtccactttctgggcacgtgaggttgggccttggccgcctgagcccttgagttggtcacttgaaccttgggaatattgaggtaagcctgggatttccagaggaggtttgggggaaagagaagtggtgaacgctattactgttccctatctagacaccagtgggccgagtggagcagatgccagttgggaccttcccgccctctctttggttattaatccattattgttccctgtacactggtatgagtggatgggggaagtatttagccaagtttttgagacctgtactcggagctaaaatgcattgtcttcctatagtgcgggaccccacaactgtggaggagccgcaggggatactgggtagtacgcagacattatgcactaaatgacaatggctcacatagtgaaaagttattcttttttatttttttttttgagagggagtcttgctctgtcgcctagcctggagtgcagtggcgcgatctcagctcactgatatctccgcctcccgggttcaggtgattctcgtgtctcagcctcctgagtagctgggattacaggcacctgcttccatgcctggctaatttttttttttgtatttttagtagagatgggggggtctcaccatgttggccaggctggtctcaaacttctggccccaagtgatctacccaccttggcctcccaaagtgctgggattacaggcctgagccactgcacccggctgatttcacatttttagataatatgaccacattataaaaatttatgtatttttatataatgtgaccactagatgaaagcaatatacttaggcttttatttcttggttaagttcctacttattatgaatttactctgcatgccaggaattctaagaatttgcatgtattaactcatttgattctcgtaataaccttcacatgcaggagtcactattacagtgactgtatgaatgaggaaagaaaggcactaacagaattgattttatgttacttaggtcaagattttatgttatttaggtcaaggttaattgtgttgttcaaatcttgtataactctactgcttgtctgtctttcttacccattatcgagaagggaacataaaaatcttacactatgactgtagattgtcaatttctcattttaaattaggatcatttttcctttatgtctgccttatgtgatattagtataatgatatcagttggtacatctttttccatccttatactttcagtgtttcggtgttcttatacttgaaatgtgtctgccgtaagtggtgtattgttcaagtttttcttttattatagaaaaatgtattctggaaggtacttttcttaaaattacagtatttagtccattttcatttaatgtaattgtcaatataattgggctaaaatctactatatttccagttgttttttattcgtggcatcaattcacttttctctactttcttgatttcttttagacgaattaagtaattttagaaagttcaccttactcctttattagcttgttaattatgcatgcttttagtattctcttagtaattgcacttgagttgtactacctaatagtacagccacatgttgtttaaaacagctttactgagatatgattgatatacaacaaatggcatataaagtatataatttgataagttttgacatatgtatgacatatatgacagtcatatagacacactcatatatatattcatgtgccatttcagtcaatgaccgaccacatatatgatggtggtctcataagattataatacggtatttttactgtaccatttctatgtttagatatatttagatatgcaaatacttaccattgtgttacaattgcctacaatattcaatacagtaacatgctttgtaggtctgcatcttaggagtaatagtctagaccatatagcctaggtgtgtagtaggctataccatctaggttttgcataagtacattctatgatgttggcataatgacgaaatcactgacgatgcttttcttggaacttatgcctgtcattaagtgacgtatgactgtatatatttgagtggaactatcactgcagtcaggatagtgaacatatatattacctccaaaatatttcgtatgccctcttgaatcctgtcctcctgcccctccccacccctgctccttttaggcatttagttctgtaaattttctcctagccttgctttagcggcatcccatgcattttgatattttgttttgattttaatttaattcaatactacataatttccttttgatttcttttttgacccatggattatttagagttgtgttatttcatttccaaatatttggggattttccagacatgtttctgttgtccaggccaataacaaattcctgacgccatgaagtcaaagatctaactccccagggggagagttatgcccaagaaccatcggtattttgtgttagtggtcattgccagagtgaattccacagtgtttgtgataaaccctaataattccaccagagggcagcaagccaacatgaaaattctattaaaaagtctttttttagagacaagagtttggctctgccgcccaggctggagtgcagtggtgtgacctcggcttaccgaaccctggccccaccgcagactcaacctcccaggctcaagtgattctcccacttcagctccccatctgcgagtagctggaatataggtgcgcaccaccgcacctagttaatttttgcattttttgtagagatggagtttcatcatgtttcccaggcttgtcttgaactcctgggctcaagctatccatctgcctcggctgcccaaagtgccgagatgacaggcgtgggccactgtgcctggccagacagaagttttcaagtaaagaataaatttagctgaagagcagtgtcaaattatttctatccccaccctcctgaattaaatcttcgtagtctctgattctctttgtcatattcttaaccatttggattcttttcagtgcgtctgtgtttgttccttttccccagtatgacccctttctatttttttttttttttttttttttgagacagagtcttgctgtgtcgcccaggctggagtgcagtggcacgttcttggctcactgcaacctccgcctcccaggttcaaaagattctcccacctcagcctcctgagtagctgggattacagatgcctgccaccttgcccagataatttttgtatttttagtagagatggggtttcaacatgttagccaggctggtctcaaacttttgacctcaagtgatctgcccgcctcggcttcccaaagtgctgggattacaggcgtgagccaccttgtccagacccttttctctatctttatgaaaacatctctccagtagatcttcagagtaaaaaaaaaaaaaaaaaaaggaaaaaagaaaagaaaaaagaaaaagaaaagaaaacatccagcaaggtctcggaggaaaaatagaaaattagaagactggagtgagtcatgttgattttctggtgtaaaatttgtatcgaaaccttacataaatactgaagaattcacaagttgtaaatatacagcttggtgactgattttgatatccagacagtttttttcccacttgcacacactccccgcaagaatgcatgctggtttgtaaagtcattaatttactggtgcatcagtggatggctctgtgtcttctggctttatcttggcccagaaagacaggaattaacgttgagcctagtagtctttggcctttgtgccaaagcagtctgtgggccagccttgtgtagtgatcaagcagtatgtttagatgtcaggcatgacacgggttaaaaagccagctaggggaaaaatgggaagtggcattttgcgatctcatcaaacaatcttgatataaacttagagaacaacctcttggcaaatggagagcagctgtaggtttctgactgaatgtgcaagaagaacgtgaatgaaagagatatactaggtgggagcagtcagggtagacttcctggaggaagtggacagtgttgtgtggattcacactttggagatatcaaagaggaagagtattccaagtgggggtaacaaataacaagggaggcaaaaaagaaaagtatgagggaacaacaggatgttgtcaggaaactaaggctgagctgaaatccaggtgacccagagaagccttgagaaggcttgtggcatcttgtggagcaagtggggaacttgctctgtttgagagaatatgcctggaatatatgggatatcatttaaattttctaaaggttatctacaagataatttcagagaatattcgctcccacctcagcgtaggaaacaatgaaaccctgaaacatttatttatttattttccttgcttttcttttttctttcttttttttttcttgagatggagtcttactctgtcactcaggctggagtgcagtggcgtaatcttggctcactgcaacctccgcctcctgggttcaagcaattctcctgcctcagcctcccgagtagctgggacaataggcatgtgccgctatgcctggctaattttttgtatttttagtagagacggggtttcatcatgttggccagactggtcttgaactcctggcctcaagtaatctgcccgctttgggcttcaaaagtgctaggattacaggtgtgagccactgcacccagtcttttccttactttttattttatttatttatttatttattttttaattgatcattcttgggtgtttctcacagaggaggatttggcagggtcacaggacaatagtggagggaaggtcagcagataaacaagtgaacaaaggtctctggttttcctaggcagaggaccctgcggccttccgcagtgtttgtgtccctgggtacttgagattagggagtggtgatgactcttaaggagcatgctgccttcaagcatctgtttaacaaagcacatcttgcaccgcccttaatccattcaaccctgagtggatacagcacatgtttcagagagcacagggttgggggtaaggtcacagatctacaggatcccaaggcagaagaatttttcttagtatagaacaaaatgaaaagtctcccatgtctacctctctctacacagacacggcaaccatccaatttctcaatcttttccccacctttcccccctttctgttccacaaaaccgccattgtcatcatggcccgttctcaatgagctgctgggtacacctcccagacggggtggtggccgggcagaggggctcctcacctcccagtaggggcggccgggcagaggcgcccctcatctcccagacggggcggctggccgggcggggggctgaccccccacctccctcccggacggggcggcttccttactttttaaaaatacgtttgtcttcaactattggatatcttcatctaatttctagtgttttttttggttgttgttggcttatttgatttttactttttggttaataacaaaccttttaaggagttacatagactcttatcagtttacttttctaatttgttttctcctgaattctcagttaccttggattgattgtgctttgggttcatcttgctttttcttagtggctactttcagtttccttcctcttcagtttggcaattttttcccttttcaagcaaggagctcctccctgttgaggcgtcacgggtggcgggcaatccttacccggatcctcccacagcttgctctctggaagctcacactgcaccgtaattatgaaacttttgatattgtccctgatggcttctgatgcaagctgggacagcatttgtctgttgataagtgaaaccaagttcctgagatctggctctcttttgcccttctatccaataccagcaaggccctagtttcagagcattttggggacttatgatcccttctagttacctctgcatctgtgccccttttcccctcaaattagttcatagagatttttgaagcacccatgttactcaaataggcccatttttagcatgtgggaggtaaggcctagatgtgaatccctcataagccaggcagatcaaactgtgtgtatgcatgcagatttggcccaggaacactcttctccttcagggcccattgtctacaaggacagaaaagaattcttaaggccattcactatctcacattttctgttatttttctgtcttttccttttccccctacccacagagaaacattagaatcattgccctttagaagagcagaactatgatgcctcctgtcagggatggaacgaggcattccatgcagatgacaacccaaagagagcaagagtggctctatttatatcagacaaaatcgactttaagtcaaaaactgtcacaagagacattaaagtatattatataatgaaaaaagcatcaatccaccatgaagatataacaattataaatatatgcactcaatatcagagcacctaaatatatgaaacaaacaatgacagaactgaagggagaaatagccagccatacaaaaatagtaggagacttcaacactgtactttaaataatggatagaacattcagacagaagattaataaggaaacaggggacttaaacaacattatagaccaaatggaccgaacagaaatacacagaacgttccaccctacagcagtagaacacacattatcctcaaatgcacatggaactttctccaaggtagatcacaagttgggtcacaaaacaagtctttgcaaatttaagagactgaaatcataccatgtatcttttctgaccatgatggaatgaaactaaaaatcaatggcagaaggaaaaatagaaagttcacaaatatgtggaaattaaacaacacactcttgaacaacaattaggccataaaaataaaaaaagaaattaggaaatatcttgagataaatgaaaagaaaagcacaacatacccaaacttacaggataaaagcagtactaagcaaagaagtactaagaggtactttattgcaatacacatctgcagtgaaaaagaagaaagatctcaagtaaatagtctaacttcgtgcctcaaggagaggagaagaagatgaagaagaagaggaactaagcctaaaattagtgaaggaaataacaaagattagagtaggaaccaagaaaatacagaatagaaaagcaatagaaaaaaaatcaacaaattttttgaaaagaataacaaaagaattggttttttgaaaagataaacaaaatcaacaaatccctagttaggctaagtaagaaagagagaagactcaaataaacaatatcagaaataaaagaggagacattacaactgatgccacagaaataaaaacatgaggctataatgaacaattctattccaacaaactggataatctagaagaaatgaataaattcacaaaaccttccaatctacgatgactgaatcatgaagaaatacaaagtctgaacagacttataactaatgtggaggtttagtcaataatcaaaaatgttccccaaacgaagaagtccaggaccagatggcttcacaggtgaattcttccaaacatctcaagaagaattaatgccagttcttcttaaactatttttaaaaattgaagaagagggcacacttccaaatttattttatgtggccaacattatcccgataccaaagccaaacaaagacaccacaagaaatgaaaactgcaggtcaatatctctgatgaatatacatataaaaactcataacaaaatactagcaaatcaaattcaacagtacatttaaatgatcgtacatcctgactgagtggcatttatccctaggatacaagtatggatcaacatacaaaaataaatcagtgcgaaatggcctattaacagggcaaagatataaagataacatgatcatctcaatagatgcagagaaagcatttgacaaaattcaataccctttcgtgattaaacaatttttcaacaaactggaaatagagtctcaacatcatcaagaccatatataagaaaattttcactgttgagtattatattagatgtgagcttttcatatatgggattcataatatgtttcaaatatattacaaagctatagtaattgaaacagcatgggaatagcataaagacaaacacataggccatcagaagagaagagagagctcagaaataaatccatgcatatacagtgccttagtccattcagcctgctaaaacaaaataccatagactggtggcttataaaacacagaaatttatttttcacagttctggaggctaggaaattcaagatcaagtagctagcagatttgctatctagtgagggcctgcttcttggttcataaatggccatcttctccatgtgtcctcatggaattagggtgatggagcgctctgggatttcttttataaggcactagtcccattcataagtgctctaccttcatgacctaatcacctcccaaaggtcccatctccaaataccaacacataggggattaggtttcaacatatgaattttaggggaaacaaacatcagtctattgcatatactacctaaagcaatctacaaatttggtgtgatctctattaacatcccaatggattttttttttacagaaaaaaacctctgaagtataaaaaggaccacaaatagctaaatcagttttgaggaagaacaaagctagaagcaccatacttcctgatttctaaatatattatactcccatggtcatagcagcactatttacagtagccaagatgtgcaaacaacctaaatatctaggatggggaaagaaaatgtggtagtcacataaaatggaatattatttgccttataaaggagggaaattctataatataagacaacatggatgaatcttgaagacattatgctaagtgaaataagccagtcaccaaaagacaaatactgtatgattctacttacatgtggtatctaaagtagtcaaatttatagaatcaaagagtggaatggtggttgccaggggctggggaggggggaaatgagttgcctgtcaacaagcataaagttttagttaagcaagatgagtaagttctagagatctgctgtacaacattgtacctatagtcaacaatactgtattgtacacttaaacatttgctaagagggtagatctcacttaaatgttcttactacaataaaatataattgataaagcaatagaaaaggattcctatacataggattcctatacataaaaaggtcaatacctaatttccatttaattaaaagcaatgaatagtcaatttacacacaagacaatttctgttattgaggcagctataggatatagaagagatttcccaactcactttgcaaggtgcacatagccttgaatccacaagcataatgtaaataatttacttttaagaaactcagacagaaaaatcctataatcatctcaaaagatcctgacatttctttttgataatttaatgcccctttctgatttttgtcaaatactaggaagctaataggtaaggaaaagtccctaacttgataaaaatacctaccagatgcccaaatcaaaaatcatatgaattaggaagttctggagtgcttctcattaaactcaggaacgtgtaatatcgttattaatgtattgttccaccctgttttggagggcctggccaatttaacaagttaggtgatttgataagttagtttaatacgcataacagcatggctgtcccgaggcatacaggaggcgatgggctgagtcctgactgcagctcccccaaggacctgccacgcatggattatacacaaagtctgttcaagtctgttgagggagtgaagggtcggggggcagcaatcccctgtttggcctgccaggtaaagcctttgtaattgctaatggctgggcctgacagattacacataggattttggcctggagcccaaataattcctaaactccatcctttgatttttcagagcccaagcgagaaacataggctaccccatcatggacctgaatgggttggattttgagggtctctgttaggagccaggttattagtctgcagttacaataaatagaccatggtcaggatcaagatcacttccagcatcgtgtacagattaatatgcctggggtagcttaggtaccagaaaaatccatgtttacagaaatgtttgtttgcagcattcagtggcacaggaacaaaatatttatttgtggggatacatccagcattttgtcaaattcactggggaactgcctgggacaggcatatcaatgaatttagtgacttggaagtcacacagtctattctgtaggagagagagaaggaaggttagattcccacttctccctcctctgtaccctggctcatgggttcataggcgctcacgttgggggaattttccccaaccactgtgacatgggtaagggtagcatcttccgactatcctccagggaggtgggctgtaatctggcctggatcctctgatgactaaaaaaaaaagtttctcttctgtacattgatatccatcccttgaaaataaccaggcaaagcaacaaagccactttatggaaaacattgaattagaagcctcaagttgatagtgattattttttgcaggcaaaaaaatccatgctcagcaccaaagggataactgatgaagagggttactgtctctcatgctttgttttttaatagctaatctaatctctcacctatctgagtctttagaaaggaattgaagggggtggggggcccttgtagggttccccagagagactgaggctgtgcaataaaaggaagcaggtagacagtctgatcaaatatgcagcgcaaatgatgactgcccctttgaggaatgccacactgggaccccagactgttcccctgagatgcatagtccaggccgaggttcttttattccctcctgtcagtcacttaaccctgtccttcaattgtctactaaaacactcaatcatccctgctgcttggaggcgatagagagcatagggcgtccatcatatatgccccatgcttgggcccattgatgtgtggcttgggccacaaatctggggccattatcagatgcattctatgcctgggaatcaaccatctaagatctgaaattgtgtcaccgattgattgacctgacctcacaaggaggttttttatttgtttttgtttttttttttgagacagagtctcactctgtcacccaggttggagtgcagtggctcaatctcactgctacttccatctcccaggttcaagtgattcttatgcctcagcctcccgagtagctggaattacagacacgcaccaccatgcctggctaatttttgtatttttagtacagacagggtttcaccatgttggctagcctggtctcgaactcctaacttcaagtgatccgcccacctcggcctcccaaagtgttgggattacaggcgtgagccactgtccccagccactggacttgataaccatccggagtatcatgaacaaagctagaaatctgagtctggttgcaacctcatcatctgctgcttccacttccttatcatagacccaggggaccaccagtgtagcctgccacggctccaggtttggagtgaggcgtaggttccaggcagctcctgttgaccctgctgctgcaggccaggtcagctgtccttgcccaggtgtgaatcatgggcatgtatctccctgctgggcttccgctttgctgccctttcctggccctttggccagagagagcaggcttttctttctgttgcttttccttgtttgttcttttttttttttttttttttgagacggagtttcgctcttgttgcccagactggagtgcaatggtgcaatctcggctcaccgcaacctctacctcccaggttcaagcaattctcctgcctcagcctcccaagtagctgggattacaggcatgtgccaccatgcccggctaattttgtatttttagtagagacggggtttctccatgttgaggctggtctcgaactcccaacctcaggtgatctgcctgccttggcctcccaaagtgctgggattacaggcgtgagccactgggcccagccatttgttctttctaatttaggcctgttggtggttctggattgcaggcctctttcgttttcagtctggcatgtgtgggaataaaaagacagcccagggcacaaaacagggtgttgttcctgcctctgggtcccccgccagtctgcctctactttccacctctcagggttgtgtgattgtctgttgatttattcccagggtatttaggtgtccttagaggggagaagcagggaaaagtgaatctatgccatcgtgtctcggaactggaagtccacccccatccccacacacactagaattgcagaagaaaaataagatgagaacttgagtgaaaaaaacatattattatgcaatcatcaaatgtttggacagaaagtgttcttagacaacctctagtctaatttctcacatttggaaatctggaagttggactaagacctgaatcgaccaccctcacccccagttcagctgactgactccccagcctgtattctcaccattccacaccaggatctgtcctgaggctttgaaaaaatgtgaactgcatgtcctgctcagatcccaaccctcccacaccactttgctaagagtctgttctgtctgcaaaaatcccaaaagttgtgtcaactggaacgcaaaatgttcttcatttgactttcattgttttttggaattttggggggccagggaggagcaagaaaggagctgcaattgcccttgggtaagatttgcttagaattttaggaagaagttgtctgggcacagtggcttactcctgtaatcccagcactttgggaggccgaggtgggtggatcacgagatcaggagttcaagaccagcctggccaagatggtgaaaccctgtctctactaaaaatacaaaaactagctgggtgcagtggcaggcgcctgtattctgctagggagctgaggcaggagaattgcttgagctggcggggtggaggttgcagtgaaccaagatcacaccactgcactccaggctgggcggcagagtgagactgtctgtctcaaaaaaaaaaaaaaaaaaaaaaaaagaagaattttaggaagaaatctatctgattctagaattatctaggctgttgaggatgtgtgtctggtggccactgggacatcagggtgagacttttcttttaactgcatgtatgtgaattaggttgcttctggagcctactgagagctcactgggtccccatagcatccatgctgaaggcgccttccttctgtctgtgaccttgaccctcagctccacatttccccaggggctgcaggatttctcagaatcctcattagcacaacctatttttttttttttttttcctgaaacagagcctcactctgttgcccaatgcagtggtgtgatctcggctcactgcaacctctgcctcccaggttcaagtgattctcatgcctcagcctcccaagtagctgggactacaagcgtgtgccaccattcctggctaattcttgtatttttttttgagatggagtctcgctctgttgcccaggctggagtgcagtggtgcgatctcggctcactgcaacctccacctcccgggttcaagggattctcctgcctcagcctcccgagtagctgggactacaggtgcccgccaccacacctggctaattttttgtatttttagtggagacagcgtttcactgttttagccaggatagtctcgatctcctgacctcgtgatccgcccgccttggcctcccaaagtgctgggattacaggcgtgagccactgcgcccggccaacttttgtatttttagtagagatgggggtctcactatgtttgtcaggctggtcttggactcctggcctcaagtgatccacctgcctcagcctcccaaattggtaggattacaggtgtgagtcactgtgcctggacagcaccacctattagtgaatgacagccttgacttttgaggctaaaactttccacttctttagtatagtaattaaatctctcgctttttctactatttcggtaattaagcaggtaaagaaaaatatccagaacaatataatagggagtagggcaagaaaatcctgaggaaccacgacctgtgggtggatcgagtgcaggggtccttgagtgtagctggttgcaggaaggccccagcagaagggggctttgatgagcatccaccttgtgtaccgagtgaatgtccgtccagatgaggtgcggatgcagctgacaatggaggcgactgtaatggactatcccaagtagcaacatcatcaatttaggttttcagcctgagtgagactttcagttaatactcaactgaaaacaagatgcaaattttccttcagaaatttgttgaaagtgttttcactttggtactattgatctattaaagggctgagatgcagaggagacaccattgtgtaatttctagtggccgctctttttgtccgttatctgttcactgttctatccatgctgttctgccacacccctttttcacttaccaacacatgttggagattgctctctatcatagcatttcctctcctattctctagcctgcctcttcactctcttaatggtatcatttttctgaaaagaagctcttaattctaaaatggtcctgttggtggttttttccccttatggtcagcactttttgtgtcctttttgagtttttgtctactccaatatcataaagacattctcttaggatttctcataaagttttactgcttccttcttttttgagagagtcttactctgttgcccaggctggagtgcagtgctgcgatcttggctcactacaacctctgcctcctgggttcaagcaattctcatgactcagcctcctgagtagctgggactacaggtgccccccaccatgcccagccaatttttgtatttttagtagaggtgggggtcttgccatgttggtcaggctagtcttcaactcctgacctcaggtgatccacctgccttggcctcccaaagtgctgggattataggtgtgagccaccacgccctggtcaattgcttcctttttatatttagattgactatccatctggatttgaattttgtgtgggtaggaaatcaaggctcattttatttttatatggctatcttgttgatctgtcgttatttactataaagacgatccttttttcacttcacctcattgtcacctttacccatgtatcaagtgagaatagagtgtgagactttaaaaaattaatggattattttttaagaacagtttcaggtttagagaaaaaacagagcagattagctgggcatggtggtatgcacctgtagtcccagcttattcatatgcttatttgccatctgcgtatctttttgtgaggtgtctgttcagacctcttgcccacttttcaatcgggttgttttcttattgttgagtcttaacagattagcttaatcagattggcttcgggaggctaaggcgagaggatcgcttgagcgcgggaggcggaggttgcagtgagttgagatcacaccactgcactctagcctaggtgacagagagagaccctgtctcagaaagaaaaaaaaagaaagagcagaaagtagagagttcccatataccctctgcctcctacacttctcccctccccacactttcccgttattaacatcttgcattagtgtggtacatttgttacaagtgatgaaccaatattgatattgtaggggagggcaaatctgttttccttctacccttctaagttcatggctgagaaccctataacagaagacagattaataagagaaaagtgcataaacatatttaagttttatgtgacatggaagcctttataaggaaatgaagactccaagaagcagttacagtttgatgtaggtttgataaagggtggacagttgtggaggatatgatagagcaaagagtttgaagtaagtgtagtccgctggcagaagcttatcaaggcccgtttgtttagttagattcctctctgtgtccctttgtcttcacagataccaccaggtatagggagggcatctctcacctgagggtcttatgacctggcttcaggagaaggtcagaaaacccttcctgcacatgctgcttttgcaaattccttcaccttaaaatattcaatatgtcattgtgttagtctgttcttgcattgctctaaagagatacctgaggttgggcaatctataaagaaaagagttttaattggctcatggttccacagactgtataggaagcatgatgctggcatctgcttggcttctggggaggcctcaggaaacttacaattatggtggaagacaaagggggagcgagacatctcatgtggctagagcaggggaagcaagagagcggggaggtgccacatatttttaaacaaccagaatatcatgagaattctatcatgcaaacagcactgtggggatggtgctaaactattagaaaccacccccaagatccaatcacctcccaccaggctccgcctccaacattaggaattacaactggacatgagtttgggtgaggacacaaatccaaaccatgtcagtcgtggtgccatattttgtggtagcacgtcctgaatcccatcaataaattattctgaactaaagttccatagtttccattagggttcacttttggtgtacatcctaccggttttgccaaatgaataatgccatgtagaaccgttacaatattgtacagaataatttcactcccctaaaaatcccctgtgctgaacctattcacacttcctcccctgagtccctggcaaccactgtctctatagttttaatcagaatgtcacatagttggaatcatacagtatgtagcctctccagattgccttctttcacatagtaacattcaattaaggctcttccatgcctttgcgtggtttgatagctcatttctttttattgctgaataataatctatggtatggatgtgccacagtttatccattcatttattgagggacatcttggttgcttccaacttttggcagttatgaattatgaataaagctggtataaacattcatgtgcaggtttttgcatggacataaatgttcaatttgggtaaatatctagaaacgtgattgctggatcttgcggtaagcatatgctttggccaggcgcggtggctcatgactgtgatcccagcactttgggaggctgaggtgggatcacctgagatcagcagtttaagaccagtctggctaacacagtgaaacctcatctctactaaaaaaaatacaaaaattagctgggcgtggtggcgtgtgcctgtaatcccagctactcaggaagctgaggcaggagaatcgcttgaacctgggaggtggaggttgcattgagccaagatggcgccactgcactccagcctgggcaatagagtgagactctgtgtcaaaaaaaaaaaaaaagaaaaaaaaatggccaggcgcagtggctcacacctgtaatctcagcactttgggaggcggaggcaggtgtattatttgaagtcaggagtttaacaccagcccgaccaacatggtgaaaccctgtctctactaaaaatacaaaaattagctgggcgtggtggtcatgccggtaatcccagcaacttgggaggctgaggcaggagaatcgcttgaacccagaggcagaggctgtagtgagccaagatcacacttgccgttgcactccagcctgggagacagagtgagactccgtctaaaaaaaaaaaaagcttcatgacaaacttccagactttcttccaaagtgtccgtatgagttttcattcccacgagtaatgaatgagagttcctgttacttcacatccttgccaatgtttggtggtgtcagtgtttcggattttagcaattttggcaaatatgtagtggtatctcactgttgttttaatttgcaattccctaatgacatatgatgttgaacatcttttcatatgcttatttgccatctgtatatgtttttggtgaggtatctgttcagatctcttgcccacttttcaattgggttgtttgttttgttattgttgagtgtcaagagttctttgtatatttttggataacagcatggtttttgtttttgtttttgtttttttttgagacagagtctcgctctgtcaccaggctgtagtacagtggcatgaacttggctcactgcaacctctacctcccaagttcaagcaattctcctgcctcagcctcccgagtagctgggactacaggtgtgtgccaccatgcccagctaatttttgtatttttagtagagacgggctttcaccatgttggccaggatggtctggatcacttgacctcgtgatccaccagtatggttgagttttaagagttctttgtacgcttttgggtaacggtcttttgttttgcaaacattttctcccaatctgtggtttgtctcttcactcttaactgtatcttttgaagggggatctcaaagaacatctggtcccccacaacaacatgtcatgtcaggtgagagatgactcattttctcagaaactaggattttgtgtcatatgttgtaaaccacgaaaagttaattttataacccaccttctagatctactgagaatacgtggtgttatcactaacagttttgaggaaagaaataattgcctaattcattttgtagtgaatgtgttttgttactaccacagatactcttaaaatccacttattatggagggggaaaaaaaaggaattttctttacagaaagtgaggagtgaaacctaatggagaaaatatctgtttcagggaataaccctcccaacatctgatttttttttgttttagacaggggctcgctccgtcccccaggctggagtgcagtgatgcaatcatagctcactgcagccttgaactcctgggtttaagcaatcctcctgcctcagcctcctgagtagctgggaccacaggtgtgcaccaccactgcaccaccacacccgactaatttttttgatttttggtaaagacagtatgttgcccaggctgatcttaaactcctgagctcaagtgatcctcccacttcagcctctcaaagtgctaggattataaatgtgagccactgcacctagcctgatcttttttttttttttttttttttttttttttaagaaacagtcactagtgctgtatgtaggttacagtagctatgtaggcccttcagagtcacttcacttttctgagctttcgtttcttcaacgtcttcctgtctgtaagacacatgctcttctacccctgagaccaaaaaatgttaccagtgaggatctaatgatataaaatagggaaaatgctttaaaactgcacagtgcttaacaaatgcactgttattatatcattaaaagtgactcctgggtggtgggaatggttgcataacgacgtgaatgtacttgatgtcacttaaaactggttacaatggtaaattttatggtatatatattttaccacaattaatacattttaaaagatggttcttgacaattattcttagcgtctgaggtgccccatttcttgggtatgggcatatagtgcctcaagaatattggggatcctcacctcttctatgcccaaacctttaagaaaattctgggccaggcgcagcggctcacagctgtaatccaccactttgggaagccgaggtgggtcgatcacctaaggtcgggagttcgagaccagcctgaccaacatggagaaaacccgtctctactaaaaatacaaaattagctgggtgtggtggcacacacctgtaatcccagctactcgggaggctgaggcaggagaatcgcttgaacccaggaggcggaggttgcggtgagccgagattgcaccattgcactccagcctgggcaacaagagcaaaactccatctcaaaaaaaaaaaaaaaattctggaaaagctaggtcagtgacatgaatattggaatcagagtctaacaaactcaatttcttcctttctaaatccgtggtacggattcatgtctgcagtagtttttctgagaaagcagaaggggtaggtattggcaatcaacaagctgcagagtatgcagattgaggtcagtaactgtaaatgccccatgactgtctgatcattttaataccaaaagaaaaacttaaaatcccagttgctaaaatctttgtcttagacaactctttgagcctctccctacaaggcccagaaaggaatgagatagatgtgaatggaatctgttttcccttcccttgccacgctctggaggaggagtctagggcagtagccaaggccagctgccagtcaaggaaaggggagcggccccgttgaatccacaaaccacaccatcctggcccatgggttatatacaaactcccacattggcaacaaacaaagggcatgcacattcaggggattttgctttcactgtgagtgtttatctttgaagggtgtcacatcaagatgaatgggaagggtgtgttgcagttgagctgaggtttggtctttcttggcttttttagggacacttacaggtccaaatctgctttcagccggctggtggacatggtaggagacacagtagtctcaggaccaggcctccaggtgggagctgagattctagagggtggaaaccacttggagattgagtcaaagcagacctgtcctcattctgtgctgggcaggagccagctctccatgtccctgcagctccagcaacacctccggatctttcagcttccctgggactaaggaccatgcacattattaattctgatataaacagtcacacaggcacatgtctcaagatgagggtgagaagttggttacagcaaatgaagtaataatgatctttgtgcttcacaataggaattcaaccaacctgaggtttataattcacttattaacactttttatttttgttgagacggagtgtccctctgtcactcacgctggagtgcaatggtgtcatctcggctcactgcaacctccgcctcctgggctcaagtgagtctcgtgccttgagtggctgagactacaggcacatgccaccatgcccaactaatttttttgtatttttagtagagatggggttttgccatgttggctaggctggtctcaaactcctggcttcaagtgatccgcctacctcaatctcttcaagcgctgggattacaggggtaagccactgtgcctggccataattcatttatcagtcatatatatatacacacacactgggagaatctagggtcagtgccttacaaatggcacaagttgaagccctgagactcccactcctaccctgctccccccattctcagtactgctcctcagatgcctccagcagatcatccatttctgctaggctgggcctgggtacatgcagggagatgtgtacaggggctaagagcagaaacttttgagtgagacactcctgagttcatgcactggccctgccatttgtcagctaattgatgttgcatttaattgcatcatctgtatgtaagcctaataatttatagccatcttagagatgttgtgagcttaaataacatagtagtgaatatttatttatttgtttatttatttatttagacagggcctcgctctgtcacctaggctggagtgcagtggtgtgatcatagctcactgcagccttgacctcccacactccagttatcctctcacctcagcctcctgagtagcttgagacaacagatgcatgccaccataactgactaattttttaaaattttctgcagagacagtgtctccctatgttgcccaggctggcctcgatctcttgggctcaagcgatcatcctgccttggtcttccaaagtgctgggattactggtgtgagccactgcacccacagcctatttattgagaaatgtggaaggcccaggcactattctaagtgctccagctgttttatctcccacagttttgctcagataggagttccaaagctggagctggaagactcatatttttagaaatgttacagttaattctgaggtgggtcagattgagattcatggctatgcattaatgtttaggtggtgactaaccactcagggttttagagacaaacagaccttattctgtcactcactgactgagcgtggccaagtctttcagcctctctaagcctcagtgtcctcatccataaaatgggaccaatcgtagcatccacttctgagaactgttcagaagtggaaatgagctagtttaggtggctgtgtctggcatacgccaatggtttgataagtattagcttgtgcctttattaggccaactcctttttgttaggtgactgagaaaccaaggaccttctgccctttatgcaccagtcactattagtttaaatttgttgctcttccatccacatgattcattccaaatttgaagtgttggagaaagggagttagtatgtcatagaaaaatctctgtttttggctcagcaggactgagtttgactccatgtaactgtctgagtcttagtttcctcatccataacatgggagaacaataccctgaattagagaattctgctgccagaattagagatagttcatgtcaaggtgcaacatataggtaatgtgttattgctggtgttctggttataaaatgtacaagatgtgaaagcaaaagggcagaaaaccctttttaaaaattcatggctgggcgcgctgcctcatgcctgtaatcccagcactctgccaggccgaggcgggtggatcacctgaggtcgtgagtttgagaccagcctgaccaacatggagaaaccctgtctctactaaaaatacaaaattagccgggcatggtggcgcatgcctgtaatcccagctacccaggaggctgaggcaggagaatcgcttgaacccgggaggcggaggttgctgtgagccgagatggcaccattgcactccagcctgggcaacaagagcgaaactccgtcccccgaacaaaaaattcaaatgggaaagagaggcagatggcagagaacaggggaggggctgggcaccgtggctcatgcctgtaatcccagcactttgggaggccaaggcgggtggatttcttgaggtcaggagttcaagaccagtctgaccaacatggtgaatccccatctctattaaaaatacaaaaattagccgggggtggtggtgggtgcctgtagtcccagctactcgggaggctgaggcaggagaatcacctgaactcaggaggtggaggttgcagtgagtcaagatcgcaccactgtactgttgcctgggcaacgcaccgagactccgtctcaaaaaaaaaaaaaaaatgagagaacaggggagggtctagggctcagagctttggagaacagacctcagtagcaccaacactccaggatcaatgctacaaagacacgggttacaactaaactggagaacatggccaaggatgggaactcagcctgagcagggctgagccgagcagggctaagccaagtagggctgagccagaacacttcctccttttttctgaacaatctacctacatttcagctacagggctggctttacccagtccggcgggagggaggagagggctggtctgtgacttcagtgctgaggtttgatcaaggcaaagggaaacttcctattcccagaccctttgcaagaaagaatggcatattacttgccaccgacaggggttattattactaaatggagtcagtataaatgctttccaataaagcatgtccagcgctcgggctttagtttgcacgtccatgaattgtctgccacatccctcttctgaatggttggaaattgggcatctgttcctttaaacaggaaacatttcttgttcgagtgagtcatctctgttctgctttaggagtaaagtttaccctgcagttccttctgtggtgaagttttctctttctctcggagaccagattctgcctttctgctggagggaagtgttttcacaggttctcctccttttatcttttgtgttttttttcaagccctgctgaatttgctagtcaactcaacaggaagtgaggccatggagggaggcagaagagccagggtggttattgaaagtaaaagaaacttcttcctgggagcctttcccacccccttccctgctgagcacgtggagttaggcaggttaggggactcggagactgcgatggtgccaggaaagggtggagcgggtgagtgcctgttgccaaggtggcctcttcaacaggaaaccacaatatttttgtttcttgacttgctctagaaacagggctgtgggggtggggaagcaacttggatctgcccttctgaggacacctctgggtgctgcctggcccaggtctcctgtgtggtttctctctgagccgttgcctctgactttgctactttttcactctgagcagtctccagttcctctgctacctttttgtcctccaagcttccctgccgcctcgaatgcagatacacggtctccctcctgtggacccgtttggagagtccagaagactttatcaatccacttttttttctttttcatttggccctggggccgacggttaagtactttattctgtcattctgtcgaatcacgatgccctgaggtgcacagccccttccccctcttccgtgtctgaagggtttccttttatctctccacccccacccttgccctcctgccctctctcttgttccccaaagacagttctctaatgttttgatgtggattcgtgaatttatctgtatctttgcaaaatgtatttttcttttgtatgtgtacactgttttttaactatgcgatctcaggcaagtaattcctctgtgcctctgttatctcatcattaaatgattaataatgcctccagaggtgactgtgaggcttgaaggagataatacgcatacatcacttactacacgagttagcaattattattgcatattaatactattggtattttattttgctcattctgtttctatttcttttttatttatttattttttgagacaaagtcttgctctgtcacccaggctgcagtgcagtggtgcaatcacggctcactgcagcctcaacatcctgggatcaagcaattttcccatctcagccttcagattagctgggaccacaggcgcgtgctaccacacctggctaattaaaaaatttttcttcatagagatggtgtctcattttgttgcccaggctggtctcaaactcctatgctcaagggatcctcccaccttggcctctcaaagtgctaggattacatgcatgagccacggtggccatccaggcattgatattatgaggccatcttgacctagccctctctggtgaagagtccttttcagatacttcgttcagtcttctcagctatgagtccctaccctctgaaagcttatattctatttggggaaagacaaaaggcagtttcaaagaagagaggtgtttgattttcttttcctacttttaatatcagaaaacatttcatctaactctcagtatgaaggcaatattttgtttactggtatatccctagagcccaacatggtgagggccccaggatttgcttctttgataagatggtaaacccagctttcagctaacttcatggtttcctcagctacactcatatacaaggatcacctttggtaagatggacttaccatcttaccaaagagtttttgcattttagagttttttctttttagatttttttcattttagaatttttttatttcagagttttttctttttagaggtttttcattttagagttttttctttttagagtttttttttttttttaattttagagtattttaggctgctgagggtggaatctggtgaccttggggccacagagatgctccttggctaaaccaggggctttagctctgaaagttcacagccaccctgagaaccaagatgagagggctctgcagtgtccaatctcaagacctctctgaggtgctccatcaagattcattgaatgaaaaaattaaagtcttaatgatgaacccagaaaaatctttaaatcctaaatatgaaatgaaagtgttcttagttacaatccagtccaacgtccttgttttggaatgtggaaatgaggccccaaaggtaaaatggcccatccaaagtcacagccaggggccagtgctcaggtggccaggtgccctgcgtgcggtctcctggaccaccaggcctttttcctgcagctttagaagctttagaaggcactctgctcactcaggggcaagtggtaagcgctctttcccctctagtgtttgtgactcaggagtttcgaaacaggaagtagagctggctggctgtgcccttccgtccttcattagacgtttgctcttgtcttagatgctcagatggtagtggataggcctgtgacgaaggtgctaccatcgtgagagtaaggtaaggatttgcctctttgttaaggtcagaggggccttttgggaggaaggcctttgattctggagttttctaggctgctgagagtgagatcgggtggccctggggccatggaggtgatcctcgtatgtgagtgtggatggggaaaccatgaagttagtgtaagaggtagcagtccctctgagagccttgccgagggccgtgcagtttccagatctgaaggccattctagcttagactgatgaagtcctaggagcttctgaaatgctgcaagtttaactacttgtataaaggcctcatcctgatcccagtcaaacttgtgaaataatagaagccaaaatttaaatctctactgactttgctgctacagctatcctcccaccaacacacatacccaccaacatacacacttgccaacataaacgcacacacacatacacacaaacacacccatgtggtcctactaattcaattatttattttttaaagaaattaaaaaagactgggcgtggtggctctcgcctgtcatcccagcactttgggaggtcgaggcggtggttcacctgaggtcgggagtttgagaccagcttgaccaacatgaagaaaccccgtctctactaaaaatacaaaattagccgggcatgatggcgcatgcctgtaatcccagctactcgggaggctgaggcaggagaatcgcttgaacctgggaggtggaagttgtggtgagccgagatcgtgccactgcactccagcctgggcaacaagagcgaaactccgtctcaaaaaaaaaaaaaaaaaaaaattaaaaagatacagaacagttcaaaaaacaatataatgggaagactagatagacacaatcagagacctgcacttgtggggttaagaatttacaggtgaagttgcaagtttcattctgtttgaaaatgatgggattatatgttttgctgaggtttggacacctttgctgggttgtttgaatgccgtggctgcagcgccctgttatggacatcatgtgcgtgcagaatggatgtctgtcaggttccggggcagcccgcagtctgaggcagccagcctggattggagggagtggcaatactacctgccggttaggggtttgggcctgagagcgagtggctttcaggttctctcaagcttcggatgagatgcaggtttctgcttccgatggcaaatgcatgttttgctttttagttatcactgcaagagctaggatgctgctagaatattactggaatgattgtgatgagatggaatgtatttacagtttaattgtgacatgtaatacagtggtagaatgggactctggaatgagatgctggggcctagattctagcacttcctttgtgaggctctaaccccctctcctatagtggatttgttaagaacttctgtttttgtggctttgttattataaaattttttgaaatgttgttctctaaaaaagttatgattttatgtttttcttcatgagattctttcactgccttccagctgcaagtagaatgacgtctaaatctttgtgatctgtcactgaagcccttgagtgagacacttaaatctggctgtggctctctctcttactagcttatttccaagccgtgatttttcacaacagaaaaatggggacagtaatagtagtttcttcagaggcttttagtgaaatgaggttaaaaaatatttttatgtttatatggatatatagattacaaacatttatatatcatttatttatatgattattataaacacatatttatatttaaatactttggggcataaatatataaaataataaatatacttatgtaatacaaatagacttatatacatttactatttagcagagattatataaaatatatgtattacatggcaacatattcaaatttacatatgttatatatacatgtggaaaaaaaattgggaaaaggccacaaaatgtgaccaaagaattacttccaaatggcaagtttttaagtaatttttattttctttttatacttctctgtactttctctatgaaacaagtgttacttttactgtttttaggaaccaaaaatacaagtacattgtttaaaaaatactagcttaacaaagtttctagcccataagctagtgcagaaaatctaggtcccataaaacaagaactgccacacgatgtctctccccttacagtgctggatggcccgttgttaatggtgtcataaatcctttgcaagtgactgttttctaggtactatgactagagggatgtgtaacttaagcaaaaaacaaaaaacagaaaaggctgactatcatctgacagtgtatcctggaacacctaggccagagaagaagccacgttagcattttcccttctaaatgtcagttatgatttgatggggaaaccacttaaaaagcattgtcacgttgttgaaaaggtaatgaaatgagtgagatgagatggctatggaggacggagctatgcgccaatcttattatatccaaattcatgtcatctcagccttggattgtattgatttttattatatactgtcagaaaatgctattgaatgtgtaacaagagcctcaaaaaggtttattcattttgacaccataatactacttttaggaaattattctaagaaaataattagaggtattcttaaagatttgcgttttaaagtcatcctaaatgtaatcaggaactggctatgtaaattatagcccatctctaagattaagtgccttacagatattaaaacccatgctgtagaagaaaaactaaagacaggaaagtacttacaatacaagatgtacttaccagtggaaaaatccacttatactacagaaatatgatgtgttcaaatataaggaaaaatgtgtatgcataaaatatttggtaggaaagagtaaaatattactgggcatttatatttggatggtggaattatacataattttaattttcctttttatcttttctgtattgtctaaaatgaatacactaagcattgttatcctcagaaaaaaataattgagggatgggggaaaggaagtcctgctttcatttgattctttggttggttttattctgtaagatgagactttaacagaggttagaatgcattaaaaattgtaaagacagttgacctaatggcactaaacagggttagatctagtttagatcttttccagcatgtgaataagaatggatctttaaataaagattttaactaggtatatgttttagaataagtcatacatgtacatggtaaaaattcaaacagtacaaactgtgcagcaaggtatgggaaataaagcagctctcactgtcacctccacccatcagccttctcacactgcacgcccacatctgtgtgtaattctgcttttctttaacattactgaaggaacttcctgtgcattttttgtcagagctcttctgtgaatacacaaaatatgtactgatcaatacattatgtagatcacgcaggctcaaccacattgatcttcctattctttctagtagccaaatagagttccctggaatatgattaatagcttgcctaaatcttctaatgctgataaacagttgtttctgctctttcgttatttcaaggaatgctaccatgaatagccttatatatggttttgagtatacttgtttaagtgaatgtaggaaaaactcttggaagttaaattgtgggccagtttatgtgaattttatattttgacagagatggctaaattacccacctgtttttttgttttgttttggttttggttttgctttttttttttaagagttggggtcttgctacctggggtcttgccacctggggtcttgcccagggtagacctgaactcctgggccacgttggtttattttactgcattcccagggcctagagcaacgattgacacgtgctagcagtatctattggaaattctggccaacttgcaatagacctgattatttctacactgaacatgtctaagatagctattactattcattcaggaaagcccagacaattatcatgccagcagcctgagacagtagccagtaatagcctggtgtggtagtttgctcctgtagtctcagctactcagcaggctgaggtgggaggatggctctagcctgggaggtggaggttgcaatgagccaagattgcgccctgcactccagcctgggtgacagagtgagaccctgtctcaaaaataaaaataagaataaaaaataaaccagcaaaagtttctgccctcacagagcttccattctagtgagagggtagtttgtcatcaggagggtgacgccggtagggctgggggccagctccctgcagggaacaaacatgatcgcagtggggtgggagtaggggatgagtccccagagcctctgtggtttccatttccacacaaaaaaaccactgctgctgtaatcaggagggggaaaagatttttaaaaattttctttcagggaatggaaggaaaggatatttttgaaagtaagactttgaaaactaaaagttttgggtcacttaaaaactcaaaatctttaggtcactttaaaaatatttaatcttggagctggaggccattattctaggtaattagctgggtgtggtggtgtgtccctgtaatcccaactactaggaggccgaggcaggaggattgcttgaacctgggaggcggaggttgcagtgagccgagatcgcgacactgcactccagcttgggtgacagagcaagactgggtctcaaaagaaaaaaaaaaaacgaaaactaaataccgtatgttctcacttaaaagtgggagctaagctatgaggatgcaaagacatacagagggatataatggactttggggattgatggtggggttgaatgggaggttggtcctaataggtcctagtacgtcccctacttctaagtcttccagtctgtcctttgcactttgaatgttaattccaagttggataatgtcattctcatttttacagtcctttcttagctcctcatcacctccaggacaaagcctaaacccctcgccccatggtaatgcggcccctttgtgacatggtacctggctagagcttcatccctttgtcccatcactctccatcccagacactttgtagttactttattgagctccttgtgcctgcctgaatggacttgaaagttcttacctccatcttttacattaattgtttcctgtaagaattgtgctttctcgcattctccccaaaatcccttccccataggaagcccttctcccaggctaagttaaggtttcttcctctacatccctaccacactctggtcacaaccctctaaccattggcttgttttttttgttttttgtgttttttttttttttgtgagacggagtcttgccctgtcacccaggctggagtgcagtggtgcaatctccgctcactgcaacctccacctcctgggttcaagcgattctcctgccccagcctcctgagtagctgggattacaggcacgtgcctccacacctggctaatttttgcacttttagtagagacggggtttcaccatgttagtcaggctggtctcaaactcctgacctcgtgatccgcctgccttggcctcccaaagtgttgggattagaggcgtgagccaccgcgcccagcccattggcttgtttgtatgtctaccttcctaaacagtaagagggaacttgtctggtgttctttttttctctcctgtgctgacagcacaatgaccagtacctagtagttgcagtagcctttgatgaacaagccagcaaatggtacttttcttccttatctgaacataccatttattttgacttagattatattctcctgccttttaaaaagatggacttcagcagaaatctttatgatattggggaacaactggacagtgaagatctggcctccctcaagttcctgagcctggactacattccgcaaaggaagcaagaacccatcaaggatgccttgatgttattccagagactccaggaaaagagaatgttggaggaaagcaatctgtccttcctgaaggagctgctcttccgaattaatagactggatttgctgattacctacctaaacactagaaaggaggagatggaaagggaacttcagacaccaggcagggctcaaatttctgcctacaggtgggtggaaactcccattgtgggactgggaggtgtgggttgaatggacagcctctgagctgattggggcttttttttgtggtaccctgcctagtgcctgggaacccagcagtgccacaattctaagcttctacagaaagacagtagtgccttgggtggtcctgctaaaggctgtaaaacttagcttctccccaccctagagagagtgggtaaacaaaggcgtgagagagaaaccacattcagtatcacttgggaggctttgggaagatgtcccaccggagccagattaagaaatttaggggccttatatataattctatagaaatgctaagaccataaaataaaaatttatttttcaaagtgaaacattacttagaggtatgctgaagttataatagagtttttctaagtgttctcatttttttcctctcttatcttgatgcctctcgatatccagattgtgtgcttactttgcccatccattgagtaaagcatcatggcttcccaccctgaaatccccctcccacctgcttgcggatggctatgaaaattttcaatgagatttaagggttttctgccacacttaaagactcgaatgactaagttctttacggagctgtaagccgctggcctggcacatacagctaggcagtctccaccgaggctgcccagttcctgtgagcccggctgtatgacagttctaagcttctataggaagacagtggcacgttgggtcatcctgccaaaggctgtaaaactcagcttctccccaccctagggagagtgggtaaccaaaggtgtgagagagaaaccccattcagttacaacttcatgatgctgtgacaagactttaaaaacagaaacacattgtcactttctctctttcaacatctcctattatcggacactacttaaagcaattttagctttgctttcaggaaacttctactgaagtcttcgttctgggcccatttcattgtctctgtttgcttgttgataactatggcatgtgagatggaaagggttcacaaccagggctgacagctgctgtcctctgatggctcagcccatgaatgctctggtctttctattctcagagactattttttgttttgaggcttgactattttttgttttgttttgttttgtttttgagacggagtctcgcttcatcacccaggctagagtgcagtggcatgatctcggctcactgcaacatctacctccagggttcaagtgattcttctgcctcagcctcctgagtagctgggattacaggtgtgtgccaccatgcccagctaattttgtatttttagtaggacggagttccaccatgttggccaggctggtctcgaactcctgaccttaagttatccaccagccttgacctctcaaagtgctgggattataggtgtgagccaccatgcccagccaaggcttgaccattttgattttaagtgaaaaaagagatattctgggccgggtgaggtggctcacgcctgtaatcccagcactttgggatgctgaggagagctgatcacctgaggtcaggagttcaagactagcctggccaacatggtgaaacctcatctctactaaaaatacaaaaattagctgggtgtggcggctcacgcctgtaatcccagctacttgggaggctgaggcaggagaattgcttgaacccaggaggtggaggttgcagtaagctgagattatgccattgcactccagcctgggcaacaagagtgaaactctgtctcaaaaaaaaaaagaaagagatattctgggtatataagtttcctagggctgctgtaacaaagtaacacaaactagcaggtttaaaacagtttttaaaatgtgttttcacagttctggaggcctgagtcagaagtcaagatgccaacagtgttggttcccttttaagaggctccgaggaataatctttttcatgcctttccctgcttcgggtgggtggaggaatcctcagtgctccttgtcttgtagatgaggcacagcagtctctgcctatgttcccttctctgtgtctaaatctccctcttatgagacagtcactggattaggaattagggcccacctaatccagtatggcctcatctttgtgtgtgtgtgtgtgtgtgtgtgtgtgtgtgtgtgtgtgtgtgtgtgagacagtgtctcactacatcgcccaagctggagtgcagtggcatgatctcggctcagtgcaacctccacctcctgggttcaagcaatcctcccacctcagcctcccaagtagctgggactacaggcacccgccaccatgtctggctaatttttgtatttttttgtagagatggagtttcaaaatgttgcccaggctagtcttgaactcctgggctcatgcaatctgcccacctcagcctcccaagttctgggattacgggcatgagccactgcgcctggccagcatgacctcatcttaatgagattttatctgcaaacgtcctgggtccacataaggtcgcattctcatattccagatagacatgaattttggggaagaggggagaacactattcaaccagtacactagatagctttggtttactagcattgtgaagtctttataaggcacttattcattaaggcgccagttagtcctaaaaacccacagccccagaacaaggaaagccgaggggggtctcatcttgtgcccaccatcttggtcctttgaaggttccacttctgccgcatgagctgggctgaagcaaacagccagtgccagacacagtctgtacctttctggcggagggtcgatcatctattaataaggcaggatctctcttaaaatctttaatgtattggcttagagataaaagggtccgggcaatcctgacttactgcttgttcattatcattgaatactagccagaagctaataaatatgctagggtgaccacttaccattataagaaaacactagacattttattttccagttataattgctacctataaaataaagatcttataaactattcaggttcattactaaatggtgatggtacaagaaagcctataggcttcaataatgaggaaagcaaaagggtaaataccttgtaataaaggtgaaagagtcagagtagctttggattagatccaattttggccaaactgaaagctttagataaacacttctagggtagagagtccatgagaagggggataaggcagatggtaatactgagtaatttctgtttctacgccatttttattttcagaattttacttttctaattaaattttaaagtcaacgtgtttttgtattaaaattattttcctttacaccatagtattgaaaggtttgctgacttctaaaacattcctttgttcacctattcgacaagcatattccaagagcctaaatgtgccaatcacataaatgtgataggcatagattaggaaatagtaacacctatcactcattgagcacttagtgtgttgccaaagactgatttaagtacttcacataaacttatttgtgtaaccctcgaaaccttcctatgatgtggttacggataattatcttcagtctatggacgaggaaaaaatgtgtaacatgtctaaagttaacactgctcaaagatagtggaaccaaggctccaacaccaatagcctgggtccgctgagctcaatcattgcacctcacaaccctctgggtttatgaaaataaaaagggtacggacctggccactaggggacttgaacagtttctaaacagacaattattttctgtttttatttttagtgtggtggcatgatcacagctcactgcagcctcaaccttctgggctcaagtgatcctctcacctcagcttctggagtagctgggaccacaggtgcatgccaccacacccggctaatttttaaatgtttttggtagagatggggtcttgctatgttgcccaggctggtctcaaacccctgggctcaagtgatcctccttctgccttggcctcctaatgcgctggaattagaggcatgaaccactgcaccaggccaacagacaattatgtgtgttatcgttttggggttactaagtcatagtggagtgaatgcagctttgaggatgctcaggcaatgcttgagctgattgttcatggatgggcctctgcagatagacaaggggatggggtgtagcggcaccacagaaaggggtgagggcagggcagctgggtgtgtttggcttcaggtcctttcgtgtttgcggtctggtctgtgatagggatgtattcggagactttgtattccagaaccgaatgcttggccgtcttactgaagataatgactgggagaatactgaccagttttgattagggaagtcatgagccaatgtgcattttgaaaagcataatttccaaaaggcaaagcattttgctattgcaacaaaatctccattttacagaaaaaaaaaaaggaaaacaagatttactcaactgaaataaactgaaagaaaagttgatagaactttaaattgttaagggtgggaaagtcggggaggagccagtagacttctgtgtcaccacaccagcctctttccaagggctcaactcataaaccatgccattaactggctttatgttgaagggaggcctttggaatcaagcccactgtgactccatatatcaaatgggaaattatttgggaaaagatttctaaagtgtctccatttcccaccacagggtcatgctctatcagatttcagaagaagtgagcagatcagaattgaggtcttttaagtttcttttgcaagaggaaatctccaaatgcaaactggatgatgacatggtaagacctggtatcttactgagatttagtcctgagacttggttagccagggggcatttctgagaccaaagagaggggtattttggtaaaagcaacctggattctcactttttaactagaagaagaaagttgtcagcacgagtgttacagatgtgattcctttagaccgaagtgctgctcatgttaattattgggagcaaggcagagtcagaggccgggagaaggaggctgtgcagatgcagcccagacccggcagagctgggaaagactgcggtgggtctgagatatttcctccacttctgcagtccccgaaacaacctgggacctgaaactctgtgtgtatattgtgtctgtgtgttgtgtgtgtatttccgtgtctgtgtgtgcctttctctgtgtatagtgtgtgtctgtatttgtgtgtgatatgtgtatctctgtgtgtctctgtataagtggtgtgtgtgtctgtgtatctctgtgtgtgtgttctctgtgtggtatgtgtgtctgtgtgttgtgtagtgtgtattgtatttatgcccctgtgtgtgtatcactgagtatactctgtgtgtgttgtatctgtgtgtgtatgtgcatgtggtgtctgtgtgtgtgtgtctgtgtgtctgtatgtactcaggtctggagaggcaatgctgggggtgaggctgttccccagggtgtcaccatgatgaccgggctgctgtctcaggttgtttcacagtccccaagtaatgcattcgcaggagatttgagcacagggcctggggactgggtgacatctgacatggcttctcctttatcctctcacttctgtctttctgggccagaaaacatggaatcgcttccctagtagcctgctggctgtgagagaccagcagaaactgtcagaaacttgggaagcaagggcaggtccttggttggagaaattggaaattaaaaaaaaaaatctaatctaaaaaccagtagggctcaatccagattcccaactttatttctcctcctcttagaacctgctggatattttcatagagatggagaagagggtcatcctgggagaaggaaagttggacatcctgaaaagagtctgtgcccaaatcaacaagagcctgctgaagataatcaacgactatgaagaattcagcaaaggtagaaacaacctgacagccgggaatcggcaaaacctactctaaaattgaaactgacaaatcgctccatatcacagttgtttctaatcaaatattgtttggggtttccccttttaattcagagagaagcagcagccttgaaggaagtcctgatgaattttcaaatggtaatgcttggagatacattttcaagatttagttaatttactatctggtacctgcatgtgtcctccccacagccttctaccacatgcacatcttaacgtgcctgctctactttttctttttttttttttttttgtgagacagttttactttgtttcccaggctggagagcagtggcaccatctcggctcactgcaatctccgcctcccaggttcaagcaattctcctgcctcagcctcctgagaagctgggattacaggtgcgtgcaccaccacgcctagctaattttgtatttttattagagatggggttttactatattggcctggctagtctcaaactcctgacctcaggtggtctgcctgccttggcctcccaaagtgctgggattacaggcatgagccactgcgcccggccgcacctgctctcctaagacctgtagcccaagctggcaagtttgaaataggtgcagagttagtcagtagtaagtaatttaacatcattttttctatgtggctttttttttctccttgacgtgctgctcatgttatgcactgagtagctggatttaaattatgtttcataattttcttggttaagtcactttctctttcaacaccttctacactaagtcactcctttcaacttcctttcactttttctacctgataagcgaggctgaaccaagagagagagctctcaacgatctccttcaaaattttgattaatcaaatagtctttttttttttttgagacagtgtctcactttgtcccccaggctagaatgcagtgatgcaatcttggctcacaacagcctcgacctcctggactcagatgatcctcttgcctcaaccccctgagtagctgggaccacaggcacaagccaccatgcccggctaatttttgtatgtcttgtagagatggggtttcgctatgttgcccaggctgatcttgaactcctgagctcaagccatccacctacctgggcctcccaaagtgctgggactataggcaattaataaagtattctttctgattagaaaaattatatacactaattgaagattattttaaattcagagaaatttttacaagtccaagaacaccatcactccattcatattatgaatatttttattgtatttttacgttggctctttgtggtgtgtgtgtgtaaaatacattttggatcactcaaatgtattttaaagattaatgtctatgcaggctgtccttccctttcccctctgcctgctgagcctaaggccttaagaatactttaaggagtaaagtactaaatcattaattcatcctgagctagtggctttattaatgagtatctcacaaataccacaaaaattcaacctggccatgtggagcaatataaaattatggcatttcttggtatgtttttctctttggcgaggagacaacttgatcttgtgtttccagaagcatgttaattgccctgcttgcagaatctctctggcttgaaaggagattatattcatggcagtctgtgaattttcattttatttcatttatttatttgagacagagtctcactctgttgcccaggctggagtgcagtagtgcgatctcagctcactgcaaccactacctcccaagttcaagtgattctcctgcctcagcctcctgagtagctgggactacaggtggctaccaccacgcccggctaatttttttgtacttttagtagagacagggtttcaccatgttggccaggctggtcttgaactcctgacctcaagtgatctgcccatcttggcctcccaaagtgctgggattaccggcgtgagcccctgttcccagcttgaattttcatcttaaaaaagaccttatgttgtcctatgtgctacatatttcattaccagtgtacctttcctgccatgtctcattctagatgtgtctcttcgttgtttgcaggggaggagttgtgtggggtaatgacaatctcggactctccaagagaacaggatagtgaatcacaggtagacggaaacctccaaatccttttttttacattacagattctagttatttaatttgttagcttttttttttttttgctgccagataaactgacaaggggcagaaacttactgaaaattttgagaactgtagaaaaaattcacacaaaaaaagttaaaaatgtgacttaatttttaaaatgtgactccttcagttttctatacatttgaattttattttaagacccgagatgaagatactggaatagttggagggtggagggggtaataagcctcctaccaaatcttctagcagccgtgccagcctggatgggggagtggtttggagaaagagtctagcaggaatggaaaaagccaagccttttcctttagcttaatgtttcaaaaatgcttctccttggtgatgaggtgtaagcagcaaactctcacaatctagccatctctgtgtttttgtctcagtgaaccagcagaaacatgtaatttttaggcataataacttctctttatgtaatcaacaatccaccaaatacatcctgacttattagacgatctgctcctcctcatggtaggaagaagaggaaatcctgaatatctgaagtaggcttgagagagattattcactagtgtgggctcctgagaaaattaccagacctctttcatctgaaagtcaaggattaacccaagtaatgtggtactttctaaacagtatagcatgctacaagcattgtccccactgaagagctaaaaacactgtcttaatatcttagtaaatcttagtatctttttccttttttaatgttttattgagacaggggtcttgctacgttgccaagccaggtctcgaactcctggcctcaagcaatcctcctgccttggcctcccaaagtctgggattataggtactagccaccgtgcctggccaaatcttagtgtcttagtatctcagtaaatacacttaatatgcttaataaatacttagaacacaactgtaaataataaaaacttaacatacttggtacaaacttaatcaaatatttaatatcttagagttaacatattaagataacaggttatttgcccaaagtcataaggtgaagtagaggcaggaattgggcttcctagcctggagtccttttctccacctcaaggggctacgcagacctccaactaaatgctgagtttctcggtactgaaacagccctaggagaatgaataggacacagcgccatccctggccagtactatcaggtactacagtttggataccataacctacagtgtagccaggacctccctgaccagcccatctcttcccagcagccaccgtggtcctgagagctgggttaagccatcacctttaaaatcctgggaccacactgtgcaatgcatgaatgggagaccctcagctgttagccacgaagcacagatgagttcagtagacagccaagagaatcacaagtcatggcgtgggggcagccaaagacattcattcattcagtgactcttgattgagctctcacaagttaatacaccgtagtccctggcacagatgttatgaacctcaaggagtcttctgtatagtatgggaagcagaaatgagaacaaacaataatacaatgtgatgacaacaatattaatatatgtgcaaagtgctcaggaggcccaggtattgggacactgactttacaacgatggggcagaagtctgagaggtcctgtgtgaaggaaataggtagaaactagttcttcgaggaaacgaccccgagttggggtggtgcaatggaaagcaagtcctcttactagggagttgtttgtttacatctctagtgtttgacccacagagtcagctcctgggttgggtttttgttttccagactttggacaaagtttaccaaatgaaaagcaaacctcggggatactgtctgatcatcaacaatcacaattttgcaaaagcacgggagaaagtgcccaaacttcacagcattagggacaggaatggaacacacttggatgcaggtacagtagaacccaaaagagaaaagtaaaatatttcttatgcctatttttttttaaatcaaaagggagagaacaaaagctataccaaaagggccatgtttcaagaaaatggatttaaacatatttccctgtggaggtaaagaacattcttatacatttatcagtttcctgctttttttaaaaattaattttttaaataaaagtaatgtatgtataaatataaaatatcaaatcttactaaaagacataatgaaaagcagtaataagctttgttttgaattcagctaaatgcatagcgcttctgtggaatgtattaggcgatgaaattgctgtggtatcaaagttcttatagaggctgcatttttacaggttgggctgttaagtgcagcagaaattgtgggttcttaacagaaatagcattttcaagtattaaatattaaactggttagcaattcttttgctcagccaaattaagctaagatcaagaacttacaagttaaatgaaaaaacaatttgtagtatgtgaatataaaaagtgactacaacaacaaaaaataaaaatcatccatcaccattgagagattaataattttgatttgatcaaagaacttttggaaatagtgtttatcaggcataacatcaattattgatttgttttgcaaatggaggtaagtttagaaaattaatgtagactgattataatcatcaggagtctgtaatggcccctattaacattttttttttttttttgagacaaagtctcactctgttgcccaggctggagtgcagtggtgtgatctcagctcactgcagcctccacctccctggttcaagtgattctcctgcctcagcctcccaagtagctgggactacaggcacacaccaccacacatggctaatttttgtatttttagtagagatggggttttgccatattggccaggctggtcttgaactcctgacctcaagtgatccgcctgcctcggcctcccaaagtgctggaattacaggtgtcagccacctgtacctggtccctgctaacatttgatttgtttatttaagcaaatctaagcctttaaaaaggcacagagattaagtccattgattacatcattcgtcactatgcgcttggtattgaaaaaaatattttggacccttgatttgtattcttttaaaattaaaacatttctattaaaataacatttgcttctatttctggcagctcattttcttataactggcccatgattgactagtctctggtaggcattcgagtctgtgtgtcctgctttttctgttcctgttcttatgttttatgctgaatgagtaaaagtaggagacccagctgcagaagtcatttctcctgagagactcccttctgtcctgcttcagtgccttcagacttgctttacagtcatttttttaatcaacattccacatttccaaaggatcagaatttttttcacagaaccaacacactgtattagtcttgccaaagtgcttccaaatcaacaagggcctattgcatttcagttatttttttctattcctaatgctagactgtattttttcttttttttttttttgaggcagagtctcactctgttgcccaggctgcagtgcaataacatgatcttggctcaccgcaacctctgcctcccaggttcaagtgattctcctgcctcagcctcccaagtagctgggattacaggcatgtgccaccatacccagttaattgtatttagtagagatggggtttcaccatgttggtcaggctgttcttgaactcctgacctcaggtgatccactcgcctcggcctaccaaagtgctgggattacaggtgtgagccactgcacctggctgagactgccttttgactgatgacttatgtttagctctgatgtgctgacagggacaaaatgctggagaaggaataaaaaaggaataatccaacaaggatcaagagaacaggaaaggagacaatagctaatgaaaggtttccaacaatttgggggagttgaaaaaaaagagtcgaggtaattgacttaacagagaaagctacaacctcactgattacagaggggaacacggaaaggaggcaagcctatttacccccacagaatcctggaaaaattcagcaattggaagtacaaagtgtaggtgaggcaatgagcagaaaacaggaagattctttgaaagcctatataagcctatacaatcctctgattcataccttcctctcatagagccagcaactattcttattctaccatcataaggaacaggaagtttgttttctcataaaattgaaccagagaggctctacacttcggtgtgccaggcccagcaaaggaagcaatgaagcattttactgaacacagagagactgaagaaaacctgctggtggcatggagtcagatctctaaaccaacttggttccaagacactggcagcagatacagacttacctctggagaagctgaaagctctagctaaaatacatacagataatgacatctggaggtttcctaatgaaatgatcaggtccccaaccaatcatcttgctatgaaatccctcagagaacaagccacatccacaaacacagagctttcagtcgactttttaatggactaattagtcaatttatgaatggacaaccaaaggtcagcaggcatttgaagaaaggctctaatacgaaagagaggtagcttggtacggtggcgtgaaaatccagcactttgggaggccgaggcaggcgaatcgcctgaggtcaggagttcaagcccagcctgaccaacatggtgaaaccccatctctactaaaaatacaaaaattagccaggcatggtggcaggtgcctgtaaccccagctactacagaggctgaggcagaagaatcacttgaacctgggaggtggaagttgcagtgagctgagatcgtaccactgcactccagcctgggtgacagagcaagactccatctcaaataaataaataaattactagataaatgagaggcaatgcaaacaacaagaaaaacatgaaacagaatatgaatgaaaaaaagataatgttgagaaaaaagcaaccttttttaatgcttaatattggtatttagtattcttagagagttagttaaaggtccatgaaagaacaagatgttatgaaaaagggacagaacaagcaagtctccttgaaaattaaaaatttgagcaccaaaatgaaaaattcaataaagtagaagataaagtctaaggaagtaggataaaaagacaaaaatagaaaataggagtgaaagataagaaaatttgaagctaaatcaaggatgtccaatttttgacaataagagttccagaaagaaaggacagagaaaggggaaatggaactttccaagaacgaaatgacgcaatctccagattgaaagggtataatggattaagattcacttccaaacatatcataccctagaagcttctggaaagagaaaaaagtaagccaaatatgtaaagtatcagaaatggaaagtcttctctctagcaacactgaaagctaaaagactgtgaagaaaggccttcagaattctgaggaaaaatgcttttggaaatagaactctataaactaaagactcatacaggggctcaaaaaatgtacttctcatggttatgctccagcaaaggaaactgataagaaagaggaagtcatagatggaggaaacagggaacctactatggaagagacagagagatgtcccaggagaagagaaattcatctggcctatggaacagccagttggtattacagcagaaggatgcagtgctctggatggaaagttttccaggaagaaataaaaatgagtcagacaagtagcctgaaaatgttgaaagattttggccagatccattgagcacttggagaaaaaacagtgttaagcatataggaaacaaagcagatgaaaaaataatacaattacaagttccaggaaaggcaaaaaggttaataagaaaggaaacataatgaaagaacattatgtttacatagtcttaataatagaaatattactatgggccggaggtggtggctcatgcctacaatcccagcactttgggaggccaaggtgggtgggtcacttgaggctgggagtttgtgaccaacctggctaacatggcgaaaccctgtctctactaaaaatacaaaaattagctgggtgtggtggtgcgtgcctgtagtcccacctgcttgggaggctgaggcaggagaattgcttgaacttggggggcagaagttgcagtgagctgagattgtgacactgcactgtagcctgggtgacagagtgagaccttttctaaaaaaaattaaaaaaataaaaatattactatggattcaaccaaaacttgtaaataattgagtaagagcccaaatgcttattctccataataagaactcaatgcgaaagtctaaaatttataaatgagtaattagcagtgtacccaaattcattacaaaatggagctcaatgtggaaaaaagtggttaaaaactgaaagtggttgccttcatggaatgtgactaggtaatggggagggatagagaggggataaccttttgtataaggtcttctagttctatcttattaattcatatcttttattttgctatacataaataattttgagaaggtttaggataaaataagttggatcttttattcaaaaattgttttgtttttttctgattatgtaaataatataatcatttttaaaattggttcagtagtaagcctaaatgatagcttacccatcttgtaaactagtttactagagaaaacagaccaacaataacactctctcctttctcatttgcttcagggtttgagaatgtttttagctggtggcaataaatattagaagcctgcagaatccagctacgaatatagagggttttgctcttgaatttctggttcaaattcttttttttttttttttttttttattgatcattcttgggtgtttctcgcagagggggatttggcagggtcacaggacaatagtggagggaaggtcagcagataaacaagtgaacaaaggtctctggttttcctaggcagaggaccctgcggccttccgcagtgtttgtgtccctgggtacttaagattagggagtggtgatgactcttaacgagcatgctgccttcaagcatctgtttaacaaagcacatcttgcaccgcccttaatccatttaaccctgagtggacacagcacatgtttcagagagcacagggttggggataaggtcacagatcaacaggatcccaaggcagaagaatttttcttagtacagaacaaaatgaaaagtctcccatgtctacttctatccacacagacccggcaaccatccgatttctcaattttttccccacccttcccgcctttctattccacaaaaccgccattgtcatcatggcccatccccaatgagccgctgggcacacctcccagacggggtcgtggccgggcagaggggctcctcacttcccagtaggggcggcccggcagaagcgcccctcacctcccagatggggcggctggccgggcggggggctgacccccccaccgccctcccggacggggcggctggccaggcagaggggctcctcacttcccagtaggggcggccgggcagaggcgcccctcacctcctggatagggcggctggccgggcggggggctgttccccccacctccctcccggatggggcggctggccgggcagaggggtcctcacttcccagtaggggcggcccggcagaggcgcccctcacctcccggacggggcagccggccggaaggggggctgacccccccacctccctcccggacggggcggctggccgggcagaggggctcctcacttcccagtaggggcggccgggcagaggcgcccctcacctcccggacggggcggctggccaggcagggggctgatccccccacctccctcccggacggggcggctggccgggcggggggctgaccccccccacctccctcccggacggggcggctggccgggcagggggctgaccccccctcccccctcccggacggggcggctggccgggcggggggctgacccccccacctccctcctgggcggggcggctggccgggcagaggggctcctcacttcccagtaggggcggccgggcagaggcgcccctcacctcctggacggggcggctggccaggcggggggctgaccccccacctccctcccggactgggcggctggccgggcggggggttgaacccccacctccctcctggacggggcgactggccgggcagaggggctcctcacttcccagtaggggcggccgggcagaggcgcccctcacctcccggacggggcggctggccaggcggggggctgaccccccacctccctcccggactgggcggctggccgggcggggggttgacccccccacctccctcctggacggggcgactggccgggcagaggggctcctcacttcccagtaggggcggccgggcagaggagcccctcacctcccggacggggcggctggccgggcggggggctgacccccccacctccctcccggacggggcggctggccgggcagaggggtcctcacttcccagtaggggcggccgggcagaggcgcccctcacctcccggacggggcggatggccgaccacccccccccgcctccctcccggacggggcggctggccgggcagaggggctcctcacttcccagtaggggcggccgggcagaggagcccctcacctcccggacggggcggctggccgggcggggggctgaccccccccacctccctcccggacggggtggctgccgggcggagacgctcctcacttcccagacggggtggttgccagacggaggggctcctcacttctcagacggggcggttgccaggcagagggtttcctcacttctcagacggagcggccgggcagagacactcctcacctcccagacagggttgcggcccagcagaggcgctcctcacatcccagacagggcggtggggcagaggtgctccccacatctcagacgatgggcggccgggcagagacgctcctcacttcctagatgggatggcggcggggaagaggcgcttctcgcttcctagatgggatggcggccgggcagagacgctcctcactttccacactgggcagccaggcagaggggctcctcatatcccagacgatgggtggccaagcagagacgctcctcacttcccagacggcgtggcggccgggcagaggctgcaatctcggctctttgggaggccaaggcaggcggctgggaggtggttgtagcaagccgagatcacgccactgcactccagcctgggcaccattgagcactgagtgaacgagactccatctgcaatcccggcacctcgggaggccgaggctggcggatcactcgcggttaggagctggagaccagcccggccaacacagcgaaaccccatctccaccaaaaaaaaaacgaaaaccagtcaggcgtggcggcgcgcgcctgcaatcgcaggcactcggcaggctgaggcaggagaatcaggcagggaggttgcagtgagccgagatggcagcagtaccgtccagctttggctcggcatgagagggagagggagacggggagagggagagggagagggagacggggagagggagagggagaggggtcaaattcttatctatcaatgttatgcccactgtgctctccagctgtggtctgtgaattactgtggtataacgtgactgttcaaatttcacttttcaggggctttgaccacgacctttgaagagcttcattttgagatcaagccccacgatgactgcacagtagagcaaatctatgagattttgaaaatctaccaactcatggaccacagtaacatggactgcttcatctgctgtatcctctcccatggagacaagggcatcatctatggcactgatggacaggaggcccccatctatgagctgacatctcagttcactggtttgaagtgcccttcccttgctggaaaacccaaagtgttttttattcaggcttgtcagggggataactaccagaaaggtatacctgttgagactgattcagaggagcaaccctatttagaaatggatttatcatcacctcaaacgagatatatcccggatgaggctgactttctgctggggatggccactgtgaataactgtgtttcctaccgaaaccctgcagagggaacctggtacatccagtcactttgccagagcctgagagagcgatgtcctcggtaagttttgcctactcagccctcctcactgttacactaccttccccccctactccatcacactactatctactcatattcagagcctattagaaagtgctatgtgatttagatcacattaacaggtcagagaactgtccaaggggagtggtttccgttcaactctaaatgtctagctgtagatcacatagctgcatttcccaggtcagttacaaagtgggagagtggcaagtgttaacatccttagtttatagatggaaaagctgagatgctttattcctttattcagcacctcaaaggacaatcagggtatcacagagcaggaaaggataggaaagtcatatactccagctctctgtctttaggccaaaacatgactgagccaattcaactagttttggaaatcttccaagaaggcagtaacccaattcaatgtttaaacatcctccaactctgtcaaaagttctataatagcaaaccatcctcaaaacctcttggtgcattatgggagataaatagcaggttccttctagccctgtatttcatgttttgagtatatgaagagtgagaatttcccgtaacttagatcatgaatctaacttagatttcgtaacttagatcatgaatcctgcaaggtttccgcggctagctaccaaggtagaagaagaggttgcctaacaaaaatgctaagagatcctggtgagaagaaggtgggagtagctgcaggagacgttatactttcacttgccttaagtttaattgcatcaaagatgaatccgcagatgcgatgtcaattcgaggcagagagtattggggggcattgaagcaatggggagccaagtaacgtggagaagagtgagagacacacaggtcaggagagaaagaaaccaactctaatactgacaccgaggtttctgatggtcaaaagagttcctgaataaaccaaaagtaagttattaagctctgagacaacccatttaccaggaaagctggggtaggtcttggtttcgcaccttattgtttcaaatgactgatattttgagagaaagaactacagaactatctctgagcacagcagaggagacagttcatcagttgctttcccccacagacagtcacaatattatgtgatgtatttcagaggcgatgatattctcaccatcctgactgaagtgaactatgaagtaagcaacaaggatgacaagaaaaacatggggaaacagatgcctcagcctactttcacactaagaaaaaaacttgtcttcccttctgattgatggtgctattttgtttgttttgttttgttttgtttttttgagacagaatctcgctctgtcgcccaggctggagtgcagtggcgtgatctcggctcaccgcaagctccgcctcccgggttcaggccattctcctgcctcagcctcccgagtagctgggactacaggggcccgccaccacacctggctaattttttaaaaatatttttagtagagacagggtttcactgtgttagccagggtggtcttgatctcctgacctcgtgatccacccacctcggcctcccaaagtgctgggattacaggcgtgagccaccgcgcctggccgatggtactatttagatataacactatgtttatttactaattttctagattttctactttattaattgttttgcacttttttataagagctaaagttaaataggatattaacaacaataacactgtctcctttctcttatgcttaaggctttgggaatgtttttagctggtggcaataaataccagacacgtacaaaatccagctatgaatatagagggcttatgattcagattgttatctatcaactataagcccactgttaatattctattaactttaattctctttcaaagctaaattccacactaccacattaaaaaaattagaaagtagccacgtatggtggctcatgtctataatcccagcactttgggaggttgaggtgggaggattgcttgaacccaagaggtcaaggctgcagtgagccatgttcacaccgctgcactcaagcttgggtgacagaacaagaccccgtctcaaaaaaaattttttttttaataaaacaaaatttgtttgaaatcttttaaaaattcaaatgatttttacaagttttaaataagctctccccaaacttgctttatgccttcttattgcttttatgatatatatatgcttggctaactatatttgctttttgctaacaatgctctggggtctttttatgcatttgcatttgctctttcatctctgcttggattattttaaatcattaggaattaagttatctttaaaatttaagtatcttttttcaaaaacattttttaatagaataaaatataatttgatcttattgctccttggagattttttgtgtttggttttggtttctgccaatgacatctcacaggtggaaaacatctggactacagacatgttctacttgagtctcccatgatcggcacacacagttgtatttttaaaatttgttgtcaatgtttaaaaattaggagatatcacataaaaaccagaataacttcttttaaaaaatcatactatctgacaatattgacctcatgcttttgcatggcaaaggtctgagaagcaccttcttcagatgggacagtgctctgtgggtcactcttccccatccgctgtgccccagccctgcccaagcccctctactgaggctgctgttggttgccacttatcactgtgcttgggcaattgttttccttatgtctagcccacttcacttatttatgttgcctgcactgtgggtgtctgaattctggtgatggtccagaggaggtggtaagaatcatcagaaacccttcctaagtcataggttagggaacatgattgagaggtagggaagtagggggcatgggtgtgagagaaaaatattttagagtaaaatcaacacatcatctttttttgctacctaaatgccccaggggacaaaggtacacctcccaaatatagtaaaagttcaatatgaagaaggccttcaaatcagtttctttctaacgaaatacgtcaaggtagaagaaaaatagtacaaaactcagagaaagctcagctcccagtatggagagcatcatttttcagtgaagagtccgtgataagctgtgaaattcagatgcgaattcaaacattttcagacattcagagagtcagagcaacccaagaactaaactcattatatgcattttctcaagaaaaccctcccaggagtttcctgggcctacagaaatggtgtgccaaccatcttcaacaatgcagagcaactttttgtttatgattcttgtcctttcttgctaccatcttgcacagtgtcagaatcatccttagaaacagtaatagaggccaatctcccagaacatccttcacaaatttcttcattcttagaaattatcttttgcctgtaaaaagaaaggaaagatgtatcaatgtcaactcaaaagctagaaagggtataggatatttggagtgcagggagagaaatgtgccttcgttccttcaccacagcagtctctcactcattacttgcagtggttttgaatttagtgaggtatggtgttcaggtgactaaagtcctatacgaggaattttctactaaatcaatgcaataaataactttcttctattaaagtattgaccaaaatttattttaatgatttaagatgcagcttcaggtaacagtacaccttctgatccaaaggtgatttccataggaaccagaagcagctgcatgtaatggcaagaccatcagactcccaggggagatggatttaaaaaccaccctcagtcatagaactgagcaaactcagaaactggaagacaaatgtcctg

SEQ ID NO: 88 - DNA, 163067 bp, Homo sapiens
  source 1..163067: mol_type = genomic DNA
gggcagttttggggtctggccaaggtcagcaaaccaccctgagtccccattctccctcccctgggccccaggagtcagtgctgccccagagagctgcccactgtgccggagcctagagggagctctgtggctgcaccacccacccaccggctgctcagggcttggctccctgcctcgcttcaggccccacgggaggcccaccagggcctgggaagctccaataatggttttaatttgttgaacttgtgttttatcccataaattagtcactgttttatttaacagaatcaagatatccgcaaacaataggcgagttccaacttgaacattttaataagacagaaaaaagtatatattttcatgtctgttacaaacatatttatgtaaatagcctgtgggctgcattccaggaggaaagaagaaagggagtgcccgcgcgccggggctgggctggagacgcacttctgcggtgggaaatgacacaggcctgggcgctgtgggctgaggccactcccctgccgtccctggtccctggtgcctggtgcctggccggctggtgccaggctcagtgagggagaagcgtgctgcgataaccgaacctctccagcccccaagtctgcctgtttcctcatcgggcaagtggttgtgacatccctgtggctggggtgtgatgagccggtaagactcctcagcgtggaagaatgtggcagatcccgcacacatcccctccccaaggtcccaggaagctccggccacctggagtccagctcagggaggggctgccaaggtgattctcacgatgtggtgtcgtgaggagccggccatcagttggaagtgtcaagacaaactctcggagcgcctgggaggcctgtactccaggctaggtctggtggacactccggccactgtgcttccgagggagccaaccacggtgccaccagggctggcagctcaggctctgggctggtggctacggacccaggaattatcggccccttctggctctgccaccctgtgctccaggcaggagtcgcgccagcatccggattggatccgggtacgcgccgttcccagcccgggcaggtccctgcaggaaggaggaaggagccgagggaggaggcaggagggtggccctgccaacgccggcccagcagcccaggagaggagagggttggctggggtgggggtcctgggaggctgcagggcctttgtccgacgacccaggccttggtgtcaaatggctctgcccaaagatggctcctgagccccaagtgggggcttcaagcagggctggggaggaggctacccttctggccaggccaggaatgagccccctacctctgtccccagcagcccggggacaaaactggtctgttccccgcttttcctgccagggtcgaagggtgcccaactcctcccgtcaccccaccggtgtagctgggtcatggccagccgattgggggcgattttaagaataaaagataacttgatagatttttttccagtttttattgagtgaaaatgtcaaaccttgcatcagtcatgcaaaaaaaaaaaaaaaaatcaaataaataaaacacatatattaaatttctaatagcactaaattcaagtggaaaaatattcagttcttaataaccaggtgccgaggagaccagattcaagtaatcagagcacacgctgttcagctcgggtttcacgttctgtattttttttgtctcaaaacctctctatatatctctatatatctatatatgtatatacatatagatatatacacacacatatgtgcatacatattatttgatatttatatatatacacatacatagttataaaacattaaaaagagcattggtggatcaagcattgtttccccacagaaagaaaataaaacaaaaattacacgttaaaattcaaaatgagctagcaatggcttatagtcctagtgtgcaatatgaagtttacaaaaggctagactccgcactgtcggcatcttcttcttttcttcttttttttttttaagtttgattttgctacattgaaaaaatgtttgtgtgtgtgtgtttttttttcctttacaaaactccttccacagacgcccggggcctgtggcgggtcactgtctgggcagatgctcacagcagcacgtggtgcccacagagttcaggaggctctggtaggggctgttttagaaaataactgatttcctgttgaatcaggtacgctccgtgcgaccactcctccctccctgctccctgtccagttcgggtggtcctggctttctggctgtgggcagctgagaggacaaaagaaaggaagaaaaaagggaaaagtaaaccactgccccccagttgagccaggttcctcctggagacctctggggaggaggcttctggatgacagcctccccgccagccttccattccctcctaggcctgttctctcccggtggcccaatctgacaccagctggtggcctggagtagggaaggtgggcaggtgtggcctcgggcagcctgccctcgcaggggactcggtccccggggacctcagagccactggccaggtgtgtgcctgccaggtcaggccctggcccgggcttcgatggcatcatcatctccaggaagggggatgttttgcaaagggaacccaatctgggtagactgcaccagcgaagaagcatcccaaacaaagtaataaaacaaactggaaaaaaaaaaaagccctataaagccacacgcatcaccaagagagaactcaaatgttaaattaactacaaacttggatcaacagtaatagtccttttttcttgtctctacaaaattcaagttaagagttggaatcacgcagctcccatcagtgctattgtgaagacagacagcctcaaacagttaaggcctctacaaaaaccctggaccaaatcccacaggataaacgggactgagcctccaacctcaggccgggcccaggcgggtctgcactctcaccacgcctgctttcttcctttttgttctatgtagaataataacctttacaggaaaaatactgtacaactttcttgtatttttttccattttgaacattaaagccaaaaccaggcgcatccttcctgtttgcaccaccagggtggccgagaccccgccccggcccccagcgggctactctgggttttggacgcagcctcggtttccctggggcggaggctggggccagggagtcgccaaacagacccgacccaggcctgggggagcagccgggccctggggtggggctgagctggagctccgcggctgctactcccgtgaggcttcctccacggtccctgtagtgtcacccgtgctgactgccttctgcccgtctccccctgggcaggggggaggatcctagctgcatgagggaggccccgccagcggctccaggagccaccccgccctggtggcgcgcggtgggggtcccggtggcccccagcgcccgtcccagtcctgagcaatggtcgcggggccgaatcggccgcggggaggggcgccggggcagcggccgggagctgcgccgcattcgcccgggacccctgctcctaggttccctaccccgggacaagagcaccttctgtttccctgaagagacccggcctccctagagcagggccaccgccgccgcctgtgtcctcggccgcggagcaccagaggggtccccgcctctgtcctgagacggactcggggtccggaagcaccggcggggcgcggggctctgcccaggggccgcttcgcgcggggcggcgccgctcccgaggccgaggccgaggccgccgccagggccacccgcgggcgccgctagggcgaggaggctgcagtgggcgcggggccgggggcgcccagggccgccagcgccgccaaggccggggtccgcgcgcccgcgcccgccgcctccgccgccgcctcgggcagcgactcctccgagtcggtgcgcaggtcctcgtcgtcgtcgtcctcgtcgtcgtcctcgtcgtcgtcgtcctcgtcgtcgtcctcgtcctcgtcgtcttcggcctcctcctccggcagctccagctcctcctcctcgtcctcctgcgaggactccccagctgcggcggcggcggcggcggcgccctcgcgcggcccgggggcggcggcgtcgggcgggccggggtcgcccgcgtcgcccagcgccaggcccaggccggcggccgccgactgcaggaagagcagcgagcccggctcggcgcccagcgacagggagccgtccagactgatgggaggcccgggcgcggggccctctgccgcgggctcgccgcgctcctgcttctcgtgcttgcgcttgtgcgagtccatctgcgacatgcccaccaccgtgtggcggcagcccgggaaggtgcagtggaagtgcgagcacttgagcttgtacttgcagtcgggcacggcgcagtcggcgctggagctgaactggcagaagcccgcggcgctgatcacgtcctgtttgccgtggtgcttgcgatgcgccgtgaccttggtgctgtcggtgcagcggaagcggcagcgcaggcagtggaagtgcgtgctggtgcccgagaaggggcagtcggcgaagtggcagctgagtgaggccttgaagcgcttgaagtcgtccagcaccaggttgtccacgcggtcgtggtgctgcgcgtgcttgtacatgtgcgtgcgcccgcagaacttgtagccgcagttctcgcgcgtgcagtggtagtgggtgaccttgagcgagaactgacaagctgcgtccttgcagtcctcgtaaaggtcgaagcgccggaagccctccagcatcatgccctcgtccagcatcttccgggaggacgccgtcttccgccgcttgccgaagggcgacatgtcctcgatgatccagaagcgctttttggcccccgaggctgtcggcatagagatggtgttccctggggaggggcagggaggtcagtgcagaagagggacccacgtgggcaccatcaacagggttacacccacatgggacccctgatctggcatggcgccagagggcggcatttagggagccctcggcttcccctggcttgggaggcctctcctgccccgccccctccctaccctggcacagcaggggtcctgggcttcccctcctcatccctgtctgcagaagggccacacaggcctctcccccggggggtggcagcccaaccagctctgggggacgtggtggctgcttcctggccagtttgggtgggaagtgaggacacgtcctggcgctaattgaagctgaagggggaatctaggtcggcagagtgcaattagccaagttggactcgggccaagacgccagctatagctgcctctaatgagggacaggccggctcctttcccgccggctacccggcttccctggctgcgcctgtctgcacagggggagctgcctactcacagtaggggtgccaagtgccccagggctgtgcggggctgcaactccctgccctaaggagcaccttgtccttggtaccagaaggttctttaaggtcttgttggggttttctaccccaagggctgggagagggcagccctgatggaggaccaggactcagggagctcaatgcctctgccctctgctcagagtcgtaatttacctgggtcaggaccagggcaggggctcagccatggggagcggagcccatttatgtccagctggcccagactgcttcctgggatttaggatgcccccctgccaaggccagggttgtaaccctttctgggaggtacctgtgcccctatggccatgggtgaggggaagccccagctcctgccagaggcacaggcagctagtcctggctccccacgccaccctccacaaacaagagaagctctctgaccagccccaccagagcgtgggtagcctctgggctcctcccacacggctgacctgcctggctcccccagagcctgcttagaaggcccagcagtcactctagccaccaaatgtctgccctgcccatttcaggccaggccccataggccacccggagtggacaaaaacggagagagactaagggctgtgacggtgtaggggcacccaggcagggggcaagggatggcctcaggcccaaaacctggtgggtgaggagcggctttgggtctgaagtcacagggtctggttatgccagagtggagcttccaacagccggaagtccctgaggagggggaggctcggccctgccctggccataactcctggggcctgtactcaggcagcacgtgaggcaagaattagcagaggagtccgagcccgggtggtgtctacgctcaagggagggggcgggcagatgccatcccggtgggtatcagatatgggggtgggatgggaggtgcctctgcccctgagcactgccggggcctgagtccacagagacttcccttactgctcagctttgggcgtggcccggggctcaggctggaatctggaccctctgaacctgggcaggtcccagaccccagcagaccttcccgaaagcctcctctatctctccctagtgccagatcccagggggactcctcagagtagaagggacaggtcctgccttgccccaggccgaggaaggcagaccctacagggcctccggcaggatcagccatctctgggactctgagcagttgtgaacaagggagaatccctggcagcagtgctctggcctgcccagcactgagcaggagccacgaggagttgtccctgggatggagaccacgctctctagtctcggggatgcttggctgtgaggggtgcagagtggccccgtccttggcctggctggctgcagaaaagggtcaggccccggagcgtggcctggagggtgggttggggtgatggacagcggtgagaaggcatgtgcgcgttacctgcagcatcctgaactagggggacgtcactttttactggagttggagtggcagtgacgggcgggaagctgggcgggctgcaggtgggatgggccaggccccggccggctccgagagtggcactgagcagagagtatgagagacaggacggagagaagaggcaggggaggggggggaggggcggccggagcgtggccggcgagaaggatggagtcgctggcggctgcggggccgtgcgggcagcctcatcaccagcggccgcaggaggaggaagaggaggaggaggaggagccgggcagcctggagagggtggagaaaagcagaaaaaaaaaaaaaaaaagaaaccaaaacaaagaacaaacaaacagaaagaaccaaaatgagaaacccgatggcagaagcaggtatggcatgaaaatgtgtgcacggatgagcagagagagggacacaagaagaaggggcaggaggagagagaggcggggcagtgccaggggtcacgtgggcaggtgtgccgggcaggaccggcgctgggcccaggccgggtgggaggcagcggaggaaggaggctggggctgcgctgctcccgctgtggctcagagaggacgggcccagggtcctctcccggaaactgacgcaaagggcagtgccagggaggcgggaggatggcgggaggggcctcgatgacccagtcccacagaccagctggctctgctgcacgccagcctgtcctcctcggaggccgcgtgccccggaccttctgtcccaagctgcacccagcggtgctgggctttgggagtggggcctggccctgccagcagcccctgcctgccgctcacctgccgcggtgctctcgttacccacgggggtgctggagcagctccggtccatggtggatgactcagaggacatggcgcctgggctgcagccagtgtagtccatgcactcatctgtctcagcatccatcaggcctggggggccctgaaaggacacgggggtccctgaggaagtggggctgtggggtatgctgcccacagagggcaggctgaggctccatgcagcacaggcctgagagtgagcgtgggaccatgatgcgttcccgccaccctggctgggctctcacctggggggggctctcacctgggaggggggcacgcggtcgaagttcttccccagcatcctccgcatgtgcttccgcgcgtgggaggtcatctggtgcttgaggaggaaggagaactggcagccctcccggatgcagtggaagtggctgttcacctggttgtacttgcaacctgtggacacagccccacctggcatgagcccccagctggccagcgctcatggcttccaggtcctgttgggcactgttctgggcatgggggcagtgtggtcagtaaggcagatggtatctggggaaagggcgctgagccgaggtggcagtcttaggaggaaggtcaggaagtccaaagccccctggctgtccaaaccctgggcctcctctccagcctggcagaggcgagtgacaatgctgggcaggcccccatcccctggctcacacacagggaggtgcacagttccaaggcaagggaccctcatggtccctgcacactgggccagctacctcccaggaagccacctgtccccacatctctgctggggagcccggggtgctgtctgcccctctgcccaggccccagcacccacggggcctcgctctgggccgagaacaaacagagcaggcgggactgaaacagcatcatggggcaggtgagggcctgtccgctgccatggcgcccaggccggccaggtgtcttctgtcatcccccagctttgtttggccccaactatcgccaaaaacaccacaagttgagtaaataatagcaactgcagaataccctgacatctgtaaactgagcccagggacagcacaggccgcaagtgttgacgcttattggcatggctaccagtcctctccctggccgagaactcctttttgaattcatacttgaaggcaaggtttgtttcctttttctggcagttgactttgaggatgtcacctttcacttttggaaggaccagaatgcagcagcccccacccctgctgccctgaccaccaggccacaacgggccttgcctgcagcccaggggcctctgctgggcggcctggctcccgcctgcccgtgggttctggtctcttcctagggagagtcctgcctcatcagcaggctgtgaacaggggccaggggctcagctcccagcagcacggctacctctcaggcatcagtggcctcccttcccaaagccacagcaccccttcctgggttccgggtcacgggtgctccagctgagcccatggagaacttgaccgttccccattagatctgagtcgccaccactgtcaccacccccacccctgtgacagcacccagcctggcacacagctgtccctccataaataactgcagaatggatgaatggaagaacaaactgtagctcactgcggacaaaaacctcatcatgaaagccatggaaagagatcccagagcaaagaacgttgaactcctaaaaattccctgctcgccttcttgataagaaaaggaaaacagaaccacgcccaggccctggatgctcaagatgaggtcccagggcggctgtctgggggtggaggggcggtgccctgcgtgagtcacccccactcttcttgctgggctttgtgggtttggactgtttcacaagcttgacagtgcctagcccgtgatatctgggacacctttaacaaaacgtggagcctgcggtggggaacaggacgcgggtaccaggagaggcggcccaggccacgggggccatggtcttgatgcctgctgcaagtccctgcccgcagccccagccctcggtacctagcctgccacactcctcgcgcttggtgaagtatttgaagccattggctgcccgccgctccgccttctcatgcttcttgatgtgccaggggagcttggtggtgatgttggtcacaaaatagcagccggtgcggaggcagtggtagtgcccacgcattcggaactcgcagtgctgcagggagacacgggagggtcaggacaggcgggtgactttcaagagctcctgcctgccccgggcctgaggctgtggtgggcccttggcacatgtgttcttctctgctcagaagctgatgatcatagaaacacctttcacatgttaaaaagcagcgcagggccgggcgcggtggctcacgcctataatcccagcgctttgggaggccgaggtgggcggatcacgagatcaggagatcaagaccatcctggctaaagaggtgaaaccccgtctctactaaaaatacaaaaaattagccgggcgtggtggcgggcgcctgtagtcccagctactcgggaggttgaggcaggagaatggcgtgaacccgggaggcagagcttgcagtgagccgagatcgtgccactgcactccagcctgggtgacagagcgagactgtctcaaaaaaaaggcagtgtctgcccttagtcactgcactaaagcatcctagcctggtaaccttgcaggccatctgcaatcccatacctagagcagacatcgcgaatctattttaacactcttccctgtatgtctagacctgggcagacatcactgctctatactagcacttctgggcccagtttccccctcaggcagcccctcctggtcttgggagtcaggcctttaaggtgaatctgatctgactttcctgtgtgggcacggacaatgggcctgttcgaaaattctagggctttggaaaaagggggcataaagctagttccaggataggcaagaatgatgtcaagggcacggtggctgcccagcattgagtcaccactcgggggttagacctcaccaactagcaccaatctggacccctgcccaggggtctccaggggcctaggggcagatggtgctctttccagagtccgggaggcccatttaaataagcaaggtgtgagaaatggagcctctgccaggaggtgactgtcctgtgccctgagctagccctgcacctccctgccccctactctgcccctgcgccgtgtaccgccatgctgacctggttgggacagagacactgcagagagtagtatgcaaactggtctcgcacgttcaccaggttgttgttggggttgatgtggtccaggcagtgggattcggccttgccagacgttttgcagacgtacttgcagttcccaaagagacagtggaagtggaacttgttggcgtacttgcagtccgtggcgaggcaaggatcgctggaaggaaaccacagcccagaaggtcattgccattctcaagccctccctgctggtgtcctgacttcacttgtgttggagttcactcccccacgaccagcggtaccaccaagagggatggcctgggctgctgtcctgctcaacaggatgactcagctggagactacagatcccagcatgcattcctgcctccttttaggagctctgcatggtgcacagggattgcaatatgcagggtgcccagagcattgcatgctgggacaagtagtttccatggccacacctcaggattatagataaggatggctgtaataacttcttggatcggaaaataaggatggtgctgccagccctggcggggtgccgtgaggccctggctggcgtggcatgggcgccaccgtggatgtggctgacagactgcagatgggtgctcggccccaccaggaagcgctgctgccacaggcccttagcaagcaggagcgcgtgcctggtgtcagctcctgggggctcacagctgctgggctccccaggatcaactcggggcccatggtgcccacccactcagacctcacttgccggcggagtgggagagctgctggggcagagcgggtgtgctggcctgccctaggccgcctccaggatgcagaggggtgcaggaggacactggtcccagccttcaactctggttggcaacactgtagtcccctcccaggggacccacggtgggcactctgaccaggccagggaaacctgagctgctactctggggaggaggagggggaggggaggctggtgggggggacggagaacagtgctgggccccttccatgctgtgggcccagccccagttgctcagagagggaggacagctgccactcaggcgatataaataatccaatttattacttttattgagaacaggaagccgcacacatgacaatacaaagtcaccgttctccctgcaaggagccaccaccatccagtgaggagggtcccttccacccaagagctcagaccactgtgcaggccagtgacggcctggaggggcctggcccctacccgtgacttcacgtgccctgcagagattcagccatgggtgtgagccacagaggaggccaatacggaggctcggagggagacgcagccctccttgtcaggctgggagttgtcctctgaggaccaccacgcccagtccaccccacctggccctggcaggatcaccacatgccctgcaggagcagtagccactgccgccaccatcggcccacgcgggctggcctgctctgggacaggcagtgaggtaggagcagcagcatctttggctagaaggacatcacccgatggccatgccccagagaggctggggacagcagcaccatccgcagtgaggaacagggcctcctagcgcccttgctagcacctactcccgagacgcgaggggaacgcgggactcccggctcatcgagggactcacttctcctggaactggaggaatccgggtttgacctggggcttggcgttctctagagaagtcgttgccaagggcgaggcgggcaggtgaggcactgacgctgggatctgaggcatctggggtatggtggaagccagctgcttccaggcgagcagggtgggggtggagggcacggaggccgggctgggagcgggcccctccagagaggacaccgtggccgtggtgacaggagggaccggaggggacgagggggccatgggaggtttggtctcggcggccgaggccggaaaggcagcctctgtgtttccttttgctgctcctccctctgtccggaagtggaagctgcgagaggtagaagagggggtctcatggggggcagtgaagacaggtgtggaggggcatgcatgtgaccccatcacaggcctagaccccggtgtccgtccctactcgtccccatcactcagctccagaagtcccctgtgaccccaccaggacagaaggactggagggcaaactgcagcgtcccctggttccgaacttggtctcctggcttgggcctaaccatgccttcctacttgtgcccttcctcggtccccagctcctccatatgtgtgacagcaggccctgccccaggaagcctcttccttccagaacctgctcggaggtcttaaaggtaggattctcagtattcacagcaggcttccccgcgggctacggccgagggtgcctacgcggtcggaaaagccttgggagcactgcaggtctgttttaaacgatttcaagttctgagttcccttataagtgggcggctaggctcgaagccttttaactcaatgggatttacaaattcatttcattatgtttaggtcaaaggtaacctagagatgtaatattgtggcttggaaaggccttcagctagggttcctgctccaggtcacagccgagtctctccagctgggctctgtgcccctctggcctgctctgcagggagcacgtgctgggactgatggctgccctggggacgtgggtgcagcagcagctgttgctcagggtcccaggaagggcctggacaggggctcagagcccccggctgagggctgcatgtgtgaaggaggatgggaagcccacccttgctggggcagcatctccgagaagccggctcagcttctgtggcccagcgggaactgctgtaccagcctgagccccacccaccccagagccaggctgggatccgtggggctctgtggaaatggcccccagcaccctactcactttgcgtgcttgatggccccgtccaaggtgctgaagagcgcgccgcattcctccaccacgcagtggaagtgggccttgtggaggaagtcacactggccgtcacagaagtcctttgtaccaaacctagccagaggagctggcgttagaggagagcctggggctccagggcgggtgcggggggacgatgggtggacgcggccagcagcccctcacctgcgcaggtacaccttccagggctctgccaacttctcctgaaccagcgccttcacggccttgcctaggaagggcgagggctccgcagcggggctcccctccgcttccgccttgatgttcagcaggctgcccaggccagggttgccctgagacatctgtgagggacagaggccgagcatggggctggggtagcttagaacacagacacggcagcctggggagcaacagccgaagctctgggctgctgggacccacccagccctcagagccagcagagaatgcggcccgcctacttggctctggctgtggctgggccctctctgaacagagagcctgctgtgctgccccgaccccaggagctgcgaggcctcctcagggctcctccacatgagcccgtgccgcgggatccatcactcaagccgaggccgcgactcagggtgcacgctgcagcccatctttccccagacttcgcggctccctggttattttcctgccagaaggttttcaaaagaagcgcagaaggaggagggatgggggaacccctacgaattccttgagaacaagaggaggcccacaaaggagagagagggagggagggagggagggaggctcacgggtgagacccagacaggcttgctgcagcggccgggagggggtcattgcgaggatccaagggaagggagggggtcgtgggggcggaggccaaaggaaggggagggggaaggagagcaagagggcaagtggccaaggagtggatgccacggaccagtgaggctccttccccaccgagtgcccggctggggccctgcggcgagaggtccggcccgggcccggcccctcctcagggcagtcacttgtgtacagtaaccgaattaatcttgctgtagtcaaatgtatcatgtgaaggggaaaaatgtatttgagatgatgtataatttacaaagaccctgcattatttaaaataaatattccggagcgacctctccggaaggcgtccgagaccattactcaaccggaaaagtggaaattgatgttttgctcccactttagtcccccctcccccatccccttttaaacaaacaaaaaatatatataaaataaataaataaaattaataacgaggcacgaacgaagttgaagggctctggaaaagcttttggagccctccatctgaagggaaaaaaaggtgtcagaggctggaatatatttcttcagccagttcattaaattaatttgtaagcagtggctctgaaattatatccgatgaaaaatggcctcaaaatttaaatggtacaaactcatcttattagaggcaaaacattaaaaaacaaacacatccccccaccccccagcacagctttaatttctctgggtgggggaacgggaggcgtgtgatggatggctcttaccttattcataagcgaggataaaagagatgaatttgccgggactgcgtggccatttgattcgttgctagaacacacaaaccaagggacttgagctcagacggccggggcctgggccctggggctcaccttccctgcccgaccctggggctccagccgagcccgctgcaactgcctgggcgggaccaccccggggctccagctcgaaggtgtggttcccggggctggctcccatagggggcctcgcctcacctgggctccttcacagtcaggtctagactgcggtcctgggaggcttcgtgggggcctggggcgccggtgctctcaccgggttccggcttcacttgggccggggggaacctggctggggtgacctgctgcccgcttcctgcaggggaggggtgggaagatgcgtcagaggggctgaaggcctggcccgggcacagacagccgccgtgccccctggagggagggcagtgggctgggtgggccccggctactggtcagcgcttctcccgctgacgtgatcgctcgcgacgctcgctcctgtgtggcaattcttcaagtgataattattgcaaaattatgtcaaagttgtcctggctcagggcctcctggaggagaagggcgggaggctggggagggggctggggtgggggcgggggcccttcattttctccaccaactgtcacagtcgatttgtggggctgccgcttaggcttttattaaagactctgttaatgctgagggaaagtggcagatctggactgggagggcccctctgtggtccccagcccgcggttgctggggtgacggcccccgcacggagcatgcccaggaagggcctctgctgtgtcagggcgatggggccgatggccaatcagagcggccacaccgggtgacctcgcagtcaagctatccggggcagggacacgaggccaggctgggccgagctgggtccggaagggagctgggcgggtgaggccgcaggaggccagcagagcaggggtaaaagaagttgctgacagggccatccagcgagctttcccctacaatcccccagtgacggaaatatgaatttgccccaaggtgctgtagctgacagagtgctgcttcagaaacagcaagtggcattttattaaaaaataaaacggccccctcccctgtgcttgatctttcttttgggagaaggagacttttctaatgaaaacaaagtacttgacagtctggccaccgagcccacgtggccctggagtgggccctgccccatccatcaggcacctggctggaagggcgtggccagcgaggccccacccatgcctggaccaggaggcggtccctccacgcggccaccgggcatgagcgtcctattgggcctgtgagagttttcagaccttgggacttcacattccagcagctctccaaagtcacctgcccaaggtcccaggaaaacggcccagctcccctgccaagcactggcagcctctgcaaggtgtgggcagagccccagactgggccacagggaccctcagtcttggctggttctgagagggtttcgaatgggaacagggcatctaggcccaggagccccactcctgcgggcagcgccttggttcaccacttcctagccatgtgcccgggacagaccatccctgaccgtctgctggctccacggcgtggggctctgtctggcgtcccgcctgctgtgtccccagcacccggcttggagcctggctctcagcaagcatcagtggttgttgaatgaataagtgaaatgagccacatcccagatgtgaacggaactctcctcaaggattcaacaaataggaactacccagagcagggaaactgggagaggagtgaggtaaacagaaaacaccctcaccccaatccagagaaaaatggagggaaatttttttaaaatggatatttatgaaattataggaaggcaggaaagagaactgcgcccctcagtgaaccagcgtgaagaaggaagatgcaactccggggctctggcccttttctgtctgacgtggcagtccctggccaagtgtggttgtttaaagtgacaatcccgcttcccaatcacagacccagcttcaagcaccaacagtcacacgtggccagtggctgccaagtcaaacactgcagaatagaaggcttccaaggcctggaaagtcctactgcaatggcactcatggaggagggagcctgggaagggcgtccctgggcctggaggtgtccaggtgtgaggtgcagccccactaccgctgggctggacgcaggccctgctccaggtcagctggaggaaacgctcggcacgccaggggccctgggcctgctcttatcagggtggacttgggatgtgggagggtgagcagacagggaggggggacctgcagtggccccagggatgcagggcagccgaggaggcagggaccatcgcccccagctcacagatggggaaacagaagcatggcccccctactgtggggagccagaaccaggggccccacatagaaaccaacaggatgggggcgaagatcaggcaaagagggggtgctggcaagcaggggccacacggacacttcttccaaacaccccccgactctgctctgcagcctgaggccaggtggccaccccagtccagaaggtgcctgctttctgggcaggacccagcctgctcacctgggtcaaaggtggcagagggcttgagggcagctgcagccagcctggccatcatgggcgagatgaggcccttgcttgcagagatcctctccatgatggaggcgggtggtgccgggacagaggcggcagccacgggggctgagtctccagctcccgaggcgaccagcgtgggtgtgtcaggggtggctgaggctgctgacccagacgacacggcacccaggaggctgggggtgcccacaggcagggaggtgctcccacggccagccagtatggggaagtagggcgtgggggtgggcaggcccgagttggagagggccagggccagggggattgagccaggcaggccctggggcagcagccccgagatcttgctgttgggaggtttggtggcactgggcccagcctcggtggcggcagtggcggcagccagggacgcagaggactgctggctggtaggggaggcgctcaggctggagttcttgctgctcagggcggagaagtcaacaaggtcgtcgttgctggactcctcgtgctccgtgtccttggcgcccagcagcgagggcggcagccccagcgcgcccgaggagcggatgtgccggcgctcatgcttgcgcttgtgagaggtcatctggctggtggaggtgaaggtgaagccgcagccggcgcggatgcagtggaagtggttggtagccttgctgtacacgcagccctcgtacttgcactcctcgtacttgtagaacttcttgaagccgtccttggcgtaggcatcgtccttgatgtggtagctcttgtgcttctcgatgtcacacttgttcttgaaagtgaatgtgcagccggggcgcctggatgggacattgggagcctgtcatgagacccagaggaggccccaccctgctacaccatggccctgggagggacagtcccccgggtggaaaacccaggctggacaccgaggcaggggcctgagccgtcccacgagcctgggtccttgccttccctccccgcttctgcccacgaaggcccccaccaggctcccgcttacctgcagtggaagtgcgtggtcttctgtccgtagaactggcagtcggctgtgccacagtcttcggtggctcggaagcgctggaagccgtcgttaatgagctgggtattcttcttgtggaagttctcgtgggtcatcacgtcagacgtgctcgtgtacaccttgttacagcccacctgcacaggacgggatggtggtcaggcgaacggaggccaggtgctcctgggccgaggtcgacaccactgtgtgtggctggggccactgacttccctgctcagggaagctttggcacctctgacttcaaactggaggcctcgggatgttgatgtaggaagcagagtagaaagcctccaacagcccctcaggcctccacagagggaccaagtgctgctggagcctggctccgtctgtgctgaggatcagggcatctccggagactcagggcactttttggcccaggggagggagctgcatcctgcaggagttggattttgagttccaatccatggccctacctctaaaaccctcagtgggtggacaggggctggaccctggaggtcacctttagcccagggatttgcttagtggacagtccctgggcacggggccctcccaccccaccccagctgggccaggaaggcaacgttgccatattgagtaaaaacccgtggaatccgaacactctcgtaggctgggccgtgccagtgtctgcaccatctcagagcccagagggtggcccccctctcctcgtggcccaggttgttcacagaggccataacaactcctgacaaataccgggggaggcatagggctgctatttgcaacccaaagtcgctcctcctggccctgacaccttgaaaaagcccagactctgcgtggcattaaaacaaagaattaaacaaaaacctcctcaggaatcatttgcaatgctgctcttggtgttaaagcctgaaaaatgtccatctgtataaacagctcactgaatttcatccacaccaagtatggccatggggaaggccccaccctggcccaccagacgctgcccaagcctgaacccccaggaccctcctggctcgctggccatccctgtgctgggccaggggaaagagaggctcctgatcaactggggtccctgcccatggggcagccctgcctctgggagtggggggctcagagccgggagggcctgggccagtcctgcagctgcccagtgggcccgggtgcgggaggcacctgcatgcagtgatagtgggtgctcttcccattgaggtggcagccgtggtagtagacgctgcagtcgtccagcgggctgaaacgcatgaagccgtgctgcagggagttgtcgcgcttcttgtgcatgttgtagtggcggatcacgtcctgcttactcgtgaacctctgccaggagacagcgccacgtgggcaggagcctgagctccccctccgcccttcctcccatatgccaagagcacctgggccaggtgctggcctcaggtctccctagaaagaaccctgcttggggtcaaggcagcccagattgtccaaggccagtggcaggcacatcagcccttggagggaaccatcccaaaggttctaggaccatagattcttccccgatgctcccctaggtgcccagtggccatccccaggagcacagatgatgcattgggccaggccttgagggcaggggctctgatgctgacagctcatcccgcccagtgcacctctggactaaggcaggctgggatccctggcaagccagagggagccaccccacgcaggctgccctgactctccccccactcaccagccccgcgctcactggcgggcagccttgggcacagtggcactctggctgagccacaattttatcatctttaagatggggcagtaatgctaaccttctaaggccactgcaaagagtcaattaggcaaggctcataggctggctggcatggccctgggcacgtgggaggctctcagtcaaaggggactggaatgatcaccactgggaggtcactggcccccaatcgtaggagctgctctgtcggcaggaatcggggaatgtgggcaggctggtggttttgcgggccctctacctgctcaagtcaagtttgggtggtgcaactagaactaaccccccccactgccgtccccgcctgccgacttctaagcgcctccatgctgtgctggtggcggagaggcggagcccatctggctgtggccgtacctggtagttacactcagggtcaaggcagtggtagtgctcgcggtactggtaggcacagtggatgtggccacagtgctggctgcccgagaacctggagggaggaggggtggggtcagggccctgctgtgggtgacagtcccagccccagccccagccccagccccagggaggactcttcgggccctgtatgggatgcagaggggaggtgaagttgcagaggcccaggcaagtgactgggcctggcgggaatcccaggcccattgaggcaaagaggcctggccccaagaaaggggcaggacaacactgaggtggccaaaagtcaaagtagggggagacagatggggcccgagccctgggatggaagggaaggcaggcgccccctcggctgcccacctgtcttttctgcaggggctacctgccccactcccagcccgcccagttctggccaggtgcagagaccctggctgggccagccgggctctgatgctgagaggtgttaaagggctctctctgtcctgggcttttcctgacacttgaaacagtgcagagctatgaatttttaaagcacagcatctgtttggcttcctacagcaacgagctcactctccagccgccgccgccaccgccaggaacctgtgctgcctcccaggaaacccgtcctcctccaggccccagggccgctgggacgtggctcccacagcctcggtgacggccggccgtggggaggccactctggagaggccacaccatgacgactgtggagaagggtgtgactcagcccgcctgtacccctccaagactgaagtgagattgcaggagacacagagagaaaccccatactgtaatgggaaaaccacgtgcaaacaaatatttaggctgaagtggccaaaagggccatctgcggaggcactaataataatggtaataataataccacagaggagacagcacggggcagagctgaagacagagtgggacaggggggcggagacagtgggatgggggtggacagagacagagcaggacaggggatcggagacagagtgggacgtggaggcggagagacagagcgggcgggaggaacctggaagatctgcggacagacaggcgccagccgctgggtgctgccccatcagagggcaggcggtgggggggtgggggcggggggtgttatttgtgtgatttgggggaatctgttgaggcaaaggctcttcactgccaatcccactgcctttgggatggaaaggggttggtctggagtcaggtggtgtcagagcctcactggggaagtgcattgggctgtgtcagagaggacgacagcccacaccttctctctcgctttctctctctctttttttttttttttttaaagagatagggtctcactctgttgcccaggatgatctcaaactcctggcctcaagtgatcctcccatcttggcctcccacagtgctgggattacaggcatgagccactgcacctggcctgcctctaccttcccagccctgacagtttcacggtggcctgcaccctactcaaggctctgtgtgacagcaggacccaggcaagctgggggagctgcactcacctgtggccaggccctgcgtcgggaccccggccctaactgggggcacaggctgctgagggaatgtgtggcctggactacacagagcggagggaggctcccaaacgggcgtgcagggcagccctcggtgcggtggagggaccgaagtggatggggatgggaggaggcagctaccttggccctagaggtcagatatcaaacgaatggcctcagagtgcccggtcagtcctggccccccaccttctctccacggcaggctcctccccaggggcctacctggcaatatatttctggtaaatgtttacatcttcagtgacggctggtttatctgtgggcagtccgttcctggcaagagacacacagggcacagccggtgagcagatggggcagcctcgtgttacaggggcatctggtgggcagcccctgccctgaggccccagcccctctgctctgctctgcagtgtccgaggcacccacggtgggactgaggacatccctggcagaagctggccagaggttcaacgagcccaactctgggagggcagtgccatctcgtgcaggtggggctgcagcccccttgggcacgggctggcaagccacagaagcccgggctcggcacccagcattcagggagcatcaggaggccgctggctgaggggcaccaggcctcccaacagggagggattcgaggtgggggcaggcagctgggcaggggaagtgtatccttccccaggcagcaggggccgccctgatctgctccaaggcatgcagccccctggggtccgggagcccccccagggttcaggaggagctctggggaagggtctcgctcagccccacaccatccactacttgactacccaggccgttcccctgcccatgggttcaggctgtaagggtgtatgcacctaaccccggtcactacctttgcttcctgcctcccccagggcccaggctctgagcccaggagccagggccaccagcatggacccagcatccccagccagggtggcgccttctcagccaaccacaggcctgcattcagcacccatggcagcaggtagagaaagcctgtcatgggcagatggggtgtgctgtcatgggcagtcccggtgtgcatgctagcaaaaggcagagcacacttgtgcctgggagtgtgggcgtgtgtgggtggcgtgtgtggggggcgtgtgcgaggtgcacgcgcaggtccaggagcgggggggcgctgcaggagggctcacgcatggttctgtaggtgcaagagtgaatgtgagtgcggcgcgcacctgtgtgtgtggaagcgcatggatgggagcctgagtgtgcacgcgcctggatgcacagtggatgtgtataaggtgtgagcggcaggtgtgtcctcaagcacgggcaaccctggtgaggaaggaggcctcctgtctagtctggctcctggctctgggcattgtggggtggggagcgccttacttgacagtggagacggtccccgtggtgatggagtctgttttggagaaggttgacttcaggtactcgggagtgttgaaggacagggaggcaggaggctctggccctggcccgggggcgctgggggcactgggcacgctggcgaggggtgcgggagccaggctgggggtgggcggaaccttggcggggcctggcttctggatgccccggacgtcgtacttggaagggcgccccaccttgcctgtcttgaaggcgatggccccgcccatgtcggggctgccctccccgggtttgaagaggtgcaggtacttgacattctccaggtcgtacttggatggcttcttgtaggtgctcccgttctggggccgcagattctcgccggtcttcagtttttggatgaagaagtcgtacttggaggcccgggctaccaggttctgcatctggacactgctgtgcgacggcaggggcaggatggtggccttggtctccaggtgggccgtgctgctgggcagccgcaggccgggcagggtgcccaccacctccttgcccacccgctcctcggtcttggtgctgggggccggccaggagagctgctcgccagccttgagcttgcggatgtactcctcatacttagagaaccgcgcccgcttgctgagggtatcctcggaggtgggcagcatggaggaggtggctgcctccggggtggagcccgcgtgcagcttctcaaagctgatcttcctggccagctcgtcccgcgtgttctggtcatcatagccaaacatgccgaggaactcggtcatggtggaggccgcgtagtcccgcagcgaggaggcctctcctgcagaggaggatgggggcgcatcacctctgggagggagtgggagggacaggaggtccccccactgggggcccccacccatagagggagggggtcagtgtggggaggggcggagcaggacacgatctatggacgtttggctcacttgttaggttttacgactcttaaattaatttgttttaaaaaaaagtaattaatactggggtaaaataaaacgagttcatcaatgccaggaaaatcaatttcctaaatgttctggccgatggcttttcagtacattaaacaaagtttcataaatgtctccgctctctcgccttggcctaatatgaaagagaagtcattttactggaagtaaggccagatcccaacctgcctcccaggacagggagcggcaagaaccggggacaggtagggacgtgggccagtgggcagctgggtgggagcccaggggtggggaagatgctctggccggggtcggggtgggcctggctggaggacctcccttgaccccacaaatggatcccctgggcagatgaagggtccactacaagccttcctaggacctggcctcttggcctccccacaccttcccaggtgctgagggtccctgacaacacagctcagccaggggcgcaggtgtgtggatgtgcccctggcctgtgacataggacctggacacgtcctccaaccccctggcctcctccagtcacttgcagtcacacaaggttgggccacccggggagggcaggagtccgggcagggcctgagtgcagcctccttactgtggccaccccgggcacaccaggaagcctggagccacctccccacagtgacatacacacacattctcacatatcaacacacactcacacacacaaacccacacacagtcacatgcacatgatcccatacaacacacacatgcattctcacacacacacacacggtcacatgcacacaatcacatacaacacacacatgcattctcaaacacacacacagtgacattcacacgatcacatacaacacacacatgcattctcaaacacacacacccaacacggtcacattcacacaatcacatacaacacacacatgcattctcaaacacacacacggtcacattcacacgatcacatacaacacacacatgcattctcaaacacacctacacagtcacatgcacacacacacaaaacatacacatgcattctcatactctcacccacagtcacatgcattcacaacacacacatccattctcacacacacacccacagtcacatgtacacaatcacatacaacacacacatgcattctcatacactcttacacagtcacatgcaatcacatacaacacacatatgcattctcatacactctcacacacccacagtcgcatgcactcatacgccatcacatacacactcacataaacccagttaattacatgcacacaatcacatacaacacacacatgcattctcatacactctcacacacccacattctcacaatcacctataacacacacgcattctcacacacaccctacacagttacatgcacacaatgacatacaacgcacacatgcattcgcatacactcacacacctacacacagtcacaacacacacatgcattctcatacactctcatatccccacgcacagtcacatgcaatcacataaaacacacacatacattgacacccacccacccccacacacagtcacatgctcacaatcacatacaacacacacatacattgacacccacccacccccacacacagtcacatgctcacaatcacatacaacacacatgtgcattctcatactttcacacccacacacccaatcacgtgcatacaatcacatacaatacacacatgccttattacacactctcacccgcacatacgcacagtcatatgcacacacatgccatcacatacataaacccacacacggtcacatgcacacagtcacacacaacacacatgcaatcacacacactctacacacccagtcatgtgctcacaatcacacacacaatcacacacactctcacatacatccagacacgcagtcacataaaactcatatacttgctcacccccacacagtcacatgcagactctcacataaaacacacatacccagacacaacacacacactcatacagactcacagacaccacacactcacacacctcacagactcttgcgctcacactcgggctcaccagctcccatccctagccgccttcctgcctctgcagacatacaggtacacaaccccctgaacccctgccctgggtctctcggaatgagggagaaggcggtcagtcccaggctaattctgagctgttcttgcggacccacctcttccgcacatgccccaccccatggccgagccgtgaccccagtgcacacgcacacctgccccttcactgcccgtgtgctacatgcctcccgtgtgccatgccctgcatcagggttaggtgcacccgcgagactgagacctgcacggcccccggggacaccatgttctctctgctcatgtgcaagccagccacgtgggcacacttggggcggcaggaccccaggctgactacacagccaagggaaggcgtggctggggggtctcctcccaggcgaacctgccaggtctgggatcctcagagacacctgggatgggggtctagaggggcaggactgggcctggggaggggaggacacctggcgggatgtggaaggagaggctgtgggctccggggagggcctgggacccggctaggggaggagaggacagtcacaggcagccacctggcacccagggtgcacagagggactcaagaaaccaaaagacagctgttcccctggggcggggctggcgggtcagccgctgtcctgacctcaagctacacagggttggggggcccagctagggaggagtgggctctggctgctggattcagtggctcagggaccagggaaaggggctaaaaatagctggaggcagctgagccctcgctatatatggcagagaaacaggcttcgaagggcaggcagcttgcacagggaggggaccaggcaggggtccctgagggggcccacaggcctgcatggccgagcccagggcccagagaaggtggcttgggggccgagcccacagaggcagccaaggctccgctgtctgtgtcctccagcgctcagcgctgagtaggcagtcccagtgtcgggctgagggggcgaggcctggatccctgaggccattggcagttccaggcccgcctctgccagccccgctctccactcctctgggggaaggaggcaggggctgaggcccactccgctccccgtcagctgcgggcagagctggcctgggtgggggtgtggaggggacggtggcccttgtcgcgttcctctcctctcctctcctcaggcccagcacaatcaccttgtgtctggcaacggcaagggcttttcctatcagaggaaactgaaggtcacacttttcctcattgatctcgcaatgtttgttaattactctgtcactgatgtggcgaaggataattaaacagctctgtttatatcttacatgcataattatgtggctgcgcagggctccccgcacggggaggagatgcaccccttgctgcaggggaagggctaggggagcgggcaggggaggcgcagggcaccgggcacaaggctgggaaggaggccgggggcagagagaaggcccagacctgggggctgtggtcctggcgacccccttgcctgctggaacccccggcccaccctcccctgagcagaaggcgcgcagggctgctctcgatccccaggacatggacatggagacaccagcagagcagggcctcagtgcctcgtgggagagaggtcagccaggggaccgtggccggggcagctggctgtaagaggatacgctggccgggctggcaatccatgtggccctgagacgtcctgctgggagggccagggacagcggtgtagggaaggaagaggaggccaaggggagtggcaggagaacaaagcttgtcctgggctcctccgagaaagctccgtaagtagcagaatgtgcagacagcaggctcacaggctcatgccgttgaccgctgcgcccctcttgtgccaggtactgtgcccggtaagctcaggcctcacaggtgtgtgtaaagagtcacctgcccaccatctgtccagccatctatcccatccgtctgtctatccacccacccgtctatccctccctccctccctccccacctgtccacccctctgcctgtggtttcttgaagacccactgtgtgtggggcagctgcagcccttcccttctcacctggggtgcccctccccgtcctagtctctcccactccaggagccctccctgggtgggatgaggggccggtatttagagcaggagtgaggagtcgggtgtgcttaccagacacactgccccttccccactggcctccctgtcctggccttcagcctcccttcgaaggccaggcacccacctgaagcctgcctggtgctggggccgctgtcctccttggaggctgccccgtccgaatccttctcctccagggcaccgccgtccttggagggctcctccgcgtggtcttcctcatcgctgcacccctggggctgcaccatgtagacaccctcgggaggcagctccaggccctcgcgggcaatccgccccaacacgggtgtgggtgccggctcctcgctgtactccccgttcacccacttctcgatcactgcccgtctcttgtcttcctcgctgcggggggcccgggctgccccagactcagggccactgcgctcttggtcccggggctgcgatgggctgccctccgtgtgggagccggcgtcagctcgcttctccaccaccacctggcggctcagcttggcgcagatggcgttcagcttcaggccacccttgcgtttgggcgccatggcgggcttgcctgcaggcgggtccgtgcaccgggtgccctcagctgcagggatggaggagagcacggaggtcagaggcgtgcaaggccaagaacaacccaccctcccgaacagccctgcatcccccaagctgcaggcctcccccattgaccacagtgccatcaaactgccctgagactgcctggcatgtgtctatctcccccactagtctatgagctccgtggccatgcttgagaatcactctactttctgagcctggcagggtgcctggcacagagtaggtagttcaagaactagtctgtaaatgaacaaatgaatgaatgaatgcctcttcaactacaaggggcgcccaggtcctggaggcatttcctaggcttgctgggccctgggagggggtgtgccctttgacacacaaggaaactgaggcccagggaggttaaggagccggctatgcggtcaggctgtcaagggacagcgtggcattcctggcagcttgttccgcttgggagcgtcctgccttaccacacgttcctggggaggagtcacagagagccagggaccagcttgtgccagcctcttgcctcactgtcccggcagcacttggctggcaccctcccacccgagcacgtcagcccctggcggctcctctgccaggccaggtccctgggccctacctgactccaaccctgctcagcagagagcagagatctccttttctcccagccactcaggaccctcccgaaggcctccgtgttcctcagtctcctccctgcctcagggtcttctccagcccttgccagccccctcttggcctctctgtccatttcctgttgccactcccttccccaagcctcagtcagagccatccaagtggagttcctcatggcacttcctagggccacttgtccctatcctaggaccttgctccccagcctcggccagcctctgcagccccggaaggcctggccagcccacttcccagcccccaggagctccagcaggtgcagggtgggatcgcttaggtccctcacggaacgccccgaagcgccggtcacagcacctaatccccgaatgtgacagcccgacacacacagccggaaggaagccctcatgaggcgacttgagagccagcgacctccctcgcggccgcatagcccaaactctgtccctgatagggcaccgagggtcctgggggggcatacggcaagcccacccaccacacagcctgggacctgccacaaaggctggcgagggtggacacacacacacgcacacacacgcgtgcacacacagcgcagccacatggaactgtctgtctgtccgtccatttagtgagctccttctgtgggccagaccctgtggtggggcttggggacagcgcagtggccacagcagcaggggctcggctcacactcactgtgtacaaaacaaaatgtgcctctccatggccctcacgggaggaatgggcgtgtcagagtctccacataggcgggaaggctgagggcagggccccccggctccatggtcagaaggggcttcactctaatgatcaccccctgccaactttccacatgccaggaaacccgatgagaggcctacccaggcgggaatggcaatacctgggtccacccaggggccgcatccctgaggtggacttgactcatacgcacagataaccgtcccctgatagacacagtgcctggccgtcccagccagatccttcccttgtagccagtggccagtacggatggctcacttggcccagacgagacagggtgactctagcccagccaggcccactgccagagaagggtcttctcagcccactcccaggccttccagtcctgtgaccctggcttcagggccttagacacttgcccaagccgatgcccactctacccaggttcgtccacatctccaagtctgtgccacccacacccaagaccccaagcacgatgcggggcccctctcgaagttctgagacggggcctcctcttcacagcatcccactcgacctcggagctgcccagcaggttctgtgacgccgggtgtcctccaacaggcctccggggaagcgggcctcacctggtcccctcatcccttgccctggatggggaagggaaggggggagtgggggagcctgcactatttttaccaggaggtaagcagccaagtgtggatggcagacagcaaatgaatctgtaaatatttatcctaaggaagagggaagcagaagctcccagggccgcacttgctgctggtgacgccccctccccgggcccccacccatcctggagcctccccgcactttggcccacccagcccagcccaccttctccccatctcggctgtgtgcctggctcagtccctgcccgggcccccaccagctgcggtgcagctgtgtacccaggacccgcccccagccccaggcccctttgctcctgccgactcccccggcacctgccctccagctgccgcgctgccccagcccacctgccttccagatgctgccctccctctccctctcttgctggtcccaggggtggaggtgggaggcgtgtgggccggggacacaggggcaggaggcagaggtagggcttaggtttgtaagtgcgagcgcgtgtgaggctgggcggcgggaacaggggtgcgttggagctgaggtctaagctttccgccgccttccggcccagggccctgggatccatagacgatccgccccccaccccgctgtggtctgaccccagactcctgtccatgtaaacattcctctgactttcttccctaaaatataaacgccgtggccaggcctcaatggaaggaagccatccgtccccggccctgtcactgcccctttcatctccttcccgccaccagcctgcccgctgctctatttacactggacacttcctctgggaacaatactgcccaggaggcaggcttgggccagagggtgggaaggcgaggggactcctgctctgcttccccagagacgggagaggcgaggggaggggctgccgaggtgggctgggccggggcctgggacccacacacagtcagagcccactctctgctggtggcggtgctcttggcctccagcctctggccccacgggctctggcgcagcaccagggtatggcctagcctctggggtcagggagttgggagctcacggcggagctctgccctgcgctagctctggccctgggcaagatttttccctgtagaaaggcggccaggctgttaggtgagagagggcacctgtctgtgccaagcacagggcctagcagggatgaacctgggaaaaagcagctgagccctgggagggccaccaggcagatgtggtgccacacgtgagcttgagattccaaggctgagaaaccttacctggcctggaagaggcaggggacagagaagaggccagaggtctggggcaggggcgggctggcctctcagcccctcctcggattcctaggttcgggaccttccctctcagggcgccacgagcagcaggtctccccgcaggtctctgagctgaggagaccctgcacagggttggggaaaacgggcatggactggaccgtccacctttccgggcactaaggcatgacttgtaacggcccagcggagccggcactgtcattgtcccatttcatagaggaggaggctgtagacactccagagcccaagctcaccctggccaggagctcccgaaggctgggacttggccccatccccattagggcccctaagccggccctaggaaatcccaggcctctctgcggggactccttcccctgccccgtcccctcctcaccctcgcttcctgttcccataacacggagccccttaaagtgttaactgcgatgggtaaaatggtgcagcagattgctacaataaataatttactgatatttataaatattcaaatcagccggcttcagaaatcaaatgaagggagggcctcgggagaaggccccgttatggcatgaatctcatcaccccctccgtaggcgggggcaggccagggctcctgccagctctgggtgagaggggcgttcctgtagctgcaccgcatccccagtcccctgatctcactgctctctggaggtagcctgctcacctggtcagggccaggccccctcccgcaggcatcctgggttcaaggggaggagaggctgcagtgcccaccgcccatggccctgggtctcagagttgcttgtcctgcctcaacggtgggtgggtgggggtctgtcccagggggccgggcaggcctggcagcccctccccagccgtgagtaatgtgttctggggccgggctgcctgtcagctcccaggctccgggtgctttatgggctctgcttggtggctctgaactccctggtaggaaataaagttctccctgcgcgtcccttctaaacatttcactcagtggaaacggtgttcaagaaaaatgaggacatatttcttcctaaggatgcagtatcccctttgggcggcctaatgcccgctgtatatcaggaggtggggaggcaggggccaggaaccagacccctgggttgggggtgggctggggccctgccttcccactgccaggcagctcgggggccactctggtagctgccctgggccatggtgtctggggccatagagcagctggcatcctctgagcacctcgtctgtgctgggtgccttacagtgccaccttggtgatgcccccaggatctccacatggtcggctgtcctgtccattcccacataaggaagcaaaggccgcgaggctggtagctgcccacagtcagtgctggagcccaactgccaccaggctcagatgcccaaggtcataatcttcaaccccacctgtgtcccccacagcctcccgcctaggcatcctggagtcaggggcgggcggctgccggggcttccaccctgccatttacttccgaacttgcagctcacaggccacaagccccagttttggggtgctgtgctggtgtcctttcaacaacctctctcttgagtaccgtgtacagaccagaccctgggctgactcctcaggctatgatgtgggcacacaggcagccctggctcctgtgccgcggatcctcagttcagacttgggaatgaacacttcaaagccagtacaagagccatctctgtagtgggcatcagaggtgccacaggagtggcaggtctggaggccagcaagggccaggaagggcccaggcatctacccctcctccctcctctacctcacagcccatttccgcctgaacggttccttccccatccttcagctgtgacccctcccccaccagccaggacccgtcccctccatcccctccgagaagggagtccttccctcttggacccaattctatccccagctccaaacagaagggcctctaagttctgtgggaggaatggttgctgctccctaggggttcagccagggcccgaggggttcagccgggtcccctggccctcaacagctccaacttgggtggggggcatgcttggccactgggccctagcttgccccactttgtttatttatttattatgatttttttagtccagttaaaaggttcgctatccagacgcgtctaagtggcctcacttagcgtaagtaactctataaatcaggggaactgttagcatccaccgcacaggctggctatcaatctcccccaggtcacagccaaacaggaaggggagaaaaaagagagttaccacccaggggagatttaaaacacacacactgagcaaacgcgcacagaccgcgtgcatgcctgtgcgcgcgcacacacgctcggatgcctgtgtttgtacaatcccgttatattcacatgtgcacatgtggaatctcagagtgctgcgtgtggtcgtggtaacagaacacaaacatggctcctgcagccatgaggggagacagatgtgagggaaggggcttcgggtgagcctaggacccccagggctgggctgactctcagtgcctgagctgccctgctcccggcaagtgtctctggagggcagtggaaggggtctgattggtcccctcccctctctgtggcccccacctctgccaaacccaaagggcccaagcttttccctttcccagccccaggtgggcacttggcaggggggtggagcctggaaaaggaggcaggaggctgtaagctgtgggccaccgcagcggagcatgatgtcacctcgggtccttactcgctatgcccgaggctggcacaccccagatgcggcactgggctcaggaaaggcagcatcatctaaatgggtggccaaatgccatgcagtgcactggagggtgcgaggctaggatgatggcagaaacaccctgccttttcacgggagcaggtgtggctggctgggtgtccacacagcctggactgccctggagaggccccagacctagacagccccacaagctgtgccatgccagagaccggagtgggagaggcggctcctggcatctgctctaggtcccagagacggacatgggcaaggcagcccgaggtgggggacctgcccaggccacctcctttccctgcttgcccgagaggcctccccggctcacccgcccgccgcatctccccatgaactctatttctctttcctctctgaaaacaactgagctgtaaatactgtttaaccttctcccccctccccccgccaccccctcccctccgcactataaaaacacaaatatgccataactcagccgcccggccgcccagcctccaacatgccccgcgcccgggcctctcaggaaggtcattacaaacgactttccgattcactgctcctgaaataattttgtgtattaaaacctgaatctgcactttctggggccgaaagcctcgcttaattatggcgggtgtccttgggacggacagtgatccttcactcgccagcccgcgctccagccctccgcccgccggcccgcccccctccccgggcccaatctgttttcaaagtgtgtctgtcctttattaaattgttttcttttccacattatcagttgccatggagacctcatctctcggattatttgaatttcattatatctattgatttgggagcatttcatcttttttattgtttttctgtcaattttcaaaacgaataaccatctaatttgcgtcagtgctgattatgtttgtccctcaatagaggtcggcagctgcgctggggaaacaaatcaatgaaaaaccatcataaaactccccactccagtctccaggatgtgtgggtgacattccacgcctgcgagagacacactcatcagctccaacttcggcgacggtggcggcggctccgttccacgtccgcctcctttggccttaatatttaattttgcgatttggggcattattagtggtgtttttattagcgcgtgtgcctgtgagtgtttggaggtgggctggcggttccattaatttgtgggtgaggcagggaagccccagaggaaggcacggtggacggcgttggggtgcagtggcgagtggagaaaagaggggaaaagctccgaggggggcgggagcctggggaccgggagggccctgcggaggggctggaaaagggggaccgagtgaaggggaggaaaagagggaattcaaattgcttactttgttggtttttttaaataatttatgcaattttaagcatttatgtataaattttttaataagccaccctggagcaggatggccattaacatccaacgtccttctgtccaatgggctggcggagaggatcaatttctgagagtactttcccttttttatgacatgataaaatgcttttaaagcaacttacacaaatatggaaattttttttcgtcccctctcccttcgcctaacagccttcttatccgccagggagggggaggttgtgtgtgtgcacacacgcgcgtgcacgcacacacactctctcgcactcttgtgctcacgctgcctctctcctgctggggaggggggctgagggggctggcagggagacagccccagttctaactggaactggccgcctgtccttctaacaagggcataaactttcattacccatgcacgcagtcaaagacaatttagggaaacgcgctgcttggaaaaggaaaacctcagcgattcgtggcccatgctgctgccaccatctggggggctctcacctccagctctagggaacccggtccctgaacctctggccctgccagcaggaggtggggcgagggcaggacagcttccatgtggaccctccgtgggcaggagagcccagagagtaagggtctcctccttggctcaacaggaccatccatgcctcgggctgaggccaggcgccctgggtcttgccctccttgccctctctggatggcctgtactaaccccaaccagggctagcccttgagggcaagtgcaggcctctgtcatccctgccaccgcagtgcctggatcagagcagaagctcagctatgcagacggacagactgacagatggactgaatggcgacaaggcagggaaacaggccctaaggtatcctgaggtgcctgtaggggccccacagatgctggggcaagatgccctccccaggtgcccctgcactagaagcagctctggtgcagaagtgcctcttcctacagagtcagggcattggccaccatcacccctacctgggcatgagcccctgacttccccggagatgggaagaccttctaagaggagggccagtgcctccaggtctcagggtgaccctgcctcacctgcctgctccctctcctgatgaaggcaaagaggaacctgagagatgcccggcccaagcccccaccagccgacgcagacagtcctgaatccagcgtggggtccgagccttccccggcaccgctgctgcgggagggcgtccagccctctgaggccaccgtggggcacctgggctttggcaacttccacataagacaaatcgactccagagacctggccccttggaaagctcatcacttcagcgtcttccctgccctgggctcgggtccccaactgtaacacagcgttgctgaggggatgatgtgggcacacgtctggctggggctgcagagcacacggtgcctccctgatgctccacggtgactgtgggcagagtcccctcctcggagccgggagcactgcttcctgcctggtaactgcagggcaccgcggacctggagttcagccccgtgtggccctgctcacctctgcctggggatctgagagctgccctaggcctcctgctcccatccccgctaaagccaacttcttcctgggcctcacctgccccagccatccaggcccagtctggagctgaccagtgggcagcccaagaaggtccccatgggtccctgggccctctgtcgtggcagcaggggagcagccctggctgccccaagccctccgtggggatgcaaggggagcgcccacccctcctgtttttctgtgctcagataccccccgcaaccaactgtcattaaaataacaagtttctgttacaatctaaacattcccacatcgcataaagggttatattacacccgagtcactcccggcccatgtttgcacagaaaagctcacggcaggtcccccctcctgacgaagtgacttattaaagtttaaacagtaattaacagaacaataaaaataaagggatgtttggggagtcgtagcgcacacagggtttttggcagtgccagcagtttttcagtgccctgcgctggcagcaaaatgtgactgtgaagccagtggggacagaggacggggccagggtcgagccagggagtcctgaggcctaaagggccagaaaccccgaggcaaggctggcgggaaggaatgggggtcctggggtggcagggtgggcacagtgcgagcaggcggggtggtctggcatgggcagggaacaggcctgggtggggaggcttcaagaggggtgaggccagtgcccagctcagcctcaggcacttccgggagcccagtgcctcggtcacatccggccaactccgcacggacctggctgggggaggtgccaggtcccccgacactgcgggcattaggagaccctgcagttaatgattcctggggctggaccccagccactctgggctcctctcccagttgggcaggtacccctacccctgcctctggatcctgtggccagggcactatgggaactctcctggcccctattaagcatgggtaaggactcgggggccagccagcctagcacatgaccccccccccacccccaacaaagggagaaagtggccagcttcctgggccaggtgggtccccagcggcaaagtcctctttccccaaggtttgcagggagctggcctggcaggccggtccgggccagagctgcctgggatgggcagggctaggcctgttaccctcagccttgcctcttctccctcaagttccatcccaggggctcagacacctgcctgccagggatggcagagacagtcaggatgaaccaggcgcccaaccccagcagccagggaggggccccaggaagagggcggggctccccctggacctaggcctgctcagaggcttgggggccaaggaaggagggacagcaggaacccctgagggtcacacagaatgtgtgatctcagggtggtgacaaacccatgccaaccaagtgacagacaccaaggccctgctggactggcccggacccccgtcccccatgctgcttctcattccctctcccggaagccctgggctcccgctattgtcggccacgttgagggagggcccctgcctgtcccatgctcacccctgtccttcctctccaaggagagccaccacagaagcaaagctctcactccatcacacagcgttagccccaaaaggtgacctttcaacagaacatccccaatgcaggctcttcccaccaggacaaagaagacaccaagagcccccggggaggcctctccaccatcctctgaacaaaggggctctcctcctgggctcctccatctctctctgtgcctctccatctctctctgtgcctcggtggaccaacctgcctaggggtgccctgggatcctatttccacagcaggcctccctccaccttggtgcctgccctcgaccagcctacagctcagaaacgagcccctggcccggggcgagcagccccacagtttcctgacgtggacgcctttgctggttcctccacgtcccagccacacaggccagcaggagcctctgtgaagcctgcatggagaagagatgctgggctgggccagagactctctctaacatcctgtctcccgggatctaggtcctggcagctggcgggtatcaagggcatgcactctgtccgggctgaaccccatactgcctggctctgccactgcctctcgctgaggcccctgtgggcacagccagtcagggggtgcagggccccacagacttcagtgctgcctgggctctggcacgtaggacgtgaaggaaagccagcagcttttctccccctctttcctgggcagagccccctggggctccatcgccccccgcctccaagatgagtgagtcacggtgagggcagagtggagggtcgagacagagagagctcaggagggggcaggtgatgcctcccaagcctccagccgctctgctcaggctggaaggaacgccaggagctcacactccctcgctgctggaggaggcagacggagtcacccagcgccaaagcctcgctggagcaggagggggcaggggaaggcaccttcagggtcaggggaaggattgacagagggcaaggcagagggtgtctgggtggcaccgaggagggcaggaggggacaggggccttctcatgggtacgtctaaagtgggcaaacagggaagcagctgctcgtcctgacccactgtttctagaacctgtgtgtggggcatggcaggggtgtggcaagtggctctggctggacacggagctaaggagggcagcctgcacttaggtccaacgcaccttgggacaggggacagctatcagggtggaggctgtcctaggtgcacagaactttagacctggaaagggaccgaggtccaagaggctgagaaacttggcaaaagcccaggccactcactcgtgaggactaggcagatccaggggcccagttcccagtctgagccctctccggcccagcaaatccaatgctacacatttctgtttcaaagcagagctttccgcagccttggagattgcaccaggcccctcgggccccaaataccacaaaggccccctgctgcggaggatttgagccacacatggcccagtgggcaaggaccccaaatggctctgaaccagcacctgcggtgtgcgaggcctggaagccaggctcccccgttctccaggggaagcaaagtggaggctggctgcgtggcctggctgacccaccggaaatgggtaggacgtgtgtggcaggaggggacctttctcttgcagggactgagaccctgagaccttccaatgtgtgttgatggggagacagggcaggcgctctctggggatgagagggaaagcctggactagagaggccccggacagcaggcccagcccaggagaggcggcggcgtgggcagcaggtggcagaggaacacggggtggcacaccacccgccctccctgcagcccgtctccacaatccccttgctgaggccagcgacggcgaccatgacgaggacatgaggggactaatttaggagtatttttaaaacggtggccctgtggagggcttgagcagttgtcagccatctggaagaaggaattacaatcacctccctaatcctatattccctaaaccctaaagctggttacagtgtgagggagaggcagcaggtgggtgggggtgggggggtctgttccagagtggggcagagcccagggaggtgcccacagggccggggcagcaccgcccccgcgagggggcccgaggccggggctgaagatcccagtgtcctctgagcccacccagctcccccacccgttcacgcacactcgctccctgggccgcgccggctcgcgcaggggccgtcaggtaaattagatctgaaagctgacaatttctgaccatatttccttgattatttcaaacaaatgcacagcagccgctgtaaggagattaaagtgacataaacgtcccgagcgggaggggggagggcagaggattcaggtcacccccatccgtcccccgcctgacagacgctatatcgctatccaatccaataaaaaatcccccccttttgctttaattaattttacagctagcttgcttaattactttcaatcaaaatcctcctgccatcgcaaaattagagatggttgagctccattagcctaaattcttcatttccatatagaaaagaggctgtctgcagagccagcctgggcccctggcaggacagacgcccgtctgcccgcccgctgtgagccagcccacccctggcttccgctctctggctatctctggcctatgcgtgtcccctcactctcctccatcactgctccctgggccatgaagagctgaggttcaggaggggtacccgctgccccgacttcccaggattcacgaggggactgcagggctggcacagagctctccgccagggcctgctgcttttgatgaaagcataggctgatcctgggagcctgctgccctgccaaagggcccctgctgcctccaggacagagcctagtcccaaacctgaggcagacaggtctcctgggccatctgcaccacatgccccaggaagcggtccctctcccagcaggcggaaacactcccaaccccggacttaggcccctgtcagaatagacccctggagccaacgccacccagggctccctctgccgattccaggctggagtcattgttcaccatcaggatgactcgggccagctgtctcgatggtgctaccaagcaatgtagcagcccccacatactctggcattctcctagggccccccgcgggcccctcctccccataccatagtcctggttcccagcctgcaacagctgcacctccacccccagcctgggtcgagtgggtggtgggtctgggctctgtccacatcctgtgcctgcacgggcacccttctcctcccctccacctgcctcatcttcacagtccccaaccccaactctggaagctccacttcaggttttccatactacaaccccgagtgtcaccacagggtccggcccaacctgggctccagctgattaaggatctgcaacaggatgtagggattacagtaaaacctggctccggatctgcaggggcagcaggccaagtcccagccctgggactcccctcccctacccttccagcatccctacccattacccgtcccaaacccagctgccaagtgagggaggaaggctgagccccttggcccttaggggactcctggctggactctagggggtctggactgagaaggggtggcattaaggagcccaggccagctcctgcagaaaggctggggtggggcaggctggggaaggggagtgatggctttatgccgcctggcttccttctcagggaaccaatgtgaaggtggggtgtcctgggcctgacctctgggcaaaggctgagtaagcagggaaggaagtaccctaaaggccaggagagccccttccaggcagaaggccttacgatgctgccggagggctccggctggatggcacggggcggggcggcgggggatggtggaggggaggggggtgcgaggccggctctgggggtggaggaaggagctgaacttggacccccagggcctgtcttctggacaccagggacccacaggtctgtctgcaggctcctcattagtcctgctctaaaggtgaactcaaatcctctcctcctggcttggttgagtttctcaaatatatcctgagcagctactggcactgccccctctgccctagggatcctgggaggatggctttgggtctcagggggtgcagtgttgcacgctccagcattactgtgtcacactccagagcgcaaagggtagggcaactttgggctggaggagggcgtccaagaggccacaccccggctgggccctgaggtcagcgggtggagaaggtgaaggggcaggcgggcagacggacttgctgctgagcccagctgggccctctccagttcctccatgcaggtctgaagcctccgtcccaccccactaccaatgagtcaccagcaacagggactaggaagcgggaaagcagacgcagccccagtctttggggacacacactgacttcccgggtgttccccctcccactggggcagggctggggcctcacccccatctttctttctttctttcttttttttggagacagggtcttactctgtcgcccaggctggagtgcagtggcacaatctcggctcactgcaacctccacctcctggattcaagcgattctcctgcctcagcctcccaagtcgctgggattacaggcgcctgccaccacacttggctactttttgaatttttagtagagacggggtttcgccatgttggcccggctggtttcgaacttccagcctcaagtgatctgcccgccttggcctcccaaagtgctgggattataggcaggagccaccgtgcctgacctttttttttttttccttgaagtcttttatccattaccctcatccccatcctcaccctgacctccacgcctggcccaggtgggtcgggatggtggaagggtggacagaagagcatgtacggggtcagtcactcagagatcaaagggcacagcccagaccctactccacctgccagccagcccatgtgaggcagcgcccgcctctccctgccaggccctcagcacgctgccccctcagcggcagaaactgctccttcacctcagagcccggccacccctcctcctacacagccttcatgggtcccagctgacatttcactttctctgggcagcctcccgggactgtcctctccctctgtcctcactgcaccctgtcctagtcttagcactttcatagtaacttgtttaattagacctctgcctcaccagactgcaagatccctgggacgagaccactgtttcagcgcagtgtctggcccaacaaatattgactgagtgaatgcagaaaacccagtgcttctggagctcgttagggtggcgctgggccccagggacgtggcctggcttctggactgaccccctcggggctccaggaacctttcctggaggggtggggtggggactccctgggtgggactgagctgaagccccttctcttgggtctctggccctcttgagccccaggctcacctccaaacgcccttcacagggctctacccagagaacaaaagaggccccagttgttcgaacatttctcggcgagaggaacaactgttgctggccagtccctttctgaataaatcctgcaactgtttgcagtgaagtgcgactctctccctccacctcctgtccctgtcccaaaaggagaaaaggggattgaaaaaaagatgggggaaaatcccataccaagccccaccatctccctacatccactttcaagtttgtctgaaaatgttataaacacaacacacagggacagccacctgctgtcccagacaactgggacagccgcagctaagggtgaggctgtgagatcaggacccaaaaacaggaggtgagacagtgaaggctggagggaagtggggggtgccgggacggggagaaggggcaacgggaaatatcaccgtgaagtgggagaggcagagggcagggttgtactcagccctgcagaggcagagggaggagtgtctgtggatcaagggccccggaagactcctgggggcccggcggaatccgggaggcaggagcttccagtggggcagtggataccgagaggggaagtagaggagggagagaagttgagtggggaagagggagcgaggtctattaaaaacctctcagtgcataacacaaaatgtcagggtttatagcttcattcttggctttgccgggactgagaaccctgaacagaaatgtcaccgcttgtcatgtttaatcacctgctgtttgttaacaccttccctgcaaggagcctgtctcaatctgtccctgggccccccagggaccaggaaatagaaaacatctccatctccttctctgggctcttggccctgcctaggggctcttcagctccatctgaaggcctcccgaggagccccaaagtgatccttcctatcagggaggccagggaaaggaaccccatatggcccttggaggcgtggtgccatctgtggccctgcgtggtgcgcttggtgtggctgggccggggcctgtcatccccctgcttcttgtgcctggctctccaggcctgcctgtccattctagctattccactcggtcctctaactctgcgggtacgcaaagataaataaaggagagcccgctctgatctctgcagtctggaagtcaccaatctgtctgcttaaacagcaacggtcacataacatctaacaaccaaagccaccatccttccagttacaatcggatcacaccatctggggttctggcttggctctctgagcgtgctttcctgggttgtttaggctaggaattctcagccctactgccccacgttccttcctctgggttaggagtaggtgtgggggaagggcagcacaaatcttccccacctcctaaagcacagtgtggtctacactgggaaagaagctggttcactctcagattacaaccaagcaaagacctgggcaaactcaatacagcccccagcctaaaaccccacctgggacagctgcctgcaaagcagtgagtttatcacgtggagttcccaaggcagccccatcacctctagtagcaaagaaagccagtggagacacccaccgcagagctgaactgaaaatggtctcccagtgaaccggggggcaaggtccccatcttcccttccagcaagtctctgcttacacagaaacatatccagcaaacatgcatcgtgaacctgtctcctaggagaatgcccgttcggttagacatgcttcctgaagggctctgcgtccagtcctttcacttccatttcaccacagagacaagtcggagtgcgttccacccacctgcaaccctcccctgcggacagatgggagcactcgtttctgcaaagatgggcactccgggatgcctctagaaaaggaggctttcccccagaagctcaaaatgcatctgcatcaacaactacattttatcttgcatccctgcagcccagggatgtgtttgcagactacaggtggggtacacatcggggccagagatgtttggggacgtgggccaggcagcacggtagatacctagggctggaggcctgtgtgtcctcactcagtgctgccatttggaacagtgctcaggggcgccccgcaccaagtcctctgacatttagcatttgggaacaaacccagcagtatctccgggcctccagcttccccacttaggaaatgggacagctccttgtcttcctccaagggaactgatgaggagagatgatatgttaggtgtggctctctcggaaggaaggcgctgataaacttacggtggtgggggagtgaggggcttgggggtgggggttcccttgtccgcatcctctccagaagccccgtctggactgtgatatgtttggggggagaaggctcagtgttaaaggggtgggatcacagctgcaagcccttttctaggccgggtcaagcttccaagcagtgctctgccatgccttggagggggcggggagcgggggacacgagcatgcctgccccagcacacgcgcctagtggaacgcagcggcctggaagcaagttttggtagcgcaagggggtttaagtggagccagctgcaagtcctcctcctgaacagagacatggtccattcaggaggtgcctgggctctccaggaccctgagggtgggaccatgtcaagtagcccatcctcctgcctccaaacagggctgactaagcctcccagtttgcccaggactgagggggttcacacacatgggtctttgcagttctgggcaaactggggtggttggtcatcctatcgcgagacaccacgatgctgaccacacagtctaagagctgggaactcggcctggagtctaactcgcatctgctcctgggggcccacactcttgggtgtcagaaattctctctttcctgggtgaactgatgacacagggcctctcatgcccgtggaggccagacctgagcctctcccatctgtaggttttgaaaagctggttcccatcactgagagggacgctgagcacacatggaatgtgtcctcccaactcagctgcccacgggggagcccaagaggaacccccagtgtgggacctggaccaaaggtcgggagcctcctggaatggagctgtcttgcctgaaacccttgcatttatcagatgagcatggcctccctgccaggccccctggtataatcctttcattaatttactattacattggaaattactccttacccaggaatataagttttcatcttattttaagttagattcttaaagcaattaccaaggcatctggcaatgacttcaccactgcggccgggccctgcaggggagaagggcggccctgaagctgcacaggccctagaggggagtctggggagaactgggagggaagtggggggcacactgtcatctctgatatttgccgtttatggaaaaactcctttccagtgccacctgccccatgaacccgctggtgacagttgctgaaaaacctcggcagctggggcctcggtagcgtgttctatttttaattgtttgatcagaatattcactcatctaggcccattcccaagacgcatttcccagccaaagggttcccccatttctcacaccttcctccctctctctctcatcagaaatcaactttgaaattaataatcagagacacagacctgggtgagtttgtcagggagcatggcactggagagaagggaggctcctccccaacccgggagccctcagagtggcctccgctgttttctctctgagccactgatcctcagcccccgggcacgaagctggccccgcatggcctgcaattgccacgcctgcctgagccccacccttcctggcaacaggaagaccccagcctccccctgtccactccagtcagcccactgcctctgcttcttcaaaaacctcgagggcagggcagaggggctggggatacccaggaagctcctgggaaggacagggaggggacgctgggagagaggcacgtgcccctggactcagaggagccggaaagaggctgactttcatttcagcttccatttaccagaggaagggagcccacaggggcagctgctggcctgtcccccagccagcaagtcacacaaaccagctccagctggtgtcactggggcctgaggtagaccatgctgctgggaagaggctactggggccaacctgaccccgtggcccccacctgaccccttcccaggaagggccccccacccagcacgggggcctgtgggcgcctggccgtcctctcctctccttacatgcccttggccgaaccactgtactcttccctctcaaggtcacagggccgtccacaccaggaatatttactcactggactggccctgttagcagcactcaccacaaatatgctttctgataaagttggcagaaaaaaaattctagagctcaaaccaatgtcagaaatcatcccccgcccctaccaagggagcacgaggtggggcctggaaacaggtcacacaccaactatggggcagccctgggggggcttgtatcacgccccctctcacctttctccttcctgttttacctgggacagcctgttgcccaggggaccaagggctggggacagttctaagccgaggactgggtcttggggacactcgggcctctggaagacaaggcgggtagggtgtcacctgggcttccccccaggccgtctcagctcactgcgcccctccccgccaccctctcttggtgcacaggggctctgcatgtttttattacctgtttgactcaccgccttattgcttctccccttaatggggccgtaaccgtggaaacgaggaataaacggccaccagaaaatgagatgattaaacaggtcaccctggcaaacaaactcagccaaggaacctctgggggtggggacgctaggctgcccctcccccacccgtggccagaaggcctggaccaggtcctgaccacattgccccacacctaaaaggatggggggcagatgccgtggggcaccccctgccgggcagtggagagccgggtcatccttttgcgaggcagcccggcttcctgtggccttgggttcccaggctgaaggggtgacagacagggaggcactgggctagagggcggtgaggatcacagctgcagggaagaggcacttcccggtgacaaaacttccaggagtctctcccaacaggcctctgggacgcctcctgctctcccgctgcactagggtccccccatctaaagctctgcccggctcctccagtcccccattctcacacagcgcagtccctcccaaggcccccttagatcactgaaagagccccataagaaaaggccaggcgacctttgggaacacctggtctctggaaacacaacatgtgtccgtttcccagctcctgccttctcctccaaagccaggcagtgccccagcctcagccaggtggcatcaagagacagccctcttggctttaggaagggtgtcagcaggtgagtgattacagcaccagcagggcccagaagggccagaggagaccccagagtcaggcctgtgggacattctaagagcagatgccccggccaggagtggcccacataccacgcccggggcagaggcctgaagccctggcgcctggctggccctcagtatgggtgtatccctgtctttctggcctcactccctgccctgggtttgtctagctggagggatcccggaagcggggaagagaatgagagagggcagacatgcagtggtgaggtctgctcaggaggagagagaaaggggagagggagatgggcaagggaggaagtggagaagggcccagatcaccctctggctgcagccatcctgtccccactgggcagcagactgacgtcccagtcccaggccatggtcatggttaggagttactgtgggtcccattcaaccatcaacactcctgtctttatccttagggcttccctgcccctttcacgtcatcccaaatcccagcctcgctccttcctgtaaaccaggctctagaaagctctcaaggagctaaaacccaggtcccaagggaattggccaacatttcctgccttcctccttctgcccccactaagaagccggggaggcacttggggaagaggcacatcaatcaatcagttccaccagcacttacagcaggaaggcgtgagccccggcccgtaccaggcccggggaggaggtggcagtacaccagctaccatctaatggtcaccattaggagcagccgtggcagaggaaaacaagggccctggcctcctggggatcagggcacatgagtccgagtgctgggtcctggcacagcaacgtcacaggtctacccggagccccagaacagcaggctcgcagccagcagcttctctatctttttccagggccaacggggtgtgaggctggaaaggttgcatggggcaagaaaggtagcagggagggcccggctttagggagctgggtggcctggatgaaaaagacagaaaaacgtggttgcaaaatgggaagcaagagttctgctcttggagggagggggaggacaaggcgcagagagaaggggctggctaggagtctagaaagcatggtggcggagggaggtcccttaaggccactctttcacaaagctgcatggtccctggctcctggctcctcggcctggtgggacagcagaccgctcctctccctccactaggcagacgctgccaacacaggggcccgggcagtcctcatttccgtccctcttgctgcaggagagcctcccatgcctcctgggtttcaggcctcgcctcccacatgggtgtcttacatcctgctgagtcgagggtgtcagggtgctgttctgtggccaggcagccagaggggtgtgcgctagaccaccaagctgctgccctgcacaggtggtcccggcgaggctgcccctcctcttttgcacactggggctgcccgccctcctcctgctcccagcttctccctactcattgtaccctggcccagctaccccagaacagctgctgcttgccgtggggacccacgggcggtaattactacagtgcaacttccttccccctctgaagatgaggaggagaaggaggaaaaggaggaagaggtgggagcagcggccagggtggtcagggtgtaaaaatcagctcagggaaggccgtgttagaaggtgagccttggggcctgggggcatggggggtgggccaggtggagaaatggctgagccctggaaaagtgttgggccagccgttctagaggaggctgatggaggctggggctgcaccactgacctggcaggacccaggaagaagaggagttggggccaagagcctttccaagccccacccaatcccctgctcaggcagcgggcacggccttgagccagggcagccactttcacgaggagatgccgctgcgtggcttagccctccaaaggtgcctgcatttattttatttttccatcataaaaacccaagctgcagctcagccagattctggggctgtgggggctgggggaacaccagtagtaccgacaaggccagtagagaggtctgagtaacactcacattcagtgcctttcttggagaggagagtgaatgggttctcctcgctggtccctaccagggaaaaagggccaggggtggggtctctctagggagcctttcggacctgcccttctgcctctgcctcttgttggggaggaaaggctatgctaggccttttagcctcagtttcctctgacgtcttgcaactagaaccagggctggttcaaagggtcacttcacagcccagagctgcctgtctccaatgctctccaccaaagaaaaggtccaaataatgtgctcctcacctcgtccactcaccccctactcccacccgccaggactgccccactgaacaaaatcaagttgggagtcagacagctgaagatcttaaaggtcatctgatgctcaagtccctctaaatgtcactaaccggtgcacagcacaaacctctgtttgaatggtaccaggaaactcatgacttccgagatggcccattctgtcccgggctctgacagctcctttctgccaagatggccccagagcacctaccccctgcagcagactggcaaaaccggtgcccaacctggctacaggggctggccccagcttagactggttgagtgggtgtatctggccaagtaaaggctggaggaaggaaattgagagcaatctgctctgccctaaacccggcgtggaatctcttcctccagtacagcacaggaaccttctcagtccccggtgcctggcaggtcgaaggtgtaaccagagctagtgaggttcctagaagcctccacacttggcaaggctctggccttgacctggcagctcatggaaggtctgatctgaaggtggttgacactcagggcaggggcctgagcagcacacactggggctgggttggggatgccaagctctttgctctctcagcttagacaccgtctagaagaagtctgcggcctacctcaagacagtatgctctcaaagcatggggctactgagaatcaggaaaatgagccagcctggcccagcttctgatcccacgcttcctggcctccccacagttgaggcctgggctgtctgcgatgggggatctgctggcaatgcaagggggtcctggcctggagccccagaaggagaaagaaaccggccgggcttcctcccattgacccgcctcgacgacaaggctgcagccacagcgacacatgggcagcactgtccctcaccggcaccccctgcagtccgtggccatccctttaaagttgccctcttgcctctttggcccttgaccttgtagagcctatcttggctcctccgcgccttggacagccccacccctttgtctcaagaagagaaggggcaactatcatcagatccccacgagtcaagggcgaacgcctgctcagagctccacccgtgcttcaccgccattttcaccctggcttctagctgtgttcagggcctgggaatcagcctggtgggacctaaccctgggagcttcccaactgcaggatggatgtacctgtgtctgaaagcttcctcccatctcccctccccccttcccgctccctcccccagggaaatcactctaaaagggcctaatggaactatgtcctcctctcttcctctctcccctccctccctccctccctctctttccttttttttttattagcatttgtggaatttattcccaaactctcctaatcttccgtacacaaccatttgatttgcataacccaaccccctctcataaaaactggctgctagtttaattaaaaaatgtaaatttgctgtcatctcggggcctggtgaattaggacgacatcggcattttttattgctaaagacgtccagattgatccagcccttggctgaactatggtgggggaaagggggtccacatggcccctgagggtcctgaggtccttctgtcccctcctgagaaggcttggctctcccaccactgacttcctcatggctgaaggccttcaggacctagatgtgtccggggccgcggggatgttaacctacgatcagggaggcatggtgggtccatgatgccagcagcccttcgaggcctgcgcccctggccttggactatgtcagagaggccctcggctgaagctgcccacgctgccccagaggaagggaccctcacttcaccagccacgagccccggccagagacgaggcccatggccccagctgtatgccgtgtgcactatgaagttgagggagctgttcccagctcctgaagatgagcatggagtcagcccagggaccagctcagaggggatctcagcgtcctcatctgcttcccttttttggtgaagtggggggaagactgcttttcttctgaagttctgagattataagtgaaacttccaagttcaaagaagagactgagatggtatcaccagatgactcctccaggaaacagtcagaactctgccaccctgggcctcccctctgagtggccagagtccaggcctgagtcccactgggagtgctctactccagctacaggaggaagcagctgacctcagggtcccttctagcttctaggaaaagtttccagagcctgtccctggagtgctgggagaagtcagtctccctaaggcccaggagagaagccacaagaggctctgccacctgcctcctaccagggctgggaggccctcgctccagtcaggacaccctagagaagggctttggagtactgtccccacgacagacttggagggactggttggtggatggcaggaggatggacgctggctccagctggcacccaggttaggaggaggccgaccagagggcctgccttccagctctgcaatgcctgggtcctgtgtgctggcccacaagcagaggctctcctgccccaggtaaggggtggtgcattgccaccaggcccatctctgaggtctgcttcttggctgggatgggtgggggccccatttccgaagaaagggggtggggcctgagagggaggtgatgagacaccgactggaggtgggggcaggcaggttctctgtgggagtggagggcagggaggggcagggtggcagccttggccttagacacctttaccactttgcccagcagggggtgtcacacccttcccgggcgcagaggtccccaggccctccacgtcagaccagccaagatcacacctggtgtcacacagtcctcaaactctgcaaatgacacctccccccaacaaacacaggcccttcttcaccggccaccgtgccacccatcctcatcccctcagggctgcctccggtctctctgcccactgacctttagaaggtcagatatcagctcatgggtcccaagggccgatgctgtgaacttgggcctattataaacaacaacgctaacagccaccagtatcacctatcccatcaatgaaccaggagagttcagagatcagtctcaatgaatgatcgggctgcttgtttcttttaaaacatttaagaagacagctgcttttgtcaacctagcacgtgagggtcctggtcaaaatttggtttcaatagccagggcccatgggaagcccgcaagagctgaaggcaaaaacactggaaagaattagattaaacccaagaaaacaccaaaatatcaggataaactgccccaggtgagcaccaggcctcctggagcccccggccttgtcccacaggaggcccccaaacccagatgcctacgttgagtagtctgtctggtccatcaccacccctagggtgggggctaaagaggcaggtgggagacagtccggggcccctcactttgaactgataacagccacctcatcccacagattctcaggtgaaaaatactcattagccataataagcagcttgatcatccgacacagccttgtcccaaataaattaaattcctttaccttgagacagtcgccccgaaaccagactaaccacctttcccaacaggacgctgctttcaaaaactaaaccaccccccactaaaaaaataaaaacacacaccccagagccagacacacaaagatctttgcagagaacaaaaaaaaaaaaaaaaaaaaaaaaaaggcacacacacagaaaaaaaacacgaagccatacaaaaaacacggagaacaaaaaccccacaaaaaccccctaaatcctctctctgggtgccccccagctcctgctcctctcggttctttcataatgacaagcatcacattagtcacagcctctaagcaagtggcaaataacaacaacaacagcctcagaagtcgccgatcccgaggccgggacgccgggaggcagccgcccgaccctcccggcccccacccggccccgccgccacctcattgggctaaaaataagaacttccgtaaaagaagcgaaagaaaagtgaaagagccgcccctgcgttcccaccggccggtacctgttccaagatccattctcttctccttggtcccaaactcttcgcagaacgccaccaggggaagaccgggagagaagaaacacggggttagcgtctcgcgggaccccggccgcccgccctgcttgtcccccgccccgcaggagcggcccgtcccgggcgggcgccgaggccgcggcggagaaactttctcctccgcgccgcccgcttctcacgctcggccccgcacgcgcccgcgggtccgcgccgcctgagtttctccaactaaggcagcaactctcggccggcgcggccccggcttgggggccctggccgggggatccgcgaggcccaggggcgcccccgtcccgccgaccgcgccccgcgcccgggtcgccgcccgagaccgcggcccccgggcctcccccgcccgcgcccggtactcaccatagtcggagagtcgaaagccgaattcacttaaataatcaactttcataatacttaattaatgcctaattgcaactgattactccccgaataacaagttgttttaaagccctgatgtcattgctcctgccggtaacactcagggtaacagtttggcaggagggagcgggcgggcgggcgcggccgggggcgctgccaggcgccgcggtgattggcagggcggccgcggcgccgcctcctcggcccggcccgcgccggccccggcaggtgaaagagcagagcgcggccccgccgccgccgccgccgccgccgccgccgccgccgcccggtgcgcccgcccgccgcccgccgcccggtgccggagtgaatgggctcgcgctcgctcgcgcccccgccgcgcgcccccgccgcgcgcgcccgcgccgcactggcagggcggccggctccattggctctgcgattccccaaacctctggctccgggaggaggaggcggggacttgcgctcagggctggcgggaggggacccggcgcggggcggggaacgcggcccgagtaaggcgcccgcgggcacgcgcccactcttgccggccgccggcggccgcgcgcgcgctcgcatgctgccagcggccgctcgggccccgcgagcgcgaccgacggccgccgcgcgcgcctgccccacgacccgcgcggccgcgctaacttttccgcgagggcgggcgcaggtgtgaggcgccgcggggccgcgcccgccaggccgcgcgcttccctgctcccctgcccgctgcctgcgggctcggggctcctggggtagcacagggatttcgtgttcccctcacagcactggcggcttctggagctggaggaacaggagcgcggggcgaggcggggcagggcgcagtcaggcccgcgcgcccccgcaccccgcgcgtccccggccctgggccccaggagcgccggcctgggacacgcagtggggtttcctcggcgttgctttggttttgcccttaaaacgggtccaagtgtcctcccagagcctccccggtcttccggtctttctgcccactcctccctcaaagttgggccatccgccccgcagccagacgaatggagatcggcgccccactttccccacagcccccgacccatgatcccggccatcacttgcgcttcctccctgccttgcccctctggccgctgccctaggaagggcgctcagtagagcacaggcaccctcaaccagggagtctgaggcccatcccggctcctcctcccctccccgccaccccccccccccccgccccacgccgtctccaggcctgtccccttcaacgtggaacctcatttcctgccagcccatggccagccaggcgctttgtgctgcccgtgctcctctttcttttctgccagagaaggcagtttgagggttctcccctccatgaaccgtgcaccatgggacatccccagatgtccctgctgcagccatatattttgagagtccttatatgttggtgacttaagtgacgcatccggcccagagggcctcaaggaaagagacggtggggtgagcagggccttgggcagccttgctaaggaaggacctggttctccgtcccttcttcacctaccctgctgccctcctcgcctctcccagcgctcctctttcaggaggggccacactgccttcagatgaggggaggggagcagggcccaggcttccctggtctttggacagcatccagcaacatggcgctggcctatttttgcaatatttctattttgcaaagggaggggccagggaggccttggggcaaagacatcagggagttaacaatctactctttctcctactttcccctcatttttctccttttttcctgcttgctctatagttctaaatggcctctcagggagttgggcatccctcccctactccactgcccttcccactgccttcctggcagtccccactcctggccgtcacacagcctcattggctctgtgattccccaacccatccctacataggaacagcagctggagaggcctagaaaccttactgagctgcccctggccccaaaaccctgaataagggaacagaactaccccaagtctaagcctgggagtatgactgcccgtaccgggcacccagcacagaggactgtgtgcctctgctcccgacatgggatctcagagagggcatctgtgtccaggaccgctgtggggtatacacatgcctctgggtgctgctcccaatgactccccaaagcaaggcatcgtaacaaaaggcttgcagctctggctggtgacagcaggtgatcaatccccaccccaattctgagcctctgctctcctatctgggcaactgtgtgtaggaggaagcctggaggcaagggatagaagaggtgatttctgggtgcatttgaagatgtctgcaaagatggggagctgcttgcatacgtgacccacacagccactggctggctctgaatgtcttcctgggcttcagctgatagtggtcagagcctgacccatgaggaaggtgtggaggggaaaaggaaagcatcttccctccagctgcccaggcaggaccacctggattggccacccagtaactcggggggtctcaggcagacaaaggctacagaggaatggcggaagggacaggactcgagagagcttgggggatggcagccagcaatggagggaggtgtggggatgcctggaaagcctccactctgtcaagtccctggccaggtagccacaggctgagtgggccctgcccaagaggaaaaggccttcagtggaggagcagcggtcagagaagcaagaaacaggccaactcggagcgcaaggatttatgaaggtcagagaaggcggcggaggcttcgaggttgtggggtatgagtcagaggctgtgtcatggaggggcccccagattatgcgccccccccttctctctctttctctctgagtgtatctgctcataccaagaggagaggcatcttttgaggctatggcccatctttgccttgaggacacctgagaccccaaagccaggccacagtgaggaccttcatgcccgggactcaagggatggaagtccaatgccataatctcttctgatcttgagtccctgggcccagagcctctagctcctcctgagacaacccactcacaagagaaaaagaagtggaaggcaacccagcggttccccccaacccaggctccccacatcagcaccaaggaaagccatctgcccttcctgtcacactgctatcgctggttcctgttaccccccccgcacccccaagttgcccacctacactctctccctcccgagcctggggccttctcactcaccagcctgtttacacaccaggtatctcatgctttatctgctctcattttgaatttgtaactttcacataaacttgaacaaagctccttttgttattgcaccccaccccaggatcccaataaactggttccatctgaggcgactgggccagggcacagaagccttggccaaaggactgcgtgtgcctgcgaacaagcatgttcgcacctgcgagggagtccgtgtgtttgcgtgtgagcccgctccggggccgatggagggagggtgtcgggaaagctgtgagccagcgaagtggacgggaagcatgggggccgagggagggcagagccaaggcaccacggcatggccacgggcacgggaggtcgtgggccacagacaggtgggtgttggggcagggggtcaacaggatgagaaggaaacaaaggggagaaaggagccacagagtgggtggcggagcgagggccgcgccgagtgtaaggcagacgcagggattgcattatggcaggagaggggctggcacagccgcacgctcggccccgtaatcctgttagccagcaatctccattccgaaagagcttcatttctttgtgaatatttgtaaactagatatctaatggaaaattataggaaaattatagtgaaattcatgacggagaaatccgattatccctaattcaattatgccatcttagcccacacagcacatttcccatttttttcccataaataccgatgccaggggtcccggtaatcaaataaaattgaaaatcatcttcccattaaattcaattagccgcaatttctaaagcctatcagagattttaattactaaattataaaattctccaatgctaaattgaaaccaaaaaaattgcacatccttatatttcagagaaaaagaaaggccagcaaaatccttgaaaaatgccctcttctctgtggccggctccgaagcaggctccccacctggaagaggcccaccatcactgcctacttgtccagctggggatgaagccaaggggccaaggagggtccctggcaggggagggctgagggggactggcttaacagaggggcaagccgcacctccaaccccagcgagctcctccaaactggccttcctctcgtgggctctcctggctcctgagaagtcctcagctctgtctcataccaggaagcctctaactcccagtgtcaccttcttggcccatgaattgggctcaggcttaggtcacagcttggcctcagggctctgtgtggctccagcacagcggaccggaccggaggcagccagctcttacccaagcactggctctccagccactcagctcccccaccgctcccccacccatggcctggcctgggttgggggtgggagcaagatggagcctggggttgggggtggacaggtatcacacatggctccatggcccagaggctgcttgctccagggcgttctcaggggcccatgaggcctggcagggtaccagccttcggggagaagagctggggatcgacatggcccaaatctggcctctccctgcacttccagctcatcctccgttctccttcccctctcctgggaagtcaacggccctgaactggccaggaggaacgcccttgtgccctgggagaggatcacactttccccccatttccttttagggaagtgctggccacaaccccaaacagtagcccctcctcttcccccaacccccacatcccacttaccctgctctaaaaggtgctctcagagtcagtagagcctggggatgtggcatcggtgggggcataaagtgacccaaggtctgaaagccaaggtaggttgttgggtgggcagctggcagccctggcagatccaggacagtcggcagaagtcttgctggcagcccagcacccagggagccgggagcaggtttaatttgccaggcagccaggagtgccagcaggggaggcacccgcaaacaaaacaaaaacaaaaaagttaattatctttggctttttcttaataaatatccaaactggcccggccggatcctccactttggagggagagagaaggaggaaaaaaccccaaaccaaaatccaacagactgattctcttgtgtctcccttcccctttgtctcacccttgtaggtttctcttatcagaagcagcgacggtttcacattaatttcccagtttttgtgagttcaagagtgtggccacaaaaactttaaaaaaaagttttggggtggaaacgtggagtgtgagagaagagagaggtaggtgggaagaaaaaggtgagaagaaacagaagagaagcagagacagagagagagaaagagagacaggcagagagagagagagaaacagagacagagaaagagagagagagacagagagagagagaaagagagacagagagagaaagagagatagagacacacacacacacacacacacacacacacacacacagagtatgaagcagggacctgggctagttgggttgccctgtgggcctggcccagcctgtggccccagcccgggcggggacctgttctggaatgttgggttggcattttgtctcagttacaatgatcagctgcagaagatatgggatttctcattttaagctctgaaaccacttaggtttctctggctacttcagttaccctgttgctgctggttcctgctccaagcctcccttctaggagcagggctggggagaagccaagggaggggtcccaggaggggaggcccgctgtccttatgggaggtgtgaggttttctatgtggagctgccagcgtacttggggagaagacacgtgtgctgctgcctgagtctaggtgtttggatggtgtatgtacacgcctgagcctgaactgtcagacacacatgataggcacatgtgtgtcaggggtggggtgggggttagccaggacatcaagcaatccctcatggagcaccagctctggagtctcagtacctgggttcacaccgcagctccatcttctacaggctctgctccctgaacccaggcactgaccctctaccttcccagcatcttcaggaaatcatcgttagtggaaccctaggtctgctgatagtgggggacagagagggactgctaatgagtacagggtttcttcctgggggaatgaaaatgttctaaaattagatagtggtgatgatggtacaaccttgtgaatatcctaaaaaccactgaattgtacattttaaaaaggtgaattttatggtatatgaatgatatctcaataaagcggttattaaaaagtgggggaaagacgggggatcatattagcacttcctgaatagagttgttgtcacacagcactcagcccgcacacagtcagtgctcaataaggattagctgttaatatggatcagtccaaggcctgggctggtgtccatgggtgtataccattggtgcttacaaatatctacttgggcccctgatgccagggccagcaggttgtcaaggagctgagctgccccaggtgtctggtggggctcctgggcagctgctccctggcagggaagcgggtacgtggccctcctcctgcctcctgcccgggtccctggagaggaggctgcccaccgtggcagccgggttcccgtgcgcactctccctgtctcgcagacactcatattctccatgtgcagcagaccgtgaattcaccttcatactagttacagggttatttagcttctcctgatgctgacaatcacaaactttaattcgctgcctggcttctccctgctgtgccctctgcccacccccaaaatccttgggagaggatgggaaggacttaggtccagccccctctcgccaaagctcgcccttcagagtgatggagtgatgggaggagggggggcgcggtcagaagaaggagataacgggcaaagggctggagggagaacagtgcgggagagaggaagtaccaccagggctaaggggagcttctgtcctgctcctccagcctgacactaatgtattcaacctgacatcccatcttgtcgtgaatgaagactcggccgatcaggctgctggtttgagggctggcagccttggccgggacggactggggccagggctcaggcctggggctgagcccctaggaccaggcagctgacggggggctggctttcctgcctcctgctgaactaacaggtgctcgtccaggagccgacctgagggagcccattcctgccagcctgacaagccaggcctcagtttctccacctcccccggcccatcccccgttgggctgagccatcctgcctactgaggcttctcttgggcttccggccccgctgcctgggcggcgtctgtcttcctttgcggacagcaggtggatccactcagagctactgccaaacattagatgggaaatagagactccgagacgtcccctaccaagcactcgaatcacacaatcctgagatgagtgtgggtacaggtcccaacctaggtgacacatgtccgcttccttgcctgctgggaggagctgctgctgccttgctccccgcaggccagccctggcggggtcttcatcaccctcttgccttggcttcagcagatcccctgctttctgtcttccctatgcacctgcaccctttcaaggagcgcgcccagcttccagaaggtccacagaggcctcccactggctcagaggccagtgaaggtcagagatctcagacccctcctctcatccaccacctgcctcctgaagtggccaccatcatcgttccccaaagcctcctgggctagtgaaggaggaaagatttgctctgagaagcatctgggtggaacagggaactcacccacaaaatccaagccagccccatcagtcacttgttagagagtcccaagggcagaaggccaagccaagaggaatcacgaagaccagaggcctggcaatgacccgggccagggagcttggagagggagacgcggggctggaggcagtgctgggaggagagggaggccaagaaccccatcggtgggtccaggtttgtgtctgcctcctcccagccccattccactgccccacccctgccagcgggggaagtggccacggtggcctgggcaagagagatgtcaatggggccgatgggagaaggggcttgttgactgcaaactgtccattatgggttagattataagcatattgcacagggctctctgcacgatgccggggaaatccaatacgctgaaaggttaatgcaatcaattagggtgacaaggaagtaaagtaaagccttccgagtagatgaaaaggagagagagggagaggcagagagagagagagagagagagagcgccatggagttgtgggggtgctatgggtggtgggaaggcaaggaggaagaggaaatagagggatgcagagaggaggcctggaggggaaagagagatggacaaaaggccaggagccctcaaaaagaggacagcaagagagacggcagcagacctagcacgagaggaggcccagcagactctgcagcagacctctggccgcggccgcagctcccgtctccttgcccactcccttccagcctttcctctcgggcttggagcctgattcccaccttggcccacagcagtagaaccgggccagggcggccttggtccctggtcctagacagagccagcacccactgtgtaacctccagggccttctcagccagactgcagcctggttcccacccaccacctataggcccagtctcagacctggactaccccctcagcctgcttgcccctcagcagctcccgataactcaaccttcacagcttctcccaggcaccccagctcctccttgccacaagcctgggaagcagacagcagtttacaaatagagaaactggcgctcagaggttatgctgcttcccagggccctgacacagaaatagaagacccagggctgccagtccacgacctgtggggctttttttttcaaggtgctccctggaatcaggagcccacccttctccatagggtcagactccgaggccccctaaagtgcaggagctaaaacctctcgagcgggggccggaaaactttttccctaaagggccagagagaaaatcattaaccttttaggctttgtgagccaaacagtctccgttgtagccattcaactctctctgcaagtatagagtgaaagcagccatagctaatacctgaataaataggcatggctgtgttccaataaaactttatttataaaagcagactgtgggtcaaagggctctgccaagccctgctccagagaatggaagcacttggggctgaatttcaggacacggaatggctggcttcaccctgctgcctggggacggagttatctaccctgtcaggacctcatgggcggaggtttctagaggaagcaaggttctcgtgatcagagggtagagcaaaggaagggacagagaacaaggcacggcgtgggaagccaatatccaggaactggtcccagcttggggcatcctgaggagccttccacggcactcagatcctcatggaccatgtgaaggcatggaggctcgcagctctgaagattctagaattctcaactccatgagacaggggtgaggccatggttaagaggaggacgggagtggccagaagggagcaagaaggggcaccagggagagaaaggccgagaggacccgggatggagctgtaaccagggtggtgctggcggcaaagggaggaatccaccggccccagcgagagtgcagggcgcgggccgggcctgccctacaccgggccgcctctgatcacgttttcagggccactgcccgccagcgcagacaatgctgggggagcctttgaagtccgaaagggatgccgcggtgggagccggggaatctcctcccttctccgtcctcctggggggaagggggccggtaggacaaaacccagagccggtcggtcgcagccggggcccgaaacgcgagagacaaagggaaaacaaacaggtttggagccaggcgcacggtgccgtgtctgtcccccgccccgccaagcggggatgatggatggctgcagccagccagctcgcccgccgggcaggccccgctatttacataacactggcgttccaccggtcacctctgacacagcactgcctggggcccgaggcccggtggccccgcggtttctcgcgccaccaccccggggactgacacagcccgtgaaggctgggccaggctggggcagccccgtatgcttggacttcaggggagccccgtgcctgaggaaaggcaggacatggcagcctgtcctggcctcggccgtggccttctccctgccagcctcttagggaggatggaggaagccactaggggtggcacagcctccgaggagcgaaggcaggactggggttctggggccttcgagtccatgcggttcttgaggcagagcttgggcagcacgtccaggcacagccggccaccgccacggaggcaatagcactgtgagagcgggcaccgcaggctgggtaacctgagcccagccaccacaggtgccccactgccccacactgccctgagcacgttccttccccaaagtctgcaatccatatgtccccagaccatttccagcctaaaagccaaaccgaggggatcctactggcgggagggcatcttttcccatcagggcggaatgggtggggtggctgcagttccccatctccaccttctcatctccccctgggtgctcagcaggactgaagccagcccagggtgacacgtgcattaggtgagtggtcaccagtcggggagaggacgcgaggctcagggaggggctcaggccttacctcgtagcaggtcctagaacctcctcggatgtagctgggggtgtcacttcatcctggagaggcagagagaggagccctgttagcttttccaagcccatgactccccagtgcacgccctccatccctcctgagtacccaggcgctccctgccccacatgggctgaggggctgatgctccagggccagccaagagggccagaaactcaggcatgccgggtgggctctgatttggctcattcaggcatatgccagccacagtttgcaaaaacgtcagaaagtggtaggaactgactgcaggggcaatgtggtcctcaggacctccctagccaggcggagaagagtcagccgtgccgtgcacactgctccgtggaggaggccgggagtgggggtgctggtgaagtggcctgcacgctcccgtggagctgcagcggcctagcagggatgcctggggacaatgacagaatacagcagcaactgctcctttactctcttccccggggcccctgaacataaaaatgacaaatgccaaactgttcgctctagcaagttggtgacagaggggcaagggcgggccaggggccaaggcatcaggaagcctccatgccccaggatcaggctgccgacagcaccttccaccccggggtcctacccatgagtcatcacagcccatgtccagagaccgtgcagggagagggacgatggtcagacaacgtggaggctttaaccaacacgcggcctggcccagcgtgccaggctggggccctcctgcccagataatgagtttggggagccaggttcaaaggggcagcctgtgtgtacgtggagagaaaacacagggagtccccccgccagcctgctggccaggccccccaacccttgctcaagccaggccctgcccctgcaggcctcagaaccctatccaggcttggggagggctgtctgttacgttttcttctccccctccctcatttgtggcttatcaatgatgcaagaggaataacaccaatttccttaggctatgtaatccccaaatcagattggggggattgtgggagatgaggtgaccttgttgagggctcccggaatgccacccagtcccaccgcccgctctccggttcccaggacatatttagacagataatgctaattgtacttgacacgtcctcttaaggagggctcggctctccaccagctttcgccgcttgtgttgggctgcccgggcagagggtgcccactggggcggagcctgccctgccagatacagggctctgggagggctgagagcccggtgggttggtggttaggaagtgctgccccacgggcctctgatgcccatctcatccagatgatgagaggcgggggggtctgcagagagctgggcggacccctgagacagggggcggtagagaggatggggggctgtgtaaagggggaataaggaaaagagaaggagctggccaggagaggagaggatggaggaggaggccggcagggagggtcacagggtccggggatggagacccccaggcctccactgcaaggcaccaggtgggctcagccatcagagctcgagtcctggccggtcagcccagggccctggctggggtgtcatcttcactgtcccgtccgtcccacacactcctgtctgagatctctcaaggtgccctggccagcctcctgtggacccccaaagccccccaactccacaactctggtatctcccttccaccacctttctctcccctcccatcctccctggcaactgtgcatttattaattcatgaggcactaattagttctttgtttaattttgtgttaaacagactgaccggaatgataacgacttgcagcgcggtgttgccgtccccaaccacccctgttttctgacaacaagggagcgcgggagaccggagcgctgaacccaaatccctcagcagttgcacttcattaagtcaaaatgtgacaagaagcttagagagcaacttgcagatctgatcacacagaacaatcagggaggaaactttccaggagttggtcgggggtggaggagggaggggagggccagagatgtgtacgtacagggaccaggacatgcacggggtcctgtaccccacctgcccagggcaggtgtcctggctgatgggagcagggaagctgtccctgggtgggatctgggaccctgggatactgggaccccagtgggggcctaagaagtagctgagagttcatcttggtctcttcttccttctctgggcatcttttcttgtctctctgcctctcactgtccccactgtctgctttgtgagtggcccatatgagtgagtggccagcacatctgggacctggtagctgacgtagttaaggaaggattctccaaggccgggggagaggcacagtactgggaagacccagaggacagcaggggccctacactcagcggggctgaagtgaagtgaactcttccaggctaagaaagaaaagccatgtgctcagagatcatggcagaaagtgcctaagaaatgccaacacacccattctctgccagccgtctgtccatctgtccatccatccatccaatgttcctaatcttaagtactctggccaaaaaactgaggacccaaaggttcagagttctgtccagaggtagatggcaaatcagaaacagaactgggtcctggagcttccaggctatggggctgatggttggttggtagctgagctaaaagtgacaacagccttctgacctccttcctcctgtccatgtgaaaaagcaggatcttggccccagaggcatcaggctgcccatcccaccatcccattgcacaagtaaggatgagtgataccaaaagcaaaccctgccctaaactaagggcagtggccctacccaccttttacccacccttaatctctgaagacaccagcaatgtcttgggtaagaagaagagcacagaagggatgtgaggaggaggaaaagaaaaacaaaagtacagagaaaagttggcaaacgtgagcccttatgtgtgcaaagagcctggtgccttcttcctatcggctgctgcacctgcccaggtgaggcccggcactccctccatctcatccctggggcctgctgtgagagtgagcctggaggcagcctcatccagcccttctcctggccggttctgaagcacagtggtctctccctgagcccggcagccctgggctggcttctgttaatttgctgtcaggctgcctaagcaaaccaattaaaactaatcattaattataaaagagagtgagaagaggaggagaggagagagtgaaagacagaggggaagaggaagagggaaggtgggctggagagggaagacctgggggcctgcaggcggctcggagtggggcctggtgggctgggcgctgggaggaccagaggctcctccggcacaagaggtgccagggtcgggggagggcaggaaggaagcaagggatggaggacggggagggggggggccatgggtgagggagggagggagtgccacgagagatgggacgggggagagtgacaggcggagaagtggcagggaccagcgtaccaggacctgaaggggcctcctccatctgcagttccctcttgctggagccgctgctggtccaggacttggctttggagcctctcacccacagctgcccagctccatatttatgaagcaccaggccaggctcctcggccagcactcctacctgctccccaggcctcccggggccatgggggctcggggcagctgtcgggctgcccatccgcccccgcactccactgcgtctccttccccctgcccccagccccatcctcacgcacagcctctccctggccagccctttcacaggggctggggccatgtcagcccggcagtgtgaggaggggggcggcatagacaacaggggcagcgtcatggaaacgggcactttcccggagaaatattctgtttggcctccttcctgtattgaggagctgtcaggagcccgagtgagagtctcactaccccgggaccaggcgtgacaaaacctattttctgcctcaaatttgattgattaaaaaactttttaggaaaagcatgttaaaagagtgaaaaagaaagagagagcgggagagggggagagagagagagggagagagagaaagagaggagaaaagaaagcgaatcaaagtgctgcccggaggacggctggggagagaaaggccccaggcaggggctgagcagtgccccgggcagtgccgcagggggatgcgcaccagggggatcccatggcataaccaggcaaaacggaaaggtcagaggaagcccggaacttttacacagcagttagcaggacaatgagggggccggcggcccgcacaggccagcaggtgcccgatcgagacagaggcctcgggaaaggagcctgggccccggaccagggaggggcggtgggggtggctgtccagaccccggagtcggagcaggcctccggattggctctgggctctttccaggcacagtcttggttggaattgggccaggaacctgaaaagtctacatagggtcaagaggaagggccctcgtcctttggggacaggaaatgggttttcccaccttgctctcccaagacctggcttaagaagtgtttttaatcatagtaatttttaaaaagcaggagacctcaacttgaccctccaccctgaggctggctcagcaccagcttccagcccacctttgcctgtcttggaccttccccagtcagggcctcaagtccttcatgggatgttgccctatgtggtccccatgcctggccagggacttcaatggtgaattcgaggccctgcctgactctctcaaggctccaggagaaaagctggcctccccacccctcctgagacccccttaggaggaagcaacgcctccatttcccagtggccctgcccgatcttcttgggcaggacccctagtctccccaggaggaagggtccaagttggtggcctagtttgctctccttttctctaagggccttgaaggtcaagatgaggagtggttctggcaaaggagtcagcaagaagattttcccaggtgctgggagggtgcttagcagtgcccactccagtctctgccagctcagggctcagcgtggtaggcagtgcctcctctcaacagacaggcacgtcgccaacagatgcacagaaagacaacacctgctccaggctttccccagcccctgtgccaggtcaagtgaccctagatctctcttgtccctgctccacagcgagatcatcaggcactcactgagcacacactgtgtgcgtgacgctgtgccaggcacaaggaagagaaaacaagaagcttacaaaaggccgggggcagtagctcatgtaatcccagcactttgggaggccaaggtgggcagatcacctgaggtcaggagtttgaaaccagcctggccaatatggtgaaaccctgtctctactaaaaatacaaatattagccgggtgtggtggtgcacgcctgtaatcccagctactcgggaggctgaggcgtgagaatcatttgaacccgggaggcagaggttgcagtgagctgagatcatgcaactacactccagcctgggcgacagagcgagactccgtcttggggggagaaaaaagaaaaagacagcatacaaaagtcgagttggtgagaattgagtttgaatcctgcctctgctgcctcctgccatgcaattgggtacgcaggctgcttaacctctccaggccccagcttcttccattgaaaagtgggggcccatgagtacctagctcaaaggaagttcattcagtatttcttgggcacctactacatgctattagatccttgtcctagacctagagaacattggcaaaccaaagactcaaccctcagggagcttccattcctgtgctgttgaggactcgcggaaataatggttagcacagtaggtggcacatagcaagtgctcaataaatatggcctcttattagtttccagggtccctgcctttaagaagctaggagagatggtgcaattccattcccaggcatataccagaaaaaatggaaaacaggtactcaaaaaaaaaaaaaaaagaaaaacaaacaaaaccttgtgcatgaatgttcatagcagcactattcacagtagtcagatggtagatacaattcaagtgtccatggactgagaaatggacatacaacatggagtctgtccatactattgaatattattcagctataaaaaaggagtgaagttctgatatgggctacaatgtggatagacctggaaatgttgaacgagaaaggagccagacagacacaataggccacaagttgtatgattccattaatatggaatatccggaacaggcaaatccacagagacagaaagcagtggttgccagggactgggggaaggggacagtgaggagggactgctaaggggttcagggtttctgtctggagtgatgaaaaagttctggaactagcttaatagttgtgcaactctgcaaacgtacttgatgccactgatttctatactttaaagtgattacaggccgggcgtggtggttcatgcctgtaatcccagcacttcgggagaccaaggcaggcagatcacttgaggtcaggagttggagaccagtctggccaacatgatgaaaccccgtctctactaaaaatacaaaaagtagccgggcatggtggtgggcgcctgtaatcccagctactcgggaggctgaggcaggaaaatcacttgaacctaggaggtggaagttgcagtgagccacaatcgcctcattgcactccagcctggaagacaagagtgagactctgtctcaaataaatacataaataaaataaaataaagtaaaataaaataaaatggttacaatggtaaattttacggtgtgtgcattttgccaccataaagtaaaataaaatgatatcgcttttttaaaaaagcaactgctagggagagaaggaatttgtccccatgtggcagctcagggcaggtgctggggaagccaagccaggggggtgggtaggtgagacacggtgacttcaaatgggccctctttccccctctgcttgagaatccaccatccgagtggggctcccggggctccacaggatgtgctgtgtgatcactgagggagaggacgaggcagaaaggctaggatggttgcagtgaagggacctccccttaggacccccccgctcaagtgcctgtgattccgcacccccgcgggctgccgttcccggcacacacacagcgcttctcctgtgcggatcccaatacacacggcccagccaatccatctctccaccatgctccccagataacttttgctgccgctcagcatcttagtgcaacaagcgcccctctggatgggtctgagtcgatgacttccccacccacagggctccagggcttcccaaggtcgaggagccccacctcgaagggaaagcctggaataaccagggagccaggctcgtggggcagccccctcaagctcctgcccccgccctcctgcctgttccagaatgcgtgtacatatataaacccctgccttggcccaggaactgtcaggagatcaacaaacaaaagctgcttcttgacagggagtcatttatattttagcttcgttccattatcctaacgaatccttcatcagcagatgcaatattaacagcagaaaatcagctcattacatccggggggatttcatcaagacggcaatcatgtgccgctcccaagccttcaagaggccagtggggctgttatttatttattttgttacttatttatttaattttttgggttctttccacataattgcactgcatctcaaatctttaataaataatttgtaggtcctgaactgcagacagctttgctctctgccatgagagcctacattagccaaaatatttactacaatttaagagtcattagagtcaggagggatgtgaggaggggtaccctgttcttccggaaacagcctggtttggggctgtggcgcttggccctcactatagtcctctaaccccctctctggttctaaggccagccatcctggactggaggctcccggaaggcaggcctccatctgtttccctcagctctcttcgtttgggtgaggatttcctgggagctcttacagagagacaaggccatctctaagtcccctgctgggcttctccaggcttgatgaggacaggtggctgatggaaaggacacacgtcgtgtggggacagccacctctcacatgcttgagccagagagccctgccgggttggcattgctggccgcccctgtgccagaaaactctgcaaggggaaccttctctgtcttccagcaggccctggctcaggagctccaccaccgtctgacccatccctcttggcttcccaaggttacgccttcaacttcaaaggagaagaaaattcagtgggtccagaggcagactgtcccattttacagataagaaaatgaaggttaagaaacaagctcttgccaggcgtggtggctcacacctgtaatcccagcattttgggaggctgaggcaggtggatcacctgaggtcacgagttcgagaccagcctggccaacatggtgaaaccccgtctctatgaaaaatacaaaaattagccggtgtggtggcacgcacctgtagtagtcccgctactgaggaggctgaggcaggagaatcgcttgcacctgggaggtggaggttgcagtgagccgagatcgtgccactgcactccagcctgggcaacagaacaagactccatctcaaagaaagaaagaaagaaagaaagggaagaaaggaaagaaaggaaagaaagaaagaaacttaagctccctgcccgaggcagcacagctaggatgaggcacagaactggaactcagactcggcagtggctctgctgagcctccacaccttccactacgccagagccttccaacgaccggccctcccagtgctcctggctccggcccacgaggctggagtggccactggtgctgacgggcaccccccgccaccaccactgggctggccgtgctttcacaggtttttcccagcgggggctggatttctgcccagccaggaatgtgctcccaggatgtcaattctaatctccccagcgctctgacagaattaagctccagtttgtccgacaacatcccaaagtttcagaaatccagggcagactctctaatcaggctgcaggacaaaggtctggcctgaccctgtcacttccatttattcctcctgtctgtctccaggcctcggcctttctgcagtttcctccaccctctgccccttccctggccagcccaacccccaccctctcctcagagctgccttgtctccacccagcccagcattggccctccccaagcagccatgccagtcctgttgctccagcatccaaagccgaggaattcctatgagacccacctgccgccgctcagccgcgggcctaaccttggtccaggttcccttccttccattagctgactttagggagcacacgggctccacctttcctcggctccagggactaggtgtccagttcagagttactctccgagtcagcccaccctggcctccggttggcccaactctgggctccgcataactgccccagaagcatcctctggcctcagcaacctccatcctgtttgaggggtcggcttgtgggccttggcaagctttggcctctcggccatgtttggggacaactatgtgggcagagacctctcttcctcaaccaactctgtgagtcacctcttggtgactgtctacgatggtagaagcagtcctgtacccgcgctaggcaggatctgcggtgagaaccccaagcccttggctctgttggatcgtgccattaggaagggacaaggagcctgggagcagccgggcagagagaggcagcagagatgcctcctccactccccacagcacccaatcctctccccacagcacccaatccacaccccacagcacccaatccgccccccacagcacccaatccacaccccacagcatccaatccgcacctcacagcacccaatccgcaccccacagcacccaatccgctccccacagcacccaatccgcaccccacagcacccaatccgcaccccacagcacccaatccgctccctgcagcacccaatccacaccccagagcacccaatccgctccccacagcacccaatccgctccccacagcacccaatccacaccccacagcacccaatccacacccacagcacccaatccacaccccacagcatccaatccgcacctacagcacccaatccactccccgcagcacccaatcctctcccggcagcacccaatccacaccccagagcacccaatcctctccccacagcacccaatccgcttcccacagcacccaatccacaccccacagcacccaatccgctccccacagcacccaatccgctccccacagcacccaatccacaccccacagcacccaatccacaacccacagcacccaatccgcaccccacagcacccaatccgcaccccacagcacccaatccacacccacagcacccaatccacaccccacagcacccaatccgctccccacagcacccaatccacaacccacagcacccaatccgctctccacagcacccaatctgctccccacagcacccaatccacactcacagcacccaatccccaccccatagcacccaatccccaccccacagcacccaatccacactccacagcacccaatccgctccccatccacatggctctcgggtagacccggagtgctgatacctgcctccatttccagaggaagtcacatgcacaagccggctagaagaggcacaggcagagaggcatggatggggaccccggcttaaatctggcttgctcacatcaaaagattcatggggagcagtgggcagagggagacgtatggaccatctggggggatactgagggtggctgcacttgagcccctgtgctgagcgtaaagccagacccaagggaaggggctccccaagcgagagcagcagaacgaatgccccggtgcagagagtaagaagaggaagaacaggcggaagtggcactctgctgttctgctgaccctctagacagcacaataaatctagactggccaggatggaggggctccccaagagctgcccagtggcaggtagcacagaaagtcctggaatgccactagtaggcagggccaggccacctccctgggctgagacccggccctgagcatggagtcagtccatcccccaaaggctttctcaagccttcccctctccagcttccttagccacattgtacagagcgggggtccctttcttggagttgcaatgacaggcggctctctctccctggcagtctcttttacgttcggtcaaacttctcccccatctcaaggctgcccctgccttcaccagcacaggcaggcggggcacagacctagcagagggctgggcctcagggctcccctagagagactcagatgggctgggctgctggagggacaggagcaggagggacagacggccagcgaggacactggggagggcgtgtctccttaataagccctttctctggaagaatcaaaatcattatagtatttttacctaatgacagaaaaatctacgaacgcctgcctatcagcactttccaaaaagcccctgcagttcccacggaacccactcaccccacccccagcctctgcagctccccagttccccaaacttcccacttggcttctctgcctttctgtccgatgcatctttcctgccttgccgtgctggggtgttggtgagttgttggaggtttttttttcttttcttttcttttttgctatttatcagcaggttgtgtggagctgagtggtgtgagcctcaccctgctaaataaagctttggtatttctgataaagccatcaaattccttatcgcactgacacaaagtgcatttaaagagacagacaccctgtccctccctcctcaccagcccctgccccctccaaccagttcagatttccagctgctcagacactttgggatcagacaccaaatacggctcctgaggacatggatggggggcagggggcaggggacaggggcggaggtagaaaacccttgccaattcccccccaactgatgtcagagctgccggcaccctgaactcggtcccagggcgtggcatggggcttcctgacccaactctggaagccgaagggagctatgaatagagacgtcctgcaccggaggacgtcctcataaacagaacaatcctgtggtaggacaacagccatcagtgggaggaagagtccgggcaggctggtgggcctttaaggctgtgcagccgctgcgagcacgcctggtcgcctcagcgaccaaagcgggtgcagggacgggccgagggggctacggaggcccattcaacactgggcagacacactcagcaaagcctgacttcacacatccctgggaggtgggtggaactgccttcccatttgacagatgaggaaactgaggctggcccaatgccacagggccaggggcaggcccagctggggccccagcccaggcttgtggacagcagggctcggctctgctaagtgagagatgttcctcccccgactggttcgcagtctccccttccgccctgttgccgtccactccccatttaggatcccacaagacaggccttcctgtgtccccgtgcccactcccacctcctcggccctgactcggcagcccaggccctgcgcccacacacagcctgttggttgaggaatcaaatttattatttttaattattttgatttatcaaagcagcagctacaatcatattaaaccaacttggcttcttggcatttaacagatatagctgccgcaggactcccccagactccataaaacatccagtctgtccacctgctccccaaggagggcacgccaggctccttctccaagaaccccaaattggaaggccactaggcccccacttctggttctgccctgccagaggcacatgcagccaaagtcgctgagggccagagggtgggaaaggaacaggctgggcagagctgccagtgccttgggacacagtcacctccatgctttagcccaggagaccctgccggagtcctgacccactggggagtgggcagcagacccaggcccacaacgtctccactggcatccgtaggagtctgctctatcccacacctatgactgggcacttaacctgcaggagccaaatcattctgcagaaccttgcccacaagaggaattactgcctctttctttttcttttcttttctttttttttaagacagggtctctcttgctctgttgcccaggctggagtgcatttgtgcatttggtatttctgataaagccatcaaattccttggtgtgatctctgctcactgcaacctctgctttccgggttcaagcaattgttgtgcctcagcctcccgagtaactgggattacaggcactcgccaccacacctggctaattttttttttacttttagtggaggtggggtttccaaccatgttggccagactagtctcgaactcctgacctcaagcaatctgcccgcttccggctccctaagtgctgggattacaggcgtgagccaccgcacccggccccgtgcccctttcttgtaaggggagagcctgaggttcggagaagggaggtctgccagcaaggcacagctcctaagaacagtaaggctgtttctcttctatttgaatcaaaagccctcattcttttgaccgtaccccactgccttccctttagacctgaaaagctgcaacctgcccacgaactgtggagaatggtagcccaagacaagggaccctgaaattcaaggtgatgtcctaaggctgcacacgccatgcatttagaatctgagtgcttgggagaagggatccctaagaagcagcgctgtggggaaggtggcaccgaacaagtttctaagggacactcaggtccacctggagcacgaggagaggctggccacctgtagggcatggggaacgggggctcaggtgagcagatgcatgactcaattcaaccagggagctgggccatgccctcaggtactgcccaatcctgaagcccgtgggtcccagagcctggcacagtgagagaagaggcagcagggtatgggaatagaggaattgggcacttcaacgttccaagcaaaaactgcacacaaagagcatgggggatccccacaggcctggaacaggcacctccggggttcaaaggcccacagaagccaccggaggcagctcccagcccctgagaggaggcaaatcttgtcttcttggtgcagtgaagaggccagcagtgcagagatatggtgcctgaacacaggtcctccgacagcaccagggtgcggtgtgtttgcgcacaaaaagaatagtcagctgggatcaaaccaggagccaggcggctgccggtccccactgctctgcccagaggccctgtggcctggccacagagagcttggatccggctgcaagttctgaagtctggtaggtaccgatgggcatgtgatctggcctctccgaggttcaatttccttgtctataaaatgcacgcgatgatcgtgcctgtcgcagggggctgtggtgagggtttggggaagcgatgagggtaaagctcttagcaaagtgtctacacatttctatgtggaaaatgtggtgccagtcatcattgtgatcattgtcatcatcatcgccatcgctaaacacttctctaaccaggatatggtaactaggaatcgtgcctttggggctggtgatggcagagagactggcagcactgaccagccctcccactgtgctccccaaagagcctggggaagctcagaaatgtctagaggaggccacccctactgcctgccctgaaaactgacgaaagcagccaccaaggccctggactgtaaggctggaggggaaggtgggaagacttgggcagtcccatttgcctatcaaaaactgtacattcgctcggctttccacgggactcatgtcctaatatgggcccagcagctttctgggttatttcgagtacatgtgataatgactccaggcttcgcttctgctgcccccagaaaactttccatctggggagagggaggacggctggcaaagaatgagaagggcgtagggaagcccaaggtcagagagtggggaggaagtggacgccggtgggtgagctgagggagggtgagtggaagctggagggttagggctggccaagggaccaaggggagaggcaggcatgggtgccgcgtgggcccagccaagggctccaggacacgaggtggacacccgacctcatgccctgcctaccacccaccgtcccagggaagttcaccctgctcagggccacaaccggctctggagggagggatttaagagcaaagccacagagggccctcatcctgcctcctcgcccgtaactctggtgggggtcccttttgtacaggagccaagctgggctcctgggcctcaggcaactgcccggtgcccagggtccccttggctccttgatttatttgcctattaattatctttctggccaagcttggccaccaactccagactgcacagggttaactccagacagaggggctggctggctttccttcactctacctcaatttctactgctcctatcacctacctcccccaccccctgatcttagggaaaaaaaaacccatcaaaataactattttatgtctccaaatatgcagatcattttctttaatgaaagatgcttgacgtctccgatccaattaatatgcaaatgcaggagaggatttatttgtgacattctgtctgggtgagagaaaacaaaaaaggcctgttaaccaaaacactaattgctgtgactgattgtcacatatcatcattttcataggatctcctccattcccggctcgcagggagcttgaaaccaggactggttccatgcgggcatcaaggagaaacagggcaactggctacctgccagcgtggcccccttgccatcagagcccacggggggctggacgagggtggagggtacgccagtgacctcccctcctaagctgcacctcaccactgacctgcaagtgccgacctgcaaaccaggaagtggacggccccagcctctatcggatctggcaggcctggggaggcctcaggcagcttcagcccagcaagtctctgggtcgtggtggaggccaactgcctttttgctgcctgacctgcctgctaggaagcagaggcgggcccatgccgaggggaagaagaggggccagggcagcctcttcgggtccgcccagctgccactcccacctgtctcttcctgtgtttctcctgctgtatcttttaccttgagcacctgttgacagaggccacctagggaaactgaggcacagcagagcatctgctcgttaagatgacacaggcatctatggaaacgttggaaccaggcatccgctgtgtctgggcagacacctgcgtcttggccccgccccttcgcaacctgcactgaagtgggccgtcagctgtcacagccaccgtctcccctgagcggctcaggaggccatgagggctcctcagaggaccatgaggcttcctttaccccatggctttagggagaacaggcaggagagtgagtgttgacgggcaccccattctcaaacgccaagggggaactggagaggaaacaacatgttttgctgaagacactcagtaaaggatgagaaggttctggtgccacgcagttccaaactcaaggccaaggggcagaaaaagattccctaaagcagccttccgtcccacacgggccagcgaacaaggggagcctacagggcacggacttagggaccgagtaccttcgagggcagatctctttccattcaagctcgaacattctgggtgctcggagaaggcttcttctatcttcctatcaccttcccagaactcctccaagtttccaaggacactgaaaactgggtgctgggagcccaagtgggcaaggcccactcacaggggggcagctaagaggcaggtatccagtgagcaccaattcggactggcccagggctccatgtctgcccccagcagagccgtggtggtggctgaaggtggtcccatctcactcgacttccatttcaaacatccctgtctcctgccccagcccagctgcctccctctggcattactgccacaggcctctaggaagagctggcgccagggctgcatggggcagacactctcccccccaaaaaggcctgcccccgcaccccagaaacaggcccaacaggatgccatccgggggagcttggaagccttccgggaagagcactgccctggcaccagtcctgcgggaaggaggtgagccgggtctgccactgtctgcgctcacctgatgtgcgcccacggcagctgagcaccaatggggtgtgcgtgggtgcagacgggaggtgcgcatcatggcgccaggagccagaggaggaagggcaagtggctgggagtggcagcaggctggctggtcactgaacagtgccctggctgtaaaccggacgtgggaaggccccgcctgccagtgtggatggtgggtgggtagggggacaagaggaagggtttcatctgaacacccagccagaggggcccacctccccctggcctgtccatcaccactgcacagtgagtgggggcaggccttgcttctacttcacttgtgcccataccacagtcactcacagatacagcctcctagggggctctggggtgtgggggctctcactgtgccatgatttagagcccctttaaaaccaacccatctgtgcattaaaaccacccataaaacagaggagccactggctgtggctctgagcagtctattcaagccaggcgccagcctctcacctgctgcctcacccctgccccggtgcccagcctgggggcagcacatgccctgttggacacggcaaatttgggtggggttaggccagcttcctggcactgggcaatggggtcctgcgctttgcaggtgcctttctcatggcttagaggaaaggaccctccagggcatcaaatcagcagccctggctggaagctgcccccatctctgaatcttccttggccctgtctcccactctcttttctccatggcctgggtccttcaggactagatgcccaggaagctcatccagcggtcacatttccctctaactccccctgcaacctggctgctctcacggtcagcttcagtccacccgtctcaggtggcctccccagttcagcactgcctgggtcatgtgccccagccccagagcccaccttctcctcttctttgggggttcttcccgagtccaaaccatgccagcaggggttcaaccctaaactcacacccaaccgctagcacctgccccagcctcccatatcactttggattcctggtgaggacaagtccagttttccaaaccgaccttggagctctttgaccacagcacactttgggagaaggtggaagagtcctccccatctttgccaaaagaggtgtcaggctaacgttacaccagctttaaaaataccccagcacacgatccacagggtgagagcaaaggccacgtggtcagagccgggctataaatagccagcaaatcatttcccagagccacggccccctccccagcaccaagaacctttctgaggaaatcaaagtgaacgcaactgttaccaagtcactactaaaatatttaccagcctggcgaagtgccgaaggtgcttggcaccgagtgtttgcttatttacaaggctgttttaaagggtagaaagcaaaataaggtaacctgagctattaaacccgggggccaggtggtacctaccagctgtcagccaccccaggcatgtcgggagctagaacagtcctggtggagattcccttgaaatgggtcaggaaagcagagagaggctttggagcccaggaatcacctagccctcaggggtaggggctcagggagtgggagcagagagtgttagaggttagagaagcacttctcccccagccaaagcaagcagggcctagcacgagctccaaggttgcccctggtcttcgctcagaggggcaccccaagggcactgcccagccagaggcaggggcaagggccctgggagggagaggcaaggcggggaagaggaggcagaggaaggcaggtggggggctggctgggagcctcggaggatgacataagggggacacagccaacctggggaagagaaggtgctcaacttctctctttctcctctttctctgaagtttccttgtggtttgaatttaattttgattttctcaacttcagcagattgaagttgaaataacctacaaattacttaatgtgttgtaaatctgggggaattcaggagtaattgggaccacatgttggccgggagggagcccacagaggacggagggaagcagccctcgcagacgtgcaggtggctgttcttccctggagggagggggcttgggctcccctcggtgggggtaggattccctagttggccagggagccctggatggatacggcgagaacgtgttaagaccaaggagtgaccatgtcactgcccagggcagcccggtgaccgtggacacagggcggccaagtaggctgggtgccaggcgtctgccaggcccctccaccgtgccaatgccaacaccgtggccgcctcccgctgcatgcgtgtggctgtcagctgagctcccctcccgccctccctctccggcaggctcctctcaagtactgagccatatggttccagttaagctccatatttttccttgtcgattgaagagacacactttcctctttgccagacagtttgcagattgctctgttggctcaatttcttattggatttctcaaaaaacctgacattttaaattaatttacagccacaacaaaaagagttcagaattttaatggtgttgtaagtaatttttaggtaatccactccagattttgatattaacctttgaaactggagttcattcagctaccatgttacaatccagtcacactccaggcctgggggaggccaggcttggggaggaggtggaagccaggttctggaaagccctttttttttttttactaggagaccccagagaggatgatcctggggaaccctggacaggtgagtgacaagacagcggcagtggggtggggagggaatggcaaggggggcctgaagacagcagggcaggtgtaagagagtcattgagggggccagagggcctgccgaatgttctagaaggatgggccggacttaggagggggcagcatcctcaggatcccttagtagcaagagcagggtgaggctccacctcagtgcactaggaaataatggtaatagcaataataatgacagctagcatttgctgagcagtcactatctgtcaggggctgtaccatctcattgatgcctccaaccacctatggggcagggcctatactatcaccaccaccactactaccagtactactactactgctgctactaccaccagcatgaccattaattgttagtgtttatggagggctgaccgcgtcccaggcagagtgaagtcggttttataaaccacctcattaaacagcaacagaaaccctgtaggagacaccactgttcatgccctcatttacggaggaggaaatgaggcttggggaggtgaaaccgggtctccccagcttggggctactgaccaacagccacgctctgggatgccgccatcctcagcctactccgtatctcctttcagaagatgctatgaaatactcatggccatcacagtcctcctggctggagccggagggaggaggagggcggtgtagtcctccaggctggccaggctggggccggtggaggatgccaccttttcctcgtgccgcctcaggccaagctgaaggctgcatgccaatccggccagaggaaacaccgggcacggggaatggagccctcgccagcgtctttactaggccctggcgctgtgcggcccctgcctgggtgcggtgccagctcactacaccagcagatcgttagcattcctttcctgcaggagctgcccagggcacccaggaaaggagacatgaagatgaggcccagccaaggccgctctggtccctggggggtccttgctgcagcaatcacccaggccctgaagagaggccagggagaggctagcatgggggtgttcagaggcccagggggtcttccctggcctgctccgtgtcctgggggaaatggttcagggaatgaatcagcacctgccaaacccactgaggtgtcaggtaaatagcaccatgtggggcttcctggccagtttctctatcacgaaagccaggacggaggggagggagaccgggagaggtgactggcaaggttttcactttacccactctggaagagaacacagcctgtgagtgaggaggactgaaacgaaggcagagggggagccatgggcgccaatgtcaagcccagcccaccagggagggtggcatggaaacagcctggagaaggaagagggaaaagggagaggtggccaggggtagggagaggcccgcgaccgtcccaggcctgtgggaagctgggagaccagggcgtcttgcaggcaggggctgcagagccataaggcacctgctgtttgagcccagccccagcccccactccaggtcatcggccatccagctcttcattcacaactctccatgtgtgctattctgggtaccaggtttgcacaaggccttttaagtccagaaaagaaaaaaaaaaacaacccagcctcccagaagctcacaaacaccccagctccttgaacccccgggcccaggggattcagcacagcccaacagtgccccagtgcccaccctctgaaagttgggaagcttttacggttctgtcctgaaggactctcttccttggtccccatagcccccaagccaggttcctagactccaagaatgagaaaacccctttcccaaggtgccaggagttacaataggaacttctgccttcccaccatgtccaggaagaaaaagtgtctgcaccctagggttcagggtgctaggaagcaaaagtggagctgagaagctggccttcacctcgttcctgatcagaggctgaggaaggccaggcagcagctgccagggctgccctcagcccttgcccagactgtgccgacctgggaacctgtggagcccctggctagtggccagacagcatgtatgagtgttgggggtgagctggggggagaactcaggcttgccatgccccggcaccatgccaacacgtggaaggttgaactaaccccgggcgcgatgccacgtgcccagaaactgggcatctgctggcacagcagcacgtgaagaacgaggggtcctaccaccgcctatgctccgggctccccgtcaacacatcgcggtggtaggtctgctccttccccacatggcactgggtatggggccttccagtgtccccttggcaccatgcctgccacatactgtgggctatccccattggcaccaggccgcacacgggaggactcagacaccctgctggactctagccaagctctgaatggctcttcccactggcctgaggccatcaactgggcacctctgggtttgggcccctgggaccatccatttactctaagggcccatgggaccaccctcccgccccctctgtgcccacagacaaccacgcaccatcattttatggaccacgggaaaaggtcagaagcttttgtaaaactaggtgcaatgtgcaaactatctaaaaatgaaaatgaacgtccttcccctccggtcaccaggacaatcctgtcccactggttaaattttcatttgtgttccaatcgagggcgcaaaccccagaaactttctgaattgtttctctccccagctgtctactggcctcttgctctctttccaactctttctttcttggcttctttttttaattattattattttattttttatttccccctcttggtcaggttaaagcgctcctgaggggtgattgacgggggttgccatggagaccccggcttgaaaaaaagcctcgttagttgccaactctgtgtgttgttgttttacaactgtgaccgaccgtcacatgagaggggggacagctgggggccgggctgcacaaaggggaatggctttttaatggagtgcctggccggcgcttgaagactcaataaagagttgctggtgagtcccctcgctgggccgggcccagcacacgggggccgcaggccctttgttccacaggagctgggatgggaaagttgggaaaaccagcccctgagaggtgaaaacaagaggccttccccccccactctccggacagctattttctgtcactctcacggtgcccggaccgaggggacaaaaccctgtcttggacaggctgccatgctgggggaggcggttgggaggcagctgggggaaggggagtggggaggagagggaaggggtggggaggagggggcggccggcctgcggctcctgccccccaggccctcggcgttgaaggcaggtggccaatgggaaactaggccgctgcagggcgggaggccagagggcccaagacaggcctgcgctggcgctaatgggaagcaagacggctgcaggggggcttcctgggggaggaggaccaggctcttctagctgtgggccaggagcatgcacacattcacaggctggcactgcggggcagccgggcccaggtggctcctctccctctccccggccaccccatgagaactcccccacccccttagctatctttcccaccgcagctcctcatctgtcccggacagtccagggagccaggaggagttgctgagtggcagtccaccatcaggccaagaactcagccccttcagatggcagaaaccaagtgccagagccctggggggcttaggggagcagttcgcaaagcgtggtccgcaggcctcttcccgagaccctctcaggaggccataaagtccccatagtggaacacagtttctacgtgccctattcaacgtggggacattacgctgacagcgcaaaggcagcgggtgagcggaactgccggcgtcccggcacagaccacagcagtgtgtgagaaggcatgtgttcctcagcacacgcccttccagctcgagaaaagccatattcactttattttatttttttttttatttttgacatggagtctcgctctgtcgcccaggctggagtgcagcggtgctatctcagctcactgcaacttccgcctcccaggtttaagcaattctctgccttagcctccagagtagctgggactacaggcctgtgccaccacaactggctaatttttgtatttttagtagagatggggtttcaccatgttggccaggctggtctcgaactcctggcctcaagtgatccactcgccttagcctcccaaagtgctgggattacaagccatattcactttatttatttatttatttatttttcagacaggatcttgctctgtcacccaggctggagtgcagtggtgtgatctcgggtcgctgcaacctctgcctcccaggttcaagcaattcttctgcctcagcctcccgagtagctggaattacaggtgcccaccacctcaggtgatctgcccgcctcggcctcccaaagtgctgggattacaggtgtgagccactgcgcccggccccatattcactttaaaatgtccttgatgaagctgcaaatatgattaacttttaggaagtcttgaccctcgagtatgcatcctttgaatattcggggaggatgaaagggaagcatgcctagggccttcgagtccaatgcctgtctgaaggacatggacccgtgtgactgagctgagagtggaaccagctgcctgctccagggaacaccatctttacctgaaagagtgactgacagacaaattgtgatttttcagatttgagtgtttggcagctattttctcaaaagtggacaaagtgggcctgtcacttccaggggaaaaaaacctgacaatatttgttgccaatgataaaatctgagctttccagtgaaaatcagacttttggaaaacttatatctgccactgcaaccttgacggcatcctaatacttaacagcttttctgatgagaccagtaatgatactaatgactgtgatttttaaaaaacatcatataggctgggtatggtggctcatgcctgtaatcctagcactttgggaggctgaggtgggtggatcatgaggtcaggagttcaagaccagcctggacaacatagtgaaaccccatctctactaaaaatacaaaaattaaccgggcatggtggcgtgtgcctataatcccagctacttgggaggctgaggcgggagaatcacttgaacccgggaggcagaagttgcagtgagccaacatttcaccactgcacaccagcttgggcgacagagctagactccgtctaaaaaaaaaaatcatataatgaaatgtgtcaacactctgaagacctgcattcctcagtgagccagtattttccacataactgatgtgtgaggttacaaagtctcacatcagggaatgagtcattcaaagtgctcatagagcagcttgagcaacatagtgagatcccatctttacaaaataaataaataaataatttagctgggcgtggtggctcatgcctgtaatctcagcactttgggaggccgaagcaggaggatcacttgagctcaggagtttgcgaccagcctgggaaacacagtgagaccttatctctactaaaaataaaaaaaaagtagccaggcattgtggcatgcgcctgtgctcccagctacttgggaggctgaggtgggagaatcctttgacctgggaggttgaggctgcagtgagctctgattgcgccactgaactccagcctgggtgacagaaagagaccctgacttaaaaacagaaacaaaacacacacagaaaaacaaaacgaagtgcttatagatcagtggggtttactgaaacagtacacaaagttcattgatgtggtttcagattccaccttggaactaacctgtgagagtctgtgatagtctgcaaaggcccttgagatactcctgcctttgccaactacacatctgtctccagctggattttcttcatagacttcaaccaaaacaacctatcagaaaggttatgcgaaagaaacttgccaaaaaatgtaaagcaactccactcttctcactaaaattttgttttggaaaatacagttattctcaaaaatatgttctttatgttaacacatcatggacttattgctgttattttttaaatgaattaataaataatgatttttaaaatttctcagttttaatgtcttaatatgctaaatatccatatatataatccatgcaggccaggcatgatgactcatgcctgtaatcccagcactttgggagggtgaggcgggagggtcacctgaagtcaggagttcgagaccagcctggccaacgtagtgaaactcagtctctactaaaaatataaaaattagccaggtgtggtggcacaggcctgtagtcctagctacttgggaggctgaggcaggagaatcacttgaactcgggaggcagaggttgcagtgagccgagtgcaactgcactccagcctgggtgacagagcaagactccgtctcaaaaaaaaaaaaaaaagaaaatatatatatatatattccacacaaaccaaaactttaagagccccaatactttttaagatcataaagggtcactgagaccaacaggtgtgagaaccactgtcttggggaactaggggcagaaaatacacgtggtggaacgcagtggagtagggcttcagctgcgatgattctctggcccacagctggccttagaggtggtgtgggcctgcttcactgatgctgccaggatatctgaggggaattacacatcacatcctaggtgagagattcaacctcgggcaggatggtgaccctgggatgcagaggcagaggagggggagatggtcctacaagtagtaaaagaatcacccggggaggtggccccttctgccttggacttgaaaagggtctggctcccatggtggcagcagcagtgcaggggacgtgggatccaggtgaggtaacactgccctgggccacacttgccccatcagggcataaggaggagctggtggagagggtgcctaagaatttagagccgaacagggagtcttgccaccagtgtgcaattcacaggatgccctgggccccttcccagggacgtgttaattatcttcccccactggtccctgggggtaaccaggctggaaatgagcaaaggcgggctctggctcaccttgctctgttctgcctgggaaagcccatggtcctcggccccaggcttggctctagagcagagatgtggaattttccagggaaacttcaaaatcatcactgagaggggaagacatttgaaaactgatcttaaagaggagaaaggaaagaaagagggcaggccaggcttcccagggtcgcctccagcacgggggactagatgtgaaagacaaggctgtgtgttttcatttcacacccagagtccccaggacaggacccaaacttgacctggggccccagatcatccttcctccaagaatgtgaagctcagggacacacaggctctgtggcctctgctgagagtggcatgtccgaccagctaaacctctgtgtccagagaccctgacactcgccactgccgagaggaagctcatggtacagcaccctaccagggccacctgcacgcctgtccatcccacacacttcccaagagctggctttgtatcagggaccacattaaatgctagaggctcttcagggacaatggcaaaaagggctccaccctcactggtccctgctctcagaggtgagcagagaagttaccgggcaactataactcagggacgggcactgagactgtaaagctgtgggaatatatgaagagaggcccaactcagtctccactaatcctggaaggcttttgggaggaggtggcatctatgataagacctggaagatgagctcagaggaaccagtacagtgtagtcagtactgggcagcctggactctggggacacagctgggttggaatccttccctgctacttcttagctctgggatccccagccttggccccctcttctataaaatcagaggtgatattggcacctgcctcacagggctgctgaaggagagtccatgaaataatgcagctaaagggcgtggcacagcacttggcacatactaagcagtgaataaatgttaactgttacattaataactagcgaaagtgctagtctcacccctaacaggtccacctggccaggcccccaggccgacccaaccaggcagagccaccagcccaggaggagcgctggtacatccccagccctgctctctcaaagtacaacagcacacatgggtgggaggggacaaccccagggcctgcccgagcagatgacaggcagaggtggcagccgccccccttcctgagcctgtggagtactgagcaccactcatgctgatctcaaggagtgtgtcttccagcaccgaaactccaagtcacctgcctgggaagaagcaagaaaaaaaaaaaaaaaaatcccatggccgtgccctcccttggaaaaaaaaaaaattctaggaaacaaaatacaacgacatctttttattttgttttttttcggtaattatactaaagatgaaaaactcataataaacatctcccagtccccacctgctaacagtaattataatagactcaacaataaatggtaaagcagggcagagctgcatctcgggaattctctagggcatgtggattagctcggaaagcctgaatgattaaaatacactaattaaaattttgtgttccttggtaactcgtctgcctgggcccctggtgttggcaaaatgggaattaacgtgacaaaagcaacacagagggtttttgttttaagtaaagaaaaaaagagagagagaaagagagagagagggagaagggaagatctatataaacaagttagacaccaggagagaagaaaggcaatgtggttttctctctttctctaaccggagcaccacaatgtttgggggtggaaggtgtatggcacagtccatgccattaaggagagggccctttacacctgccctggggtgccacggaggatctgaggagcatgcatctaggggtcactgtttaaaaacaattactggagagaagagggtgggagagagagaagtggggggccacaagggcccacccagtccggctttccagaggcatcccttgagggcggccacatactctcaactccccgccccatgaccaacgggaccctgggaggacgcaagggagcttctaccccattgcagttgcacaaaagaaattgaacacttttgagttgcccttagcaacctaattgcatcagtacattgcacacaggagccaaagtaactgaattttgatgaaaagacggcggtaatttacggcatcacaaaattagttgtcatggcgacgggttaattacatctcaaattaacaatgcaagtgtggtgaaattaaatataaatcatattttctgcataaattataggggttgattagaccggggctctgggagagggaaaggttgagccgccacgggccccaagctgcattctgagctgacgagagaggcgcctgcaaacgcaggcgaggcccgggagctctgggaggggacgggggactggcggagtcaggcgccagggctgcctccctctgctcccgctgccacttgcaggctcagccagctccacgcagcgccagggctgtccccaaagtttggatcaaactttgcctgggggagggggtgtgctgcaggaaggagggatggctggtgcctcttagccaagtgccacggacagaagttttgcctttacccatcccaaatgactctcccggtttctgtgccctgagctctcagagaacccaccacagatggccagctgaaccctcagttccttcggttaaatgaggtcaaatgcttttcaagtcacgggcatctgcctaccaagggacaggcccagtgtcatctgacaggccatcagtgcctcgctctgggctgcaccaaggggacactgggagttgtaggtagtcagggagcccagaggcagtggcttaggatcaggggcagccccaggcacatcaggttgaaaatgtgctttttcagccagctctggtcaagtagctgccctgcggacaccactctctcctacccaggggcagggcagtttgacctccttaagacagggggagaatgcagagcattaaaggcagaggaaaccccaaagatcactctgtcctgcaacagaccaccccaagtcatgaacgatgtcccagtggccacacccaaccccacccacctgttgctgatgggcggtactggcagcatttctgggccctgccacccaggaccactgtgccaagttcagctcagtctccaggaacccccaagccaggcagcttcaccagaatgcccaactgatggacgcttcagaatcgcacctgcctccctcacactcctggtccccatcactcaggtcctagagaacacacacgtaactctgggctcacggtcagcatctgccacctggacaaagggatcagcaggcaacgagacgggagctccagaccttagtgagcagcatggcactgagaaccccgaacccggggagtcctcaggcccctccctgggatgttctgatcccgtgagtctggatggagccgggcttgttgtttttaacctgctccacccgggattctgatttgggcagtcccagacccacacttaagaaacgctggcaacactgctactaatcccattttgcagatgagtacatggagtccagcaaagcgtgatcactccccaaaacacacagggcagagcggagattcaaacccaactctgagttctcattcatcacctacgaggcccctctctcaaggatgtgtcgggcaccatgccaggccacgtgggaaataaggacgagtgaaccaccagcttgtccttgaggagtacacggtctagtagcggacacagggccagttagacagccacagccccacgtgtccaatccatcactgaaggacagggacgtgggaggaactatggggacaaggggaaggcagggactggcacgcctgggtgggaggtgcccgggcctgcaggtgctcctggggccgtgggctgggctgagtgcccactggagctgtgccacacttcacctggcccaggtgggaggaatttcctgaaaggcttctgcagagagggggagaaggaaggaagagaaggcccttggcagtcccctgaccacggatgtacatgtgcagttcatgaatatttcagtggccatttatttatccctgctccatccagctgctggggccacagaccaaggtggataaatatagccactgggcgatcaatgaggcatccgctccccacccagccacatccattaggcccctcgttcccacaacctgctggctgggcaccttgtcctgctcaattggtttccgattttcattagcggtggaggcacagccccgctccaaccctgggcgtccccctcaccctcgtgggccctcccctctcaggctgggcatggagcccagggctgccgtcagcctggaggggccttcagaagtcccagcccaccggagcggtgaagtgagagaggacacagaactcaaggaccagacctcacgtcctggctgccccgctggagggcagagaagtgggtggggtttccctaggactccagccacccacacgtgacccaccagcgagcacaatctagacacagaaagctgggctgttgtttgcataccctgagatatctgggggacctcccagacctggaagaagggtgcccaagggagttacatggctgtaagggttggggtctgtgggctgccacgggggaccctcagctccattagcctctcctactgcctgcagctacaagatcagcacaggccacccgggcctcccactcaccaaggccagggcctggccccagcctgtcgcccaaaggagcgacagtgggccgaggtgctcggagggctgtggatcagcccggaggccccggcccactccaggcctgctcttcctgccaggctgaggccatctcgggaaggctgggcacagccctgtggggcgctgggtgcagtcaggcagtgatgctggggacacaagctcagccctggtagggtcccagtcccctttcactcattccacaaatagtcactcaacacccacaatgtgcctcatgttgtccaagtgccggtggggcagccccagacaggacggctgcaggtccctccttcgtggagtttacccttggcaagggtgggggtggggacgagcaatcgagcaactaataaatgacaactaatgagttctatgaaggcaataaaacaaggagagtgacagggactgaccgagaagagaggtggggctgcttcagctacctctaaagaggtggcctttgaaccagagacccaagggaacagggccgcctgggccttccaggtgaggaaggcgggaatggggagcccagaatgtctcagtcccgggacgctgacgcggcaggaaacccggaaggacgcagagcaccccacccaccccctccttttggtgccaggtggccaaaggcccaggccagtggctggcaggacgggtgcccacagcaggccggggaagggggaggacaatggctggcagagaggccacctgcctgctggctgtggacacaggctcctcctccagagccactgccaggataggccaggtgggatcctgcccgcacaaggaggctgcagggccatggggcgacctgggccagggctttctccagcccttcgaccccatccaaaccagcttcagagaggcagggcctcgacccaactggccctttgcagggaggacacaaaggtggggctgaaggtgagaggaaaagatcaagcgtaaaccccacagggagagggggaggagagggaggcaggcctgtgcctttaaaagaattttcatttaaaggctcttctctcttccaccatttcagtgatctatatgcaaatatgctaatgcatgcaaattaagacaccacttttagtcccaatttaatagaaagcattaaaataccattttttttttccaaaaaactccatatgcatgaaggaaggttttttttttttttttttttttttttcacttttcgctaaagtcacattccggcagcaattttatgctgtcaaaatgttctcaacaaggggagatttgactggcttctctgagaaccagtcataggaagcttgggctctgcttcttattgagttcttttttaaaattttgctgggggtccgggggaagaaggaaaaaaagcaacaacaataacgagaaacaagtcacccaggcatcttgtggagggtggctgctcttttcaggccggcggccagtccccgggcgtacagcgtgcggtgcaacctgcagctgcgggacgggtgcattcacgaggggggtgtgtgcgcctgggggtcacccctgctgtctctctgggtaggggtgcaggtgaagctcacatgtgccactctgtgagtgtcaccgcgagggaaaccctcccaggggcccgggcccagggtggccacggtgaggaggaggaggaccacatgcgcagggaagggcatggggcacagcatgtgtgtggcccacacaagggcggtctgctctcactcccctcgctgctctgtaattaagctcagctgcgcccactcaggcttccagacctttccctgagccctccgccccccgggcccactccccgttctcccagccttgctggctacttccactccccaaagagccttcaggggccttcttgtcgttgatcaaaacaacagggccaccagctcctcaagagtccaagctatagtttggcccaaatgtcccggccagggtggctctgtgtcaaaggccctgcagctcctccctcctgtttctctgggccctctctttggggttctggttcccgattaaaccttgacctctctagcacatgccttttgccacctcccccactggtcctggctcttccttccccgctgaaatgagttgaggctgagacctgggaagccgcaaggtgctgggatcccagacgagtccctcctgaaagggcgaaactcagtcgttcagggagaaagggaccacagccaacccaccacacaggtggagcccatggacaaggtctcattccagtggcccggtgtcacagcgtgtcctcatttgcagctaggatgaatgccaattaccaccaccccataggaaagctgcccccctggccagcaccagcccaggcgcctgttaggttttagttcactcactcctctctgcaaccccataggatacgagttaccgattctatgtcacaaattggaagagtgaggctcagagaggcaaggccacttgcccaatgtctcacagtggctcagtgtcgaggcaaggcctgtgtatcttccccattcccagaacctgctggaagtcaagggcagcacttcaggccccagctctgccccgttccagtgaggaacctgaagccagcacagcccctcccactaatccatgcgccccagcccgggcttcagctccacatctgtataatgggagagtgaggtcctggggatctatggctccttctggcttatgcctgtgtaacagatgggagagaaatgaagatagggctgagggtccccccaagccagggctttgaggcagtgtctccccagggcagccacaccatggtggaggccctgaaggcaacaggctgggaggccaagcagagctcagaagaggtgggagagaagggtctagaagcaggaggtggaggaagagaaactgcaaattgcgggtaggaagtgcttagtaaaatcagaaaaatttcagggcacaatcgctcatgcctgtaatccccgcactttgggatgccaaggcgggtggattgcttgaggccaggagttcaagaccagcctgggcaatacagtgagaccctgtgtctccacaaaaaaaatttttttttaaaattagctggttgcggtggcgcacacctgtagttctggctccttgggaggctaaagtgggaggattacttgagcccaggaggtggaggctgcagtgagctatgatcgcttcactgcacaccagcctgggcgacagggtgagaccctgtctggacaaaaaaaaaaaaaaaaagaaaaaaaagtctaaaaaacacttagattttttttttgacagtcttactctgttgcctaggctggagagcaatggcacaatctcagctcattgcaacctccgtttcctgggttcaagtgattctcctgcctcagcctcccaagctgggattagaggcatgtacctccaataatttttgtatttttagcagagacggggtttcaccatgttggtcaggctggtctccaactcctgacctcaggcgatccacccacctcagcttcccaaagtgttgggattacaggcgtgagccactgcgcctggctctatattgggctttaaacgacatgagggcagggacttgttcaaagaggaaaacagcaaagcaaagcctggaaaagagccaccagcagttgtcctgggggtgggggcggcagggcacagggagcagacacaggtgcacacaagctccagcactggcccaggctgagggtgctcagcgcacacagctctccagtaaagatgagcatgggcagggctggcgtgatgaggctggtctagcagagctcacggtggaaaaaagagatttagatatttacgggaaatacatttgttggtgccaaacccctggttttattatccgggagaaaaacaaacccaaccaccgaaactcaccctcaactgagaatccacaaggagggaaacaatttccccatcaaaccagttttattggatataaatatctaattattcctactaggccctggaatgccagacattttgcagcttttataacatgtgtaggagtctttacaaacgacttttatacatatttatatatatatatagttatatattaacaaacctgattcgaatctcatctgaattattttttgcttactgggcagtttgtgcgtatctgtgtgttttttcccccaaagccaggagagatctagaacattttggtgctattctgagacctaatgtgcctaacccagcaagcgccgagacacggacccctcaccgcttctcacgtgcccccagccgcaaccccaccacggctgctcggtggttccgagacacactggctcccagcactttgcaaccacagggtccacggctgcaagtcaatacctcacccatgacatgaacgtgatgtcccaaacagacagaagcattgacttctcaaacatcaagcacacgattaggcttcatgccaccccggtgtccgcttttcagaaagcaagaaccacggaggaggacaaagagctgggcagaggggcaggaaggcgggagggggcggaggagaggggaagttgtcttgcagggaataatgtggatcaggctgtcatctggagacccatcttcatctagaattaatgcactaaagttattttgtttttcctctaaatggttttaaagagacagtgaattctcggctcggacgcggggcttggtgtgtagctggtccaggctgtgtaaagtgaacaggcagagattccagccaggcctgagtccattctctccccagtccctggcctggcctcacctcctgcccatgtgctttctctcaacttgtcgcagaaaacaaagtttaagatccctgtctttcatggctccccataaaaaggctgaatctagaagtgaagaacttgaaatcctccagtcagggtcaagcccttatctgagcgcattgaaaggaaggagaggaaggggaatgggttggtgaggagttagaagcctctggccgggtgtggtggctcatgcctgtaatctcatcactttggaaggctgaggcaggcggatcacttgaggtcaggagttcaagaccagcccgggcaacatggtggaaccctgtctctactaaaaatacaaaaaattagccaggcatggtggcacacgcctgtaatcccagttactcgggaggctgagatgggagaattgcttgaacccgggaggcagaggttgcagtgagccgagatcacgccactgcactccaacctgggcaacagagcaagactccatctcacaaaaaagaagaaaaaaaagcctctgagcaagaagcctgggccagttcctgggggtggagcagccccctgaaagcagtactgaaagagagctcggggagtattcccaaagccagttttccccaaataggagtccctatggtccctgaagctcaggcagggcactagagccctcaggacagaggggcagaggctgggggacaggaggagtctggggcataaaccggagaatcccaggggattctgggcgaaatcagggtccagttagctgtcccttgaggcccaagaggccaagggagacattcaagggtgagtgatatttggggagactctagcctgaggctggctgtccccacggtcggagaaggagactacatctccaagtacccccactcagacccatcggttcatggggagaaagggctcagaatgaaggagagccctgggagagccctgggcctccaccgagaaccttctaagtgtaccccggcatcctccacgtagagacctgtactcagggggatgggctgggggccgggggagctgagaacaaacagcggcaacaggaacagagttgagccatttcaattattcatatgccagatggattcttttcctgcctttttttttttctataaaaataaggagggagggagtaggtcttatgacagtctccaaaatgggggggcggggtgcggggggaggagaagagggaaagggagaaaaaatagaaatccagtgccctgtttgtgcccctctccagccttggagaaccccgatcccgtgacgggagggcaggcgggatgggagatgtcttttaggtacccgatgagcagagagcaagaagcgagggaaattgttgaggaaagggagggagggagggagagagagagaggagcggggagcatggggcggcggggggaggcaggcagaagagggttctgaccttctgtgaaggatataaaaaatccagccgcctcaggggacacccaactatctagcatattgctgttaaaatgtctgcaaaatttaatacacttggcataccacctaatcagtccttggaaactcgggcactctctcccccttagactcaaactgcttcagcccttacgcctagggtactcccaccccgaccctgccccctgattttagataaagttgctccctccccacccgtaaaaacagctgctgtggcttttaggacacatttaatcctgaaacttgcccaaagtccagaattcagtttctaggaagcaggtggcatggtaaagagagccaagggtggggtcctggggcgggaactttggtaccgagacttcttgggggtggggtggggggcattagcagaagagagacacggcaccacgagcaggcatgtcctgggcaccacgagcaggcatgtcctgggcaccacgagcaggcatgtcctgggcaccacgagcaggcatgtcctgggcaccacgagcaggcatgtcctgggcaccacgagcaggcatgtcctgggcaccacgagcaggcatgtcctgggcaccacgagcaggcatgtcctgggcaccacgagcaggcatgtcctgggcaccacgagcaggcatgtcctgggcaccacgagcaggcatgtcctgggcaccacgagcaggcatgtcctgggcaccacgagcaggcatgtcctgggcaccacgagcaggcatgtcctgggcaccacgagcaggcatgtcctgggcaccacgagcaggcatgtcctgggcgacaggggaacacagtcccagatgggcgggcaaggactgtatgtctgggtagccagcgagagccattcatcctgacagctcttatttaaagagctgcctggcacgcaggagagccgtgacctcaccagagcacacaggcaccccggtacacggtacacgcagacgcatgtctgccatgtgctccgtcaatccacccaataccccctaagactccacggccactccaagtccccagcaaccggcgaggaagtttccagatgagcctacggaataggccacctgaccttctagccccagcagagcaatcaaagcccagtatgacctggatatttttggcaggtcaccatttgctttgcttgacaaagaagatcccacagggctcctaagtgggactgggaggaccgatccccaaaagcttcaccctctgccccaaggaaacagagttcttaccaaattttctttgtccttttattttgatttcctcacctctgactcacatgaagtctcgggtggccttaattaggtctgaagtcccctaagagactcagggaaccccaggcagcctgcatcatgcctataagacagaggtcagatgggacaggccaagaattggaagaatccagtgtgttccccaactgcgagagtaagccacagtaccagggacacgaacacagacagcttcttgaccttccttgcccttcgccaagtggattgaaatagaggcaaacagcaaaaggggactcaagggggtgtgggcagggccggcttcctgggtgtgcaacccatgcagccacacagggtctcatactcaaagggcacctgctgggttgaacgtcctgctgtcagtgttgtgaaattctgaatcaatttagagcaagaggccctgcattttcattgtgcactgggccccacaaatgatgtcgccagtcctgggtgtggattttggaagatcagacgacctgggtttgaatcccaatgctctgtcccctctaagccaagagatatcagaaaagccactcattatctctggccatagggcacctatggccctacgggtctagaagatggagtgatcacacctgctcacacagaagctgggagaattgagagggacaaaaacggggaagagccttgggcacatgatcatgagctcctattcaaacacaaggtgtggatcaagaggggaaaaggaggcctggtggccgtggtgctggcttcctcccgccctgggggatcgccttactctgctgggtgagaggtctgccactaagcagtgcagagggaagcctgtggcgtgcccggcccactggccccattcacaggtgaagaaactgggacagagtcaacagatgacctgcctgtcgtcatcatagagtggcctcgaggcagggcgaagctgaggacatactgttcccgctgtccaggcctctgccttggccacaggacacttgagatgaagagagtgacaaggaggcaggatttggaagagcggggagggaagggcctcattacactccatcactcacacgtgcgcgcacacacacgcatgcacggcaaaattaaagctgagaactcggccaaaaagaaaaatcctacccctgttccatcgaaacttattttagggcaggaggtaattgccaaagatccaaataaaaagccaaccacaggctgtaaacggctccaagtctttaattagaccccaggaaaaaatagtggcaaaaagaaaatgaaagtaggagaagctcccagaggaaggagtctgcgcgggatcccttctgccttcccagccccatggcttcagatgagggcccccttgcctgggtctggcatcagggttgtctgctaaaaaggctggcaatgcctactgctggaggcaggtgcagaaccaagacagcaccttgcaccccaaccaagggccagcctggacccgggaccttctcctagagccgtcctagaccccagcccatgtctggcctcatgttggggccaccacagggcagagggacagagcggagggtgagctttttctaccacccctggaggtgagagagcagggaaaagaaaaagctcagatctggagtggcctttgacccactggaaagtctgcccatcaagccaaaagccctggctcctgggccatggagcaaaggatgcacatgtcaccttccccactcccaggagccgttttccaggctcccactccctgccccttctctagggcccatgtggggttgggtagctctgagatcatgtgggcaagatggatgaccccatggcttctcccctcatagcccccgctaaccaggagtggacgcccagaagtccatggagtgacaaatggcatgtgatggccacccagttggcagtgccattcccctaacgcaaggtaagcacacacagaccctttgccccaggaggctccagctactccaccagctacccccataccctctgagcctctggcccttggagacataggccacctgagactaagggtggggctgggaagcaaaggggaagccgtccttgggaaggtggggtctgcagagagaggcagggttctgaatacgctcatctttcgtagatgcaacccagcagacaaaccaaatcccatgggcagggattcttaccaagtgctaagtctagcacctgccaaaccgtggcggaagcaatggctgccattgagggtctaacagtggccaggtcccagcggcagatgaaaggcgttccacccagatgtcagggaagaaccctggagtagaacacatctcagcacacctccagtgagtgagcagaagctgcagtccctgtcccgggctttgcagagtggggagaaggtgaggtgggctcagggtccctaatcaaagcccagcccatgtgcaagaaacgggaaagaacctgccttgtgacatcaaaggctgacatcaaaggctgcagggtcgaccacactgaagacccccactctgctctcttgtgggtcactgcagctgcctggaattaggggtgtctcaccacacctagctccccctccagaatgagcaatcactgggagagggtacacagtacactgtgctcacctgcctgactttttttttttttttttgagatggagtctcgctctgccgcccaggctggagtgcagtggtgtgatctcagctcactgcaagctccgcctcctgggttcacgccattctcctgcctcagcctcctaagtagctgggactagaggcacccgccaccacgcccggctaagttttttgtattttttagtggagacggggtttcaccgtgttagccaggatggtcttgatctcctgacctcgtgatccgcccgcctcggcctcccaaagtgctgggattacaggtgtgagccactgcgcccggccatgtgctcgcctttcaaaggctccctgcatccaactccccttctaagcctggcagaggagaaggtgattgccaggcccggcctgtccttactgctgcagcagctactcctgggcaggggtggcaggccgagccctgtgtgtataccatgttcttcacctatcctgggcaggggcggcaggccgagccctgtgtatataccgtgttcttcacccatttcctttcccgtttctcaaacagacgttagcgacgacaaattaggagtgggcctaacagtgacagaggcagcagtgacccctcactcagtacctaccaggtcccaggtccggtcacaggcattttagagaacgcatccctgcaaagacgatgctattgtgcccattttacagaggagtacaatgaggctaagcttgcagagtgacggccatgtctataaaacagtgggtctgaactgcaactcaggtcagcctggttccagagcccatctctctccatggtacctctttctcgcagtcagctccccgacctgaccactagttccaggcaggggcaggcctggttgccccttcaccactgcttgctcctcgtctggggtctctgaccactggttttatgcctgtagagtcacctgaactgtaatgtaggtgacagtcataaactccacagtgtctccaattcccagccacccaccatgccctgccatgatggccaaggcccacgtggccagagcaagcatggaggtcttctcggcagaagcagcagatgcgaatcagacctcctgaggcagccctaacatcgccacgtcagtctggtgaggcctccctgccaggtcccccaactcgcttctgtctttgggggtcaggttgcaggcatcaggatgagacgtgggattcctctttgatgaggagccctgcggctgctgcgtcccagcttccttcccagcttgggaatgggttgggagaagcagtccggggccctgcacagacagcaggagccctgctaattaatgagctctccgtcttccctgagtgctcatagacacagccagatggtctccacgacatgccctccaccctgtccccatcttgcaaccacatggcggcttcacattccaccctccctccatctttcccccctattttttttttttgagacagagtctcactctgtcgcccaggctggagtgcagtggtgcaacctcagctcactgcagcctccacttccctggttcaagcaattctcctgcctcagcctcctgagtagctaggactacaggcgtgtgccaccatgcacagctaattttttgtgtttttagtagagatggggtttcaccatgttggccaggatggtctcgatctcctgatcttgtgatccacccacctcggcctcccaaagtgctgggattacaggtgtgagccaccacgcccggcctatctttccttttatgctgcaaacttcaagacagccccatttcccccttcagccaggtgtggcccagacagccccgaatggaccaggcgaatacggagactcttgtagcaggaggttctaagtggggcctcttaatctagacaaggttccagtttctcttcttactttcagccaattcggctggggagctggggttgcgagaggacccagggctgagcgtgcccctatttcttagaagtgttaaaagatgaccttacatctaacaaatattaatactgacttataacccccaacaaccaaggcctggctgctccctgctccccagaagggcaccgagtagaagttgctccaattggaagcacaggctcacacgggtctccggagcatcacagacacccctgctggctctctgttggcacctctgggtcctaggtggagtggtggcttgcaaggtatataactgtgccctctggacagccggcctgtgtgcaggcagcttgcctagacaggggcattgcatgacgaactggcaggggcccgggggcagggagagtcaggccagagccatggctctgagaaaccctggcacacgtgtggcccaggagccagggatgggctcttctgcaatgagttctgtttcagggccgactgcacaatgacagcagcccgggggttgtgtgacatgaggcctggctagtgacgctgctttgcttcgattttcttttcttttcttcttctactttttaagagacggggtcttgccctgctgccaaggctggggtgcagtggtgcgatcacagctcactatagcctcaacctcctgggctccagtgattctcccacctcagcctcccctcccaaataggtaggactacaggtgcgtgcgccaccacacctggctaatttttattttttaattttttttttaagagatgggagtcttgaacccctggcgtcaagcgattctcgcctcagccttccaaaacgctgggattacaggcgtgagccactgtgcccagccctgcttcacttctctgggcatcagtttgcgcacttatagaaggaggctgaggctgggcgaggtggctcacacctgtaatcctagcactttgggaggctgacgcaggtggatcacatgaggtcaggagttagagaccagcctggccaacatggtgaaaccccatctctactaaaaatacaaaaattagctaggcatggtggcgcgacctgtaatctcagctactcaggaggctgaagcaggagaatagcttgaacccggaaggcagaggttgcagtgagccaagatggtgccactgcactccagcctgggtgacagagcaagactctgtctcaaaaaatatatatatataaatataaataaaataaaaaataaaaggaggctgagctggacgctcctggggtcactggaggatttgagagctgctgcgtgtggagtgatcgccaagacaccagtgagcacatggtgagcaccctgtgcatgctggctgcgattgtaactgtcattgctattattattattaattattattattattattgtgactctttgagtctgtaaaccttgtttcagatgcggctaaaagggaataggaaagatctgagcttacaacctagaaaagccacatttcctaaattattaatccccagaatcaaaaccagtgaggacagggtgacaaggatctgattagaggccctgagggggtctggccaggttttgtgagctcaagtgacccagacctgcctggcctagaatccaagacacactgacctcagagtagccgacagagggcagagaagccgacaggggccagaagccgacttctggccccatcttcagggggatgatctttagggtgaggcatatttatttagggcagcaagggttaacaccagggctgggagaggccaggcagcacggagcactccctgtttattaataagctatttatcaccagctttgcttttaatgccatttgggcttaatgttgttaatgaaatataaatacccacgctaatgatgttggtcagaggcaacacgggcaggagctggctcgagaaacggggccaaaccaccgggcaggctggggaagaggctgagagctcgggaagcggaagaggttcccactcgtgcggcacccccggcccccttctgctcacaccacaagatgccctggctggctgtgccgggaaaggctgggaggagggcagcccagggggccagggcagaggaggcctcccagggcacaggatgctgttaactcctagagaacagagccagagcaaagagctcccaccttggggcactgcccgcctggcatcaagctccttggctgcaggaggctggacctccaccagctggcagccctaagctctctgtccacaggaacggatctaggatgtgaggggtcaccagagggagcagtaaggaccccatcaagctttccactccagactggccctcccctccctgcccgcagtgacagcccaggcaggccagcaccctgcagggcacaccctccccaaggagctagcacgggctgcccagttggggtgggcatggagagggcagcagacggggattcttgctcagtgcccaaaggtcctggaacacagaggtggccctgcatagcaggctgtcgtccctgaccttgtgcctggcctggtccagcccctcctacacagtgggccatccctgcccacctctccctgggctcagaacagatgcccttagcggatggtcatctttccaaattaccccagaaacttcaggtggcctcctctggagaggcccctagactattcctagatagcagcctcaccagggaaggcggtcctggggaattgctccccagcctggtggccacagatgtccctgtggggacttagactcgattcacccaagggccacctgggcccaaatacaggttgggagactccagcaagtggccggcgtttgcctccatcctcctctccctgtactgtgggagtggaggtcatcgtgaccccagccctgccttgcttgcaaagtccccaggcagctccccagggagtgctggctcttccagaaggaggtcccagctgccctggagagggagcccccctagttgccagccctccctgcttagggctgccagagaaaatacagtatgcccagtgaaatgtgaatttctaataaacaatgaatacggccaggtgccgtggctcacgcctgtaattccagcactttgggaggccaaggtgggtggatcacctgaggtcaggagttcgagaccagcctggccaacatggtgaaaccccgactctaccaaaaatacaaaaaattagctgggtgtggtggcgggtacctgtaatcccagctactggggaggctgaggaaagagactcacttgaacctgagaggcggaggttgcagcaagccgagattgtgccattgcactccagcctgggcagcaagaccaaaactccatctcaaaaaacaaaacaaaacaaaacaaaaaacaatgaatactattttcatataagtatgtcccaaacattgcatggaatatacttatactaaaaagtccgtgctatttgtgtgaaatttaaatgtactaggtatcctgtatttttatttgctaactctggcagccccgtcctgatgactcagcaggtagcccccggcaggggggtacagttcctacggggtgagcaggacagaagaggcagtgagggggagtggaggtccctgtccgtctcaggacagcagattcttttcaagaggctcttctcatcactttctgccctgcccagcctcctccctcacccgtcactgctgcactgtccaataccacagctcacctgcgggggtcccctctcactgcaccccgcaaagtcacctccatgtccccaaggagcacagggctcatttgctggggcttggtggagctcagctcaacggctaatcccctgggtggctcctgtcagattattaattagctaaagcggatcggtcctggaacaacatgcgcttggacttcagataaagcaggccagggaggcgggtgggggtctgcttaaagtgacaagaccctgtttctgagcggctccccagaaggaccggggaaaggaggcccaggctagagcagggcaagttccagacagacccctctgtgccctctctgcccgctcccagatgaaacatcgagagagtgcattcaagaagggcgatccgggcacatatgcgacctgtgagaggcggagtcggtgacaggtgggtcttgttttttaataaagagcttgttcctaatcagatcatggcactcagaactcttcaaaaagcttcttatttcactctgggtaaaagccagagttctcacaatggcctgcaaggcctacgggatctgagggccccccaccctgaccccctcgacttcagatggcatctgcccctcactctgctctagccacgctggtctccttgcttctccaacacgcctctgggatctcacacctgctatgaatgctcttcctacagatatcgattaggttggctcactccctcacttcctttctgtcttcacccaaatgtcaccatcgcagtgaccccttccctgggagccacatctaaaatgacaaaccatccatccacctgcctctcactccctattctagtctgcaaagaggctcttgttttctccttcccacgcatcgccatccagcacatcctttattcctttttctcctgtatcatttggctccctccatccgaatgtaaacctcatgagggcaggacgttggcctcttcttcatttcgagcacctacaatgactacccacagtgtcgctgaatggaaatggaaaatgaatagccagaggtgacaggtcaggacttggaccaccacctcttccggctctgaacccctgaggctgagccctggcccaacccagtgggctcctcaagcatccagttcctctcccctgaccctactggaccccaggcttcctcagtcctgccccctaaaccaggtgctcctcacaccctcgtcctaagcattttcactaggatgcatttccagggtctttggaggggtgcccgaggggacccatctctgtgtcaccagacctcctccccgcagctgggaccgatcctctctctgcctggagagcagcacggcgtgggactcacagctgctgcccgggcccagctcagctgctggcaaactcctgggctcggattgttttgacttgagtcggtgaagctgaaatattgagtcacaacggccctaaacttcattaccagctcttaacacagattactaagggaaaaaaaagtcgcttttaattgcttttcccgattagcatttctggagaagaaactagtgtttaattacacctttcctcctcttaccccgttggccacgggggtcccaacccagctaccatagcaaggcccaggctcagaaaagcccctgcttcggaggaaagccaaggagccggaccagagagaaaactcaggtggtgagtggaaggggagcgacccccaggcctgaagggcagagagcaagcggcagtggtgtgggtgggaacgtggcagcatccaggggtcccgcggaaggtgggcagcaaggggatcactggccgcctcatgcctcagggtggtggctctgggcctaagggccttcacctggaccaggcttatccctgggtagattccagaacaaaagcacatgggggaacctggcaggagaccggagaggaggagcttgaaggtctacacgaggagatgatgcagtcaggactccgggactcctccatgtgtgagacctgacgtcgcctctccaatgccagcctctctcactgtgggcactcagggacagaggcagggcagaggcgcttctctcttcgtccaccacaccgcgtcaaccctcccaaatccacgggttgtcccatcctttggatcaactgcgtcacccgccgagaagtcccccgagtagctccagacagggcaggtgcccccagcccttcccaatccctcttccctggggcccgtgcatggcgagatgcggggttttcctgcatctgctccgaaggcagggggtgtggggagaacggaggaaggaggcccaggctggggttcggcaccaccaggtggaacacttgcccagatgagaaatcaggaagatcaataactcttcccagaccaactcccagccacatctctgcccagcccaaggcaaccttggggtctacccatcctctggagcaccacatcacggtgggaggtggggaaccctcctgctcccacccctctgcaccccccaccccagctgcaggccatggagctgccagcctcacatcagatcaaagccctggaggatggcatgagaactgtccagtccagttaggagtgaaggtcacggatctagtgcagaccatagaggcggaaagcagaaaaacctcccacgcgtgcacagatgcacacgcctcccacccggacacaccctcccccagggccggcccagtgttctgaggcctggcagacacgcccaggaagactggctgacacgcccctcggagccaggcagaggcaccagctgtaggcctgggagagccccaccactcccgcaagccgctgccagcctgcacttctgctctctcccgttgctgcctctggaggtcaggcctccagagcctccttacagggccaggctgctgtgccacacattgcttcccacttgggacatccccgatgcaccccccaccctcgcccccgcaagacatcaccggccctcccttcctgtcacctccatggaggtcaggtctccagagtgttcctggaaggctgggctggcccatatggctgggaatacgttgccagcaagggcaagtgctcacgcgagcccggcagccggctgtgacagcttcacgctcgccaaccaggcctctggcttgctccagggctacagggcagtgcccagggcggcatggggcctgtccaggggcgctggggatcactgctatcacagcatcgatgctgggactgcctgccccaacctggccctcacagatggtgtcaggacccaggagagtggagcctcatgtcagaggcactgggaaaagggagactggccttcaggcgagcggggtactggggcaattcacacctttgtgtgtggcgacactattaggatccctgccgatgagcagatgagcagcggctggaggctgagctgaccccatggaaatatgggggcttcagacaaacccatctgccagccctcacagctcaccaacgacgctctatatgacccggcacgtggaaaaaggtgtgcagaagctcagcccttgagcgcacagatcacattcaaagccacagtaagagaaactcagccaacttttagacccaatctcagacccagcacagaacccagggagcaaacacacaaagctggcttcagtgcagagccagggctgaaaggatagtgtgtgtcctggcctgctcccaggctcactcctgaaaacggtgtcggagagaagcagttccctccgcaaggagcccgacccactcaaacgagcctttctcagcacccagcatggttccaagatggcacttctcccctaatgcatgagacgttaaccctctcaaagccatgggtctttcttggtactgctgtgttcagggggcaggagagagaggagaagacacagagccacaaatccgcgggcacagaatgcttgagtcatcctggggccctctcttttccttgccccgttgaatccatcattgagtcctgctaactcttcctctatacacatacaggctctgaccccttccccgcctgtccacctcctcctcacccagccaccatcctctcacaccatcggctgcagcagctgcccctctggcctcccaatttcttcccttggcagccccaactacctttttaaaacaaacattggctgggtgcagtggctcatgcctgtaatcccagcaccttggggggctgaggtgggtggatcacttgaggttaggagtttgagaccagcctggccaacatggtgaaaccccgtctctactaaaaacactaaaattagccaggcatggtggcgcttgcctataatcccagccactcgagaggctgaggcaggagaatcacctgaacccgggaggcggaggttgcagtgagccaagattgcactgctgcactccagcctgggtgacagagtgagactccatctcaaacaaaaaacaaaaaacagaaaaccatcacatcactttacctctggctcaaaaccctccagcggcttcctatcacctaagcataaaatcccaacttctccccaggcacacaaagccctgcacctcctgacacccacctcatccacgtccccatccacgtcctggccactctgcctttctttccagtcactggatgcactgagggcatcctaccttagggccattaggctagctgttctttctttctagaatattctccagcctgctcttcactgatctgtccacttcctgtccttcaatctcagctaaatgtcaccacgtccttgagaaacctcctctgagcagcctgccaggagtgccaagcagtcacttcccaccaccacctcctacttccattctctgctggcgtcttccttttttgtttttgtgggtttgtttcacgctgcctcgcctaccagactccatgagaacaggggcggtcttgtccactctgtttgctggtgagtgactgacagacgccagaccctcttctctctctctctttttttttttttttttttttgagacagagtcttgctctgtcgcccagactggagtgcagtggcgcgatcttggctcactgcaacctccgcctcccgggttcaagtgattctcctgccttagcctcccaagtagctgggattacaggcatgcaccactatacacggctaatttttgtatttttagtagagatggggttttgccatgttggccaggctggtcttaaactcctgacctcaagtgatctgtctgcctcagcctcccaaagtgctgggattacaggcttgagccaccgcacctggccccagaccctctgtactgctggataaattcaaccagctcttctgcagaggagccagaggtggggggaatctgagccagacagggtcaggcctgcagaccagacctacgcacaggcttgccccctggtccacattggtgaggcaggacagctctgagaccatgggtcacccctgccacagaggacccccgcctgcagtccagcctggtcactggaaagggctaagtgaggagggacttggccatgatattctcactcggagcccgtggagttcccaagcttcattatcaagtccaagacagccgatgctaggatacaggtgtcccatcggacctgtggatcccataccccacaccaggtacaaatccccgcttgcatgacccctgggagtcaacagcgaatggaaacttcagaaagggaaaaacgaataggcgtgttttgcccaggcaaagaagaaaacaaaaaacccgtcactgagaacagagcaggcaaacattaccctctcagaggggagggggctctgcaggcactcacagcctcttcatgggcagggcacagggcagggctgggcaagaccaccctgaggcttgcatatatttgagcctgcatcccaggattcatgatcatcagaggaagcagagtctgttaagaatagcccgggaaggtggcagaggtgcaggtgctaacgccaagcccagaagacttcagcgccacgaaactccccccacggccttttccaggtgacagtctaaacagccccggtgctatccaggggacaacggcagcacatcctaagtacgacagaccaacttcaggagcatgatcaccttctgcacaccaggaagaagagtcgcagccacacagttgccccaccacagcgaccaaaggccacatttgcatctgatttgcaaatctctgggctgtatccagagctagttccctgaggaggcatggcctggattcaggcaggtctgcagcttcagggacctaccaaaccccagtgcgcaccaaggctcccgtctctgcaagcgcttcctccctgcaagttcgaagtccagggctgctgagcccagccccagagggaggggcaggacacacctgcccagagtgaccatggggaggaagagcgcaggcaggtgagccagggacaccggctccaggctggcacacataggaagagcagcccccggccctgccctccccagacatcctctaggccctcagcctctgcttccacccctagaccttgcccgtgaacttcgcaaacacccaatccctctggactggtttccttgggatctcaagaaagtactgaataatgaccagcatgcaatgagtcacccaatgtgtgtcaacccctcaccccaagaactgccacgtttgatacctgcaggtaaatatctgacagtaccagctccacagactacccctccctggcatgagtgacctgccttacgcaaagggctatttccaagcctgggtcaaaaggcacctacagcttctcctctatgaagggtcctatttgggccggaggaccactgaagagagcctgataaatcatccccaggccagctcctaccacatatgagcttacagcagagcagcctctggagatggagaaaggctggaactactgtccagcccttctaagacgaagttccaacctaatgcttagatctgggagtggcatctgatggagaatggtccttggccacaaagcctgggctgcattgttcaatgtcataccatagaaacactgggaagatccttaaaaggccagttatgctaacctcttcatttcacgggtggggaaaccgagatccagagagtaagtagtgagtcggtgacaaggccaaggcccaaatgcaggtgccctgctcccaggccagagctttcttctccatccaacacttttttcattttcactgatggtgcttaagctaccaccctcaggatcagaacccactgggaaaggtgagtctaggccctacatcgtccgtaccctaaagagcaacccccaaactggccaccccacacttcctagtggcatcttgggaaccggaagcatctacctttgcatcccaagaggccagggtccgaagtccattccaacacgtgctgctggggagttgcaggagccccttgtaaaggaggggtcgatggccgtggcagctgggagggcaggtgggatggaggagtctttgccttcagtcagcaaggtctgtttgcctgccaaaatgagacaggaaaacagaaaagatgaggctacaaccgacacccacaaacccaccccacactggaggacaagggaggctaaggttcccacaccttgtgtgataaccagccagccaggtaagagattctcgttcctgccagccaatcagcagatggcattgccacggcgcataccatgcctgactctgcaaccaacgcacccttcgcacaattattagccaatggctacgcagttgttgtacctaataaaagaagcaaacaggtagaaacaatactaggccaatcaggtgcctccccaggtaacacagaaggatcacacccaaggctgggcacccagggtgaaaggtcaggcctgaaaatggatcaagccaatactggaaacagatcaaacccatgcaaccaaaccaaccctgggctccccaacgcctgctccctccagactttccctgcgccagctcccagctgctcccctgacccctgggtggccttctgggagcctctataaaaggaatcaacaggtgtctctgcagcgacccaggatagtgaatttaatttcttctggctttccttccccacttccattctggtactgtgggactcaatttcataaaaagaaaagagggtgtgggcccttgccctgaaagggggctgctgagattcagttgcgataggtgttgggacaaaaaaaaaagtagccaaagaaagttggtgccctgctaccggcaacctttgtgtcaatttaaacaaatattgtggtgtttccatggtgattcctgttttgaatatccactacactcactttttaaagggcttttcctgtttgcgtttcaacttcaaacctgtaaatattttcagcatttttagaaaaaaggagctcatgcgcgtgcaaacacaaacacacaacccgatctcggcgtacgacctcccagccctggaagcccggcctcgtggatgtgagaatggggtgctgagaacccagagggggtgctcggtccgctctcctgcccaccctgcctgcggagctggcatcaggaagattgccactgaaatcccggccctttccttccccctttgcgggaagattgcagcagccacagcagctctgcgttcctgaagcgtgtgagcgggctgggccctgcctccttagtgtggcatggtgtgggcagctgccctgcaggttctccaacttggcccggccctcagagtccccggaggccttgcaggagtgcacgaacccctcccctcctgcctcccaaggttggacctgagtgcgagggggagttggctctttgaaggtgagagcttcagcatcagctctgccctacctcggctggggcaatgccaccgagaccagctccctgggggaggccatcaggggtggacagcatccactgtccaaggcttggatcagcccagctcccatcccacccctcggcgccacacagggttaacagcgggtttcctggtttccatggattcctgccaggcccctaatgtgagtttcgtgtgatttgggggaagtggatttcctttgttttccagtttgggaatatttttttctttaaaaaagaggaaaaaacactttaatggaaacttcagggccactgggagactcactcctctgggctctgaaactcccctgcctgttagtccagaatcccccaaagccctgggcagcccgtccacccacaaaactcccctgggctagaagaaggcatgccttggaccacctacactcctactccaagaatctccatctgctgggggtctccactccaatatcccatcagaacgaacccacctaaaagccagcatcttacacaggaggctgacatgcccctcttccagctttgtaaaacagacatgtacattccccagaaaaaaggttaagggaaacacatctacctccccaactccaggcaaggcgctggcaagaccaggggctgaccacaggccaacggtgaacactctcggtgtttcatgtccttggctcagaggaggttccagctatggaaggaaagggggctccaggccctggtgggacgctcgttgggcttcttccagcggaaagtggggcctgcccagggcagaggatgcttttcagctttggcagcaagaacaactgaataaagggtgtggccaggcctcctcctccttttcccccacggtcttccccattcctgccatcctccaagcctgccagggcgtggccttgctccaggattgtccccaaccaagtggcctgacccacttaccaaaccagggcacaggccgcggggccttccataaactgaggctttcccacagcccaggccccgggggccatggatcccggtcagaaagtgcagagcgcagaggccgggtctctgtgaccagcggctccatggtgaagaagtgagaagctgagtgagcgtgcttacagaaatcacaacgggctgagaaccaggagacgtgggtccgagtcccacttctgtccccgaaacctccatgggcccttagacaagcctgctaatctccctaggttccgtcccctcaccagccagacggagacgatgcctaagacttccctcctaccttgcaggctgcgcggaggatggacaagaggcgtgaaagggtgttaacaagcactctagaaatgcccagaatcaccaccaccctcttcttccaagcctcttcaaggtagccttctgaaatctaccccgggtggccccacacacccctgactctgctcctcctatatcctccaccacagcatttacatccatactggactaaagtaatttgttcacaagtctgtctccaccattggacttttaactcctcaagggcagagagcgggtcctaatgatctgcgcgtctccagcatctagcacaacagctgggccaccgtgggcagcgaaggtgtcggtggaactgaactagtccctgacttcaggtcagagtcagatgagctccgtgcagcttggcccctcttctccaacagaacgctccattcgctgttttctgttttcttttttgagatggagtcttgctctgtcacccaggctggagtgcagtggcgcaatctcggttcactgtaatctctgcctcccgagttcaagcgattctcctgcctcagcctcccgagtagctgggactataggcaagtgccaccacgcctggctaatttttgtatttttagtagagacgatgttttaccagattagccagactggtctcgaactcctgacctcaggtgatcggcctgccttggccttccaaagtgctgggattacaggtgtgaaccaccgcacccagccctgttggctcttttttgtgcccattctgtttagctcttcccaagcctcaatctgtgccttggtctctccttctcctccattagccctgtgaattaacagctctcaggtttaagggagccccttagttacttgatcccctccaaccaattccaataagaattggaccatgtgcctactatgtgccaggcggcaggctgggcataagggcacactgataagtggcctctgccccctgccaataggccaaagtgagaactcttggtatgaaccagtcagatgccttctatctgccaagcaccgtgccaagtgccctacgcacatgatctagccaaatctttacaacacaaaggcagaaatggttatggtccccatggatagattagggagggcgggcatggagacacgaagtgacttgccaaggatcataccatgtacaggtgccaaagccaggcctgggctgacaggctccaaggcccaactcacttaaaaggtcatcctgctcccctccctgtgatctctgcagccacccacaactgatgctgttgtccctccagaatctcagttctcctggcctcaaaacagttctggaccaagtcccccagagccaccaggcagtgctcacacgtcacaatgaaaggctcaggtgcttctggccgggctgaaaaggggggaaagcgaggcccatggtaatacccggcgagcaggatgaacccctgaacacatcttccaaatggggtctggactgtggtcatgcccattgcaacctgtcatctgacaggatggggacaaggaagccacctccatgctaagtcaggaggtcctgttgggacaggacaacttccatttcttctctccagataaggggaaagcaaaagggctttatctttgggggcgtggggcagggatttctgctgcctcccctacatcggaacctccccccacaatgaacatcagccacggagacgcgggattgggaagcagggccagagaaccccttgattttcacctgggggaatgtgggtacggggaggcgcctatcatctccctgcaggagggaagacactgggaagtggtagggaaagatttctatccgagagggtacgtggtggaagataagcccggggtggggagaggacagagcgctaatgagcagatttcataaaccacccgagtgaaaacaaaaacacagacgtgcacattgcccaactccagggctgtatggaaaaggaaaaaaaaaaaacaataaaaaaatccacatcttaatacaaaaatcctccatgatgtgttgtggcacgaaagtgtttttcgctgcatttttcatctgtgatctcacacggcccacgacgggtacgcccaacgcagcaggtattcgacggtacacaaacagggcagacacatacacaatgagccaaaacaagggcggccaacatgcagatcggtccaggctggcatctcacggcttcaggtgacctctggcaacggcctcattggacctgaacctgggaccctttagatttctgagggagagagagatggggcaagaacgcagctcaagtgcagagggctctgaattctcagaactcccagccagctgcttatgcggcctttccacacttaaggtactgtccactgtcctgctgccggcaggggacagggaggggacccgcaccccagaggcccttcctccgtatcactcaccccacagttactatctgtctcctttctgttccacccctcccccactttaattgttggatgagtttacagagctgtgtgccaaaaacaatcaattccagggaacagagttatacaaaaaagggcgtgtcgccagagggagacggatatccatggaaaccaccaccttttcacagcagcctaggtgaagcttgggtgaggggatgtgtgggggttggggagacatgctccacccagaacagggccccagaaaatgcaggggccactgatgatctatctgcaggaaccaaataccgtgcggagggtcagaaagtggagtcagtcacaaaacacacgttcagcacgtgcacacacacacacacacacacacatatatgccactccgccagatcactgggcaacatgccactgtggttaagcacacaaactctggaaccagactgcccaggtaggaatccaggctctgccacccacaagctgtgtggctctaggctaacgactttaacctttctgtgcctcagtttctccatcagtaaaatggggataaagatagttcctctgcgaaccgtcatgaggattaaatggcttcttacgtgtaacatgctgaggaaagtaccctcgaccaagtaggtcccctagagccaccagacagggctcagatgtcacaaccaaagcctcaggtgcttctggccgggctgaaaggtgggggaaggtgaagcctgtggtaacacccgggtaacgagcaggtacttcacagccccacaaagcaggtgctgtcaagcatttgataaatcaatcacaaagcctaaacaaagagaaagaaaggtttctagaccctgccacagtagaagaggaaaacgatactagttcatgtttattaagcattgtgggctcaggattttaatatattaatgcatataaccatcgcaaattaatatctataacctgcaatgaagtagatggttctctcaactggcgagtggagggttgaagaactgggacccacagagagatggggcccagccaaggtcacacactggtacatgatttaaccccaactgcctgacacctcctcacagcactgcttagtaaggtgggtggggagaaagcgagggagggaagggctttcaggagcttctctttctggactggccttagaggcagagtggtgggacctagactcgctcttcccaaacttcagaaggaaaacagaaatcctctgcgcccgttgactgctgatggaaggaacgaggagtggggaaaagatggggcccggtcgtccgcattcctcatgagttcctgatgggaggaacgaggagtggggaaaagatggggcccggtcgtccacattcctcatgagttcctgccccagtcctggcccaggagatcagcgatgtcctctgacccttccctctacccaggcaggcatctccagaatcaggaagtccctggagggcaggcagcagagctggggccccatctcccagcaatggaggcccaaagcctgggacgggtcctatttccaggtcacagccctgtaaacaacctgattttccgccttcccagatcctaggcagatccctggaggggacagggcgggggcgatgggagcacaggcttcccctattgcaaagccaggcccagggaggccgggaagcagagagccggaggagtcagcagctgcctgccccgagaggtttggtccacacctgctcggagaccaggcttggtggctcagccctttctgccatcgaccacccaaagtcattcagatatttcctctctcacttgctttttaaaaaaaatttaatgttctctataattcatccatcgcagaagataatcgatagagcccgtaatgaaaatctgagccatattttatgacccactgcaagcagaaagggccacatcagcaggtccggttgcagctccctgtctgtcttgcccactgccccggggatcacttccctcgctggccctgtccacagccctcggcccatgaggagggccacgaccctggcatcaccccagtcccccaacgcccactccaaccctagtcacaggagggtcacccaccattgcaaggtcttcctggagcagaccccagacctgggaccccagactccaccctggaatctcacaagtgtcttgactgagtcaggggccttccgggagctggaagaccctcacaaggagcgggaggcctgcacaggattcagggagccaggccagcctctaccatggtgcttcccatgaggcaggccgccctgatctcaggaggctcccccaggggcctccgggttttatcttggaccctctgctcagggcagggtgggtcattattgttcgtttgtttgtttgtttgtttgtttgtttttgagacagagtctcactctgtcacccaggctggagtgcagtggtgcaatctcggctcacggcagcctccgcctgctggtttcaaatgattctcctgcctcagcctcccaagtagctgggattacaggcacgcaccaccatgcctggctaatttttgtatttttagtagagatggggtttcaccatgttggccaggctggtctcaaactcctgacctcaagttagctgccgggctcagcctcccaaagtgctggaattagagacatgagccactgcacctggcctattgttcatttttactccctcaaccaaggccctcctctccctggactccagccttctggggtgaagggtgaggaggaggcatcctgggggacgggcaccagagtgctggggggagtggcccctcctgcccagccagagcccactgtgggggaggggaagcagagccctggcatcaccactgagagccaatcagccggccgggcttgctcctcccagaatccatcactgcctggcaccaatcagagagcaccacagggcaggtgccaggaggcagaaaccgctggtgaccaatcagagcccagaggatgcaccaacctcccaggaatgacaactcaagccaagctaggcatggtagctcatgcttgtaatcccagcactttgagaggcagaggcgggcagatcacttgaggccaggagttcgagacgagcctgtccaacatggtgaaaccccgtctctactaaaaatacaaaaattagccgggtgtggtggcggcgtctgtaatcccagctactcaggagactgaggcaggagaatcacttgaacctgggaggcggaggttgcagtgagcagagattgtgccactgcactccagcctgggcaacagagcaagcctccgtctcaaaaaagaaaagaaaagaaaactcaagccagtaagagaatgtgattcagccacgctatggaccactatgcagcccttaagagacacttagaaaagtgggggaaggttcggcgagaacactccagtggctgtgtgctggaggatgctgtcccacacagcagccactggccacatgcggctactgagcactagacgtggacaatgtgactgaggaactgaatttccaattttcttttactttaatgaatgaaagtttaaagaagctagaggcttggatagcacaggtttagatagataactcatcagtgtaaaaaagttaaatgtctattatcccaagatagtgggaatagtcattattaatgataataacagaaacagaaatagttaatttttttttgagatggagtctcactctgttgcctagctggagtgcagtggggtgatctcggctcactgcaacctctgttccccgggttcaagcgattctcctgcctctgcctcccgaatagctgggattacaggtgcgcaccaccacacccggctaatttttgtatttttagtagagacagggtttcgccatgttggccaggctggtctcaaactcctgacctcaagtgatctgcccaccttggcctcccaaagtgctgggattacaggagtgagccgccacacctggccagaagtaatatttaagggtgctatgtgccaggctcagtgctaagtattttatatatggatcattacactaaatcaaggaccagcctgcaagatctacgctatcagtatttctacttgacagatggggaaactgaggtttggaaactgagtaacttattcaaggtgatactgctgggtggaaaaccagggattataaccaggtatctctgtctccctaactcacaaaacacatttttaaattcttttcttttctctctcttctcttttttcttttctttctttttttgagacagggcctggctctgtcactcaggctggagtgcaatggcacgatctcggctcactgcagcctccacctcctgggctcaagccatactcccacctcagcctctcaagtagctgggactacagatgtgtaccatcacgcctgcctaatttctgtatcttttgttgagacagggttttgccatgtcacccaggagtttcttgaactcctgagctcaagtggtctgtctgcttcagcctcccaaagtgctgggagtacaggtgtgagctgtcgaacctggcctaaattattttctttatacttttttgtatttttcaatgcacatgagcataacttgtaatcaaggagaaaaaatagatttttaaaaaggccctaaaaggaggtaattccttttttcccaggagcagagtgtacggaggggttgctggggtcccagccaactgggcccctagctgcggggtggtgaaaggagccagcagtgcggtcacaggccccctctgtcctgcatgctcccactgcccagatgccctgcacctaggagccccgagcccacagaagatgctgggcctgcaattttccagcagctaggccaccagtgggacccagcttcctcccagccccaccccatcagttcctgacaggtttctctgcagttttgcaatcatcacctaggtctacatcttaaagaaggcagtaggccagggggccatctgcaaagtcaacccatgcctcttttacctcggatcaccctttcccactcccttccagaagagccagtgctttcaggataacgaggaacacagggccagcaacccaagccccagtcccgctgtctgccatggcacgtgcaaggagagacgtgcttttcccaggaggggcggtcattgcccccaagcatctcctcctgggattgcatctaggttcagaacaagggggacaaagacaattcccttgaaaggtcagagatgaaggcagaagccccagcaagtactgagcccagctagaaatggaggcagggaaagttcccagttgcgcctgctttttctccatagcgccaagctgggggtgcgggacagggagcaaccgccccacttggtctggcttctatggcagcttgtttttcccttgagaggcacagattgttctggtttcaggcaggttggggaggtgggggcgggggtggcggcaggataaatgtccttacttagaagtttttattattattattattatggatttttggttccccgctgtctgcagttctgtgtcatttccaatctaccttcagtttcccttggatttatatatttattttttggggttggtttcgggtacttctagtctatcaaacaatcagccctgtgaggtacgctgggtgtttccagaaattacatcacaaaaaatcatgcaattaaagtgtaagggaaaaaaaaacatagctgttgcttaattttgtattttaattagcgacttattgtaaacgtagacttttaaaatggaggcacctaagcaaagccagtaaacaagtttttctaatgaattaatttcacctctttcctcctcctcctcctcctcctcctcttcctcctcctcctcaccagcccaactgtcaccctccagattttctctgtccccttattttctattccacttcttgatctttgccaaacacatatgagaaaaagaacacccctgaaataaaattggggatgctggcacccaggactccccctggaacccgcttccagccttgatggtgaggatgctgactgaggacccggcatgaagttggctgctgcagccccttgtcccgtcccagcccagttagctgctgccaagcccctctcggccggcccccagggaactccccactcctgtctgtgccctgatctcagcaaaagacagagacaaaccgggagcggcactgactgccaaggcaacagtgagagggtggagccacgtgacacctggggggagcctgcaggaacaaggtgaggagacctggagagaaaggaaggcttgggctgttgtgaaacctaagacacctctggttgcctggaggaaggaggagaaggggcatgggtgggagaaagaagaggcagtctggagctagggagagagaagccgaaattagaagggtctgcccaggccacattgcagctgggagaaagaacacatccatcagtcccaggcacccccagagggctagacccaggccgccaccattggccacatgcccccattggtctagagttctgctccttcccccatagaaacttcccagcttcaggagaggaagcagattggcctctttcagccttgtttctgcgggggaaggctgaggatcaggagcagggtgtccctgctctctgcctagtcctgccatcctggaaagggcagacacatatccagatattctaccacatggaagactctgggaagctgtctctgccacacatgaagaatggataccactgggtgtctccaagtccctgttcactggaggagcatgcaggccctcctgtgaccccagaagctcggccagtttaacgagggcagggtgtccacctgagtgccagacaggtgcatggctcctccctaaagctgtcatctcctaagccaatgcagagacaccataaaggaacaggtttgcttcacagactctctcccagggcagaaccccacgctggccacttttactctgagcatgaagagctgtatgggtgggctcagtaagggctgctcctggcctgctccctcccacctcctccccctcgcctctgacttgaagcccaatctgggacctccgcctgccatgacagcaggtggccccatgaccacatggtggaggatgggggctcccgaaggctctagaacacctggtggcagaatcctggcccccactcactaagattcccaaggaaaggaaggaggggaggaaggaaggaccacagagaggaaggggctgggtgcccgtgtcatcgagcaccggtgggaacccagacccaagcccacgacagatcctgctgggtacagcttcaatcagaaaggaaagctctcatcaaacataggctgggcagggatgtgggcactgagattagggatttggaaaaccatctgaggaacctggccctgggaagacagcagcaggatttaataccttatcccagctgtctggtaaacaccctgaaccatccccacactccgttaggcagcctcggatcttcaggtgtgccggctacgggcaggtagagacagacgtgggcagagacaggaagggagggagtgtgggctgggggagggggcgggggtggagctggcctgggagggattggatgggtggcagccaagccagacagtcagcgagacagctgacaggtgcaggacagtgggacccgggaaggaaatgggcgagcgggggttccgaatcctcaggggtctcacgcaccccggggactgaacatggtgaggggaagggtcaaagtcttgggggcagaaggcctcggccttctagcttctcagcatacttggccgggggaacgcatggaccaggcaacgggctcccccaaaccaagcaggacaaggcagcaggtgggggttccagcttccagggcctgctgtggtcagaccagacagcagtctgtgtgtgtgcttgtgaggcaccctgtccccagctcacacacacacatcctatgccaaaaagaaaaccaaagcactcaaaatggagcgtccttctagtctgggctggggctgatatgcgctgagaagaggccgcagggtgggagcagccctgtcgctgctcagaggggcctcacctctccagagatgggttggggagagttcagagcagacgagtagacaaagaagtgtctgaaggtcctggcagctccctgtggtggtccggagcaaacctccttaactctgatcccagcacagaggtgggacctgagggagtgggcaggtgcctgcacagaggccaggtgctcctggggtcctccaccgccaggcccacaaggggcactgcactaatcctcttttcccatttccgtctgcttgtggatgtaattagagttttgggtggaaatccacccggagtgcaccctcccacctgacaccgtcgctaaatccttggatacacacggtatatctcctgactctcggagaatcgggaaccatttcaaaagctaaacaatctaccccttttaaatgttctcaactctgactgctttcggcagcacactgtcaaatctgccctggccttggccagggccaagttcagggcctccctctctgtccctgagattagggatttggaaaaagtcccaccaccagggcctcctgtgtagtctacagaggaaaagaagaggttgctggcctgttgcggggctgggtttagagtcctttgccttctgcacattctttaagccccgtgatcccaagaaatcccatccatagcccccccgatccaaaaggatcaccaggagatccagatggagcatttttctgctctattaacaaccacacagagctctggccccactgctggagactggcctgactcttgggtatctcccaccacctgagtcaacgcggacccctctcttccccaagtgtgaccctgtaggcctagaggaaccaccaggagaggctggaggcttgagccctccctcctctgtcccagcgccaagttccctgcaacccacaagcacagtcctgacactcagagctcccgcggtcttacagacaagggaatgaatccccacgtgtctcctgcaaccatctctgttccagcttctcttccagactcctccagtctctctactctggccctgccagaatcaacagtttaaatctctgcattaaacacacacacacaacaccccaacaagggagacagaatacaccgagaaaacctcaccagacctagggttggggctggaaaccggcgacactggctcaccatttcccccgcaccaggcagtcggccagaaaaccctgggcaatacacacggcagactccgccagacattagaacacttgttcggttccctaccctttggaagccaggcccccagtgcatcgctttgggccattgctgccgataatttttcagagataaacaaaccggtttggataaaacaagatccaacctgaattcttcacccaaaactcaaaatgaaactctcctatcacccctttcattcccttctccgcctacctataaccatcatccagttccctcaggttcagacgacttgatttttttttttcttttaaaaattcagttctctagcttttggattcatggacactacaatgtctgggaccattcggctcaatgtgaaggcatgcggggggattgagaaagtcccggccaagtttctccaggatgcctgggttggaagggagagggagaaggtgggacctcagctgggctggtttctggcctaggtctttttccctggttcctttttggctcaaagtctctcctccatgctccgatgatctcttcaatcttcagcccctttcaaggggacgggtgtgaacgggagcagagcagttggtctacctgccctctctaggcacagagggtagggttgctcagttacccttaggggttcaccaggttaatagaggcccgatgtcaggacaagaaggaggccaaagggccgagaggaaagatgaagccctgaggtctgtggccacgtgtgtctctctgccagctctgtgtgtgacatgccctcctacacctagactcattcatgcctgacacactctcaaccagcaccccgtcccacccaatcaggcccccaagtaccctcccgctgcagcctctccgtgtgatactgtctgctttctgccctgagctcgtctggaacctctgtcagggctcccgcctcccaagtccccatcagtggggtctgctcggtccctgtagctaatttacacccgtcagggtttaaaatagcagaggcataaatgaaaagtccaatttcttcaaatttgcattgtaaaaccatccttcaacttccttgaaataaattttactattttattagtgcaaacaaaatggtaataaaacactaatacagcgtcttgtatccaggggaagagctaaaattaacatagagcgagcagtgtttgctattacattcaattacctttttacttgagatttacattctcatccccttaatctccatagtagtggcttcaaaatcattcctcccaggctctgcccttcccaagcccccacagctggaagccaggcctcctgcccagatggcgctcaccccgggcatggagcctgcccctttctccacagctgcctcttgtcacagggtaccacttctctcccctgcttgtaattgtctcacgtcttggcctctcagtactcggcaagttcacaccagagggctctgacacgagacacatccagacaggcagtgatcgataagcaggtgcatggggcatgggttgggggcactgcccaccgagcctgcaaaggctctccctggtaccagctaggggcgggagctcctgggagtcctggggaaactggcatctctggtttgacaggttgtgggagagggttggctgcatggcacagctgcggactccagacggtggcaagaagctccagccatcctgaagtaggaaggggtgacggctctatgggggccaaccctcttgctcatcttgggaggtggctgcttgccagcgatggagatggggctagaaccacctcaccttctcaccatccagtgctctttcttcaacagaagcagtccctaaaaccagtcacccccaaacacagccccaccatctgatcccctaggagggtccctttacttcctgcaactggaggaagcatcattccatgtctggaaccggccagcctcaccctgagccagtggggaagatgaccgtgtttccaaatggctcaaatactgggtcctagttccagatctgtcactgactagctgtagggcctgcggcacgaagcaacctccctctgggcctcagtttccccacctgtaaaccaggacaataacctgtgagctgccttcttcacaggaagggtcataatgatggaacgatcacacaggtgtctctgagcccacccgagcctcggaagctcagctgggaatctgttcctgaggacaggacaaggaccgcagggttgggacccctatgaggaccacggagaggggcgtccgagtcctgggccaggccacctctgacctctgtgacttcacccttcacccacaagcctcctttctcttattggtcaaaccaccgcatcattcccacaaaatcctctgagctcatgcggaaggaagaattgccattcagccccggatccggccagagcacagtctcactcagggtaggcctggggcaggggaccaagtgatacgcgaaaaacagacggaagaccccgttaattttactctgcccggctactacaacgagggggaaagaagcgacacacaaaaacacaaccacacacacaaacacaatctcatacacaaccacttacactcattttcacacacaaccacacaccatctcacacacaatctcacacacaccatctcatacaaaatcacacacaaaaccacataccacgttacaatcacacacaatcccatacacacccactcacataatccacataaaatcacacacaatcttatatacagccactgacacaatcccacaaccacacacaatctcacacactctcatatacaatgactcacgatctcacacaatcacacaatttcacacaaaatctcacacacaggcacacacagtcttccacaccatttcacactatgtcacaaccacatacaatctcatacgcaatcgcatacacaatctcatacagtctcatatacactcactcatacaatctcacacacaatcacacacaatcatacaatttcacgcaaaatctcacacacacaatctcatagtcacaccatctcacacaatctcacaatcacaatttcacacaaaatctcaaacacaagcacaatctcatactccatctcacactatctcacaatctcgcacacaatcagacacactctcacacacaaccacaatcacaatctcatacacaatcacacaatctcacacagcatctcccacaaaaatctcacaatctcacacaattccacacaaaatgtcacacacaagcacacactctcacacaaccacacacaatctcacacttcacctcacacaatctcataaacaatctcatacatgatcactcatacaatctcagacacaatcttacaatcacacacaaccacacacatcctcatacaatctcatacagaatcacacaatctcacatagtctcacaatcacagtctcaaacacagtcactcacacaatctcagacacgatcacacgcaaaacgatttacacacgaacacaatctcacacacacaaaacaacatatgatctcacacacacccattcccaactcccctctcgcggtctttcttcctgaatctgattcctaaaatgtcttccagtggacacgaggaggagagctcccatccaaactgttcccaggcaaacgtgtccttgctcttgatccgtgtggaattccaagtccccctggcagagagcggcttctgggactctgggagggaagaatcttctttaaccccagtggaagtgcaagcaaaggcggttggcagttgggcgtgactgcccagaacaccagggacccgcctggaggtctctgctcccagcctgaccgctggctgcaaccctttctccctgggcccctacatcccacctcccatcacatcctagcccagaggtgggtatcaccaatagctctcctggcctgcaaacaaaaggccaagaccactgcaagaagcgaaggaatcaaccccacgagctaaatgtagggagtttgctttggttcacatttattttttccttcccactggtgaaacaaaagaaagtttgttgttgaggttcaaacatttcttgggccttgtccgagtcttaccttgtttttcttttcctttctgtctcccccccagccccaccccgtcttccctgcctccccaccttgaataaataaagcacccgaagctggcaccggctggtgaggaaagtacaaactatctcataattttataattttttttttttttttttttttagcacactggcctagggttttgggcaaaggacaaaagctattgttgcacagcacaacacgaaggctgagtcaccgatacgcctcagcttctcgagatctcataggtttctgtggctggcacagccggtgagctcagcgccctgcgggggccgtgggtgcaggcgccctctcgcctggcgctgccccgccccctcccccttgccagggctccctgccgggccgacacgttggctttgttggtttttaatcatagggggggaatttaaataaaatgttgtgaaataaaaaacaaatcaccgtagtcccaccaccctaacgctataattttcattttggaggatcacctttcaagcgttctacagaagcatttggatttttatatagtttctctcgcagcgttcacagctcttggcatttggtatagtttttcactcatataataaacatttttccatgtttcgaaaccatcctcgggatgataatttgtacaggtgacaccgtatttattccgtcgtgatattcctgggcagaccctatgaagtgagaaggggagaactctctcggaattgaatcgtttatttgcaagattccagccaaggtgggggctttgcccgagtgacccagatcacctggcccttggggatctggcctgggagtgtgtacctggaagaggggcagaggctccaccaacaccccgcccaccctgagctgggccaggagtgccctggcccttgtgcccagagagacacgggttccagcaggagccctcaccctcacggtgaccttcactccccacaaactgcacttcctccttataaagcgccctggcagcaaaaggcccacgacaacgctctgctctccatttttatatctgaatatctcaaagcacttagcaaagactgtcattttctcattaccccaaggagaggaggtcattcgggaaaatggtacaaatattcccatttgtcaaaagcaagaaggaagtgagttaaaaggaaaattctgccacttaactgagcaaaagctacccaggagagaacactggggtctcgcctgcctctccattcagccagtttgccttctccagtgcagtttcaggcacctcattaccaaaaagatggctcagagccaaaaccaggtttccattttgccaagaatcaatccctccccggtggccccagctcaggagaccctcctacctcatccaaagtctcaatcaaaaccatattcttttatgattatagttatgtaaaatacatgtttaataaatatatacagtcaccaaacgggggaaaaacactagacagaaatacaccagatactaaacaatgttgtctcatgatagttaagttaggggtgcatttttttccctttgatctattttcaaaaactgtttaaaatatggttctatttttccggtgcatagggaaaagcgtgcatttcagagtcagatcaaccagcgttggaaccctagctctcctttaatgagctgagtgaactcaggtaagtgactgaacctctcagagcctcatttcctgccaggtacaatgggaatcgaaccactgcttgccttgtgtctttcaatcccacaaagagtcacagcgcagcatctgacacacaatcggccctcagtaaatgtctatttcctttctcttttaataaaataagaatgtaaaatcaactcagcttccttgctgccccttagggacagaggcaagacccttctcctgcaccccctctccaacttcattcacatccttcacctgtctccccgctcccctactcgccccaccccaacaaacccccaggacacagacctcaggatgctggtcctggctctcctgtgacttgcctggagggcgaggagggggctctgggaggagagaagctcctccttcgaccttctccactagcacaggcccaggccagcccctccaggcagcacacaggccttgtgcaatgactcggaggacatgcagggagatccctgggtttgtgccttcttggcagctaccctctgggaacaggtgccaggctgcaaaggccacctgctcctggggaagggcaagggccacactcccgtctgcgaggagaagccaaggagaaccaagatggcgccagtgcttgggagtcagctcctccctgggcaggcagtccaggccagcccagggactgccacctgcacgtccaacagctcagccctgggcattgcaagcctttccctgctccctcgagggctctgtactgggcggacacgtttgccttgctattggcgaacatgctccaacagacttgtggtggccacagcctctgggatgacgcttcagcctggccttgggggtctctggagctcaaacacagggagccctctgccttactgccttcatgatgacagatggggagggtggagtagagacagtactagtagcaacgatagctacccctcatcaccatgtgccaggagcccttccagcgtcatttcatctaatcctcacagcaaccccaagtgataggtgctatcgtgaaccctcttttacaagtgagaaagctgaggctgagaagagcccacaatattccaaagtcagagtcccaataaggagagactagggatttgagccgaggactttaccactatcctcccagcatagctccccaaacaagcagactccaccagccttttccagaaagagtcccctgaggggcctccctggccactgggggcacagacaccccccaggagcaggttgtaattctgccaaaacaagggcatcgctgtgcctcttgccctgcagaaataggaaagacgctacccctctatagagacaggttggtcaggctaaagagttgctatgtcacaaatgaggagcacgactggaggggtatttgaaaggaagcagtgtttccctccctgcagcttctgggaatgcttaagtggggaggtctagggacacggggccattggcgagagggcctggtactagtaagtatctactgactacggtactggtgtggacactgtggaatggagaatgatgggggcaaggcccttggcatccatgaaccctcaacatcgaaatccttctttacaaaccagggataagaccaacttaaaatggtgtactctttcttttaaaattaaaataggtctctaagagcaggttggacacggggaggacaccagacaaggtccccacggcatgagccaccgactccccagctgccagggacgaggtcctgggactgagcggcaggtcccataaaagctggtggagcccagcagggtgggggccgggtgggtcacccgggacagacagtctccaatcgtgctgagcacagcacgtcccttcattcaggaacccagagtaaaatgtacagctgggtctagagttgattcagcccttaactcattcgggatcgctggcggagccactgaggcgggaaggggagtgggcctggtcacctgggggagggggctgggccgtccctgggaggggggaaggctggggcacgacccctgctgatagtgtgtgatacgtgcaaacagaaatcataattctttgcaaaatccctctcaaaaccaaacaggcactgagagttgagggagggatgagggagtgtgtgttgggtggagggtgggggaagcttgttttctacccactgccaaattctcatttactgtcagctccaatccatttggaactcactgactcaattgccttttcacggggaaaggagccggcacaatgcaggggacttttcagcttcacattagcacacagggcgctgggcaatgtccgggaatcaacacacacggccctcccggggccaccggccacccccgcctccagacaacccagccagccctgccagggccacatctgctcagccctgctttaatatttggggttttatttatttatttttaacggctaggccagtggagaagtgtgtgtgtgtgtgtgtgtgtgtgtgtgtgtatgtgtgtgtacatgtgcacatgggcaagcgtatatgttttgggagagacaggggctctacctcccaagaagaagggcctgtaagagttcattccagggcagttccaagtcttccttttgcccaaagaaaggagggatggaaagaagaaatccaaattaggtctccagaaggaaaggatgtgagggggtgggggtcactgaaagtaaatctggaaagggtcaattatggataaatccacatttgctgggagagtgtccctaagaactccacaggcccaaacactattcaataatcattatgaaaataatattggcctggtgcagtggctcatgcctgtaatcccagcgctttgggaggcctaggtgggtggatcacttgaggtcaggggttcgagaccagcctgaccaacatggtgaaaccccatctctactaaaaatacaaaattagccaggcgtggtgacgcacgcctgtaatcccagctactcaggaggctgaggcaggagaattgcttgaacccgggaggcggaggttgcagcaagcctagatcgtgccactgcaattcagcctgggtgaaaaagcaagactccgtctcaaaaaaaaaaaaaaaaaaaaaacctacaattataatcatcaagataacaatggtggtccccatttttcaagtgctcaccctgtgctctctaccaagtgctttctgcgccacctccatcaatgatcacaagaaccccagcgaggcggcactgctgactgcctgcccaattccacaggactggagaggtaagacccaggcccaccgtcacaaaggtcctaagtgggaaaagaagggcttaagccccgttctgcctcactctagaccagccatctcaccctgccctgggagagaggaaacctgcagcagaatcaaaagagaagatgtcctggcaccacagagaccttggtcttgggagccctcacgacatctgggtgtgcccccgccctccatctctatcactgtcccatgggggggtcctccatttagcccaagtttgagggaagcatccctcggagggaagcttccaacagaacttcctgcgatgatggaaatgacccacctgagctgcccagcacaggacctccagccgtacgtggctgtggggcagctgaaatgtggctcgttcaaggaagaaccaaattttaaatgtaacttaaattgccatgtgggctaatggctactgtatgagatggtacagaccccacaccctccagttatctccctacctcccagcccaagagctattttgttttgttttgttttgtttttttgagagcgagtctcgctctgttgcccaggctggagtgcagtggtatgatctcagttcactgcaacctccgccatctgggttcaaacaattctcctgcctcagcctcctgagtagctgggactacaggcttccaccaccatacccggctaatttttttgtatttttagtagagacggggtttcaccatgttggccaggttggtctcgaactcctgacttcaagtgatccacatgcctcagcctcccaaagtgctggtattacaagcatgaaccaccgcacctggccccaagagttattttggaaatagactaaaagcatctaaagacaggaggatgacctgccatgagaggccccacctcagtcagcaggccctctcctctgctccttcacggcctttcaaaaattaccagtcagcctccaacttctctgcctgcctgccttcttgtctttctttcttgcttgcttgctttctttctgtctctctctctctctccctccttccttccttcctttcctctctttcttttccttccttccttctttcctttcttccttccttcctccctcccttctttccttccttccttcttttcctcccttcctctcattccttccctttctttctcttttccttatccttatcttcctttctttctttccttccttctcatctttttccttcctttcttccttctttcctttcctttctctttccttccctccctccctttcttcatttctttcttagaaaaaagcatccgtttaattagataaatccttcaagcacgtggcctggagttcgtcatggaaattaacctgctcccagatctcagatagtgaaacaagaaccggagtgttttggcatagcacagtgaaatgggagaggccgatggagtttcatacacctcatcttccataagtgcccctcgcccctccagtgccccccgcttcacggcctcatgcccttgcttccttaggtcactgcctccaccccacctctgcttctcctcctggccccgccctgcctgtctcgtggccctccacccaggcctggggagcacccatccctggggcaggtgggaaacctcagctccatccatgtcaggggctaaagggacaaccgttgtcctctgccccttggctaagcaccgaggctctgcgatgagctcaggccaagacccaaatgaggctcagcccacaacggctgcttcatcctcctcctgcgcccctgctatgtgctgctcactagcagtgtgcgttccgtaaaataaagctcaaagtggaaccccagcaaatgtcagctgggatcctctcatctaattctcatggtccacgtgacgggaattccaagtcccattttacagatgcggaaacaaaggcttcgaggaatgaatcgtccaagtggaggaaacacaattcgccttcagctcagcctggctcctgatcccacgcgccgctccctctgccagccacacagcctccatctgcgaggcgctctcgtgggcacgactctgggattgccagcacccagaattcaactcacactggcagaggccactggcgccttgggccggtttccaagatctgccctcaccccaccccaccctggccttctgtcccaaacagctcccatgatgacccacctcaccccaccgagctccaggaacacttggtctggccagtgtgggaaagaaagagcaatggcccctgccccacttgagggactgactccgcatgtgggcagagtcttcattctcatcccctccagacccagcagcaaaaacaccaggaggaccccaggcaggccagagaggtaaaggacaaaatgcagaatctgtgtgcagcaccacgtcaccctgcactaggggcccagctccagacagacagagagcaagctctcccagttcccctctccatggcaatccctgataagccgcaagtgtttccgtgtcctctcccgcatgggtctgtaacacacacagacatgtggtcctaacatttcacacgtcttagctcgtgtaaccctcacatcagccccacgaggtaggtactattatgcccatttcatagatgaggcaccggccagttaagtcactgatgaaaggtcacacgattttgatccccagctaactcgctccagaatgcaccatctacactatatacagctcctcaaatgaacctgttggctccagaggcacaaaacagtaaagcacaccccatatcctgaatgggatcccccattctgcctgaaaggcagcccccaaattcacccccaagttcccaatgataacagaaccaacctgcaacctgacacaaaaatgtaaccccagcaccacccgcgacacccaggctcacggctttctggaatggaattcacaggggtcccctttgagactgataccatatgacataaaaaccggctcccctgaccttggggacaccttgcacttgacaatgccaaccatgataaattcttcgttacgtttaattactttaaaaaggactttcatagctaagagcccagccaaccatcaggacacccttccgagggtggtacggtcagaggccatttgacaagagaggaaactgaggcccagaaaggtaaaatgactacctaaggccacacagtgatttactgcagagccagtaccagaacagggtccccagatgcatagcccatcaggccacatctcgcaagaccttaagtgtggggctcgcagaagggtaggggagtggacagttagacctgagtggagctcggggccacccgtgtctcaccccgtcccccgatccccagccagagatgctggggcctgacccatggtctccccaaggatcagatttccccgaaattcccgaaggagctgtggggacgagtgggcccagaaatggccctcacatagcgagcggcacagctgagctccccgggggcgaggggggcgggcggagctggagacgctggcacagccctcataggtactctgccagcaattagtgctggggaagggtgccagcctggcagagctcattcccccaccccttcttctcatttacacacgcgcacgatcacccgcacacacacacacgcatacacacacgctcacccacccagagaccatcagcaaagaggcagcgaggcttccttttggtaaatctcatcagcaaggcacacgcagggcatgcaatttggccattactgctcttaaacaacagaaaagcagaatccacccgccattaacccatcccactctccctccgggcttcccaccggctcaggcaccagccttcacctctgactcccacacatcccctttaaaagctccccagaagttgctttccaaaagaaacacagagtttgaaaaaatgtttttttttaaaactatgataagtccaacctgaattgtgctattctccatgctgacatctctccacagagcaaactatccaaggttcaaacatgaccttgcctaagaccgttgctcaaacatcttagaatcccagagaacgttagctggatacggggatgttctcatccagaacatccctttatatgtgcccaagagctctgccattaaggggatgtatccattactgtggataggggaaccgggagagctgcctttggcttggtgaggggcatcgctacctgagcaggtggggttcctcacagagcaacctgagtgctagccccgatccacctatggggtcccctgggtgacagtttgacagcactctcctctcccagtgcagaggcaggcaggtgggagtagtggtggggaccgatcttgcctcctccctcctgcccccctgcctcatcctggagaattggaaagaagcccaccagagcagggggccctagagggtccttagactgcatttataagatctgcgaaacccctcaaagtataagcaacatttatgcttacgagattttttttattaagaggattctcaaagggggcacatggattcaaaagaagggaagaagcacagcccagagactgcccgccgtcaaaccaaggctcagcagtgcctcacacccaggtggccaaggatggaacaggcggagaccacaggcaggactccagtcgtcttggcagcaagtgtccctgaccgctgcctcctcacccgggagctgccccggcctcatccttgctttgcctggaagctggtcactggcagggctggcccgggagctgtgccatgccctgggccagcgccctccctcctgtgtgccagggcttcctgcccagccagcagaggcatcgcacagaggagcccaccagtggggacagaggggaagccagcagccgctgccgctctgcagaacctcgcagatcctctaagccacctagtgtccagagctgagctctagccaccactctgtccctcctgcttctcacagtggccactgcaggggagcccaaggggacagtaagggggagcgtggggtgggacaagcctcctctaaccctacccccacctgggccttctccagggacttgaggccaggggtcaggagccaagctgtttggggacatggcgcccaggagaaagcaaataccctgtggcccctgcccacaccccccacccaagacagggctgttcccatcacccctgctccttgctcctagcaaagccccctatctttgagatcccctgggtcatctcagacaacccatcccacctgggacatcttggggtccccccaccccagcctccaggcctcctgctgagcctcccaaaccctgggcctgccacttccccagggcctctgcctgccccccgcaccccctcctctgctggctcttttctctgtgtcctcaagactcctctcaccttgagaagtgttaggattacccagcatttacactcaatgcgcttccttattccttaagacttattaagaatgataatgagttccgaaggagcgacacgtccctgtctctctctctctctctctatcctcctctctctctctttctctctctctctccccgcaccttcactctctttctctacgtgtcttttccaccaaagacacataggacaaatccagaccaaaagggaaaaaatttccaacaatatggaagaagggcacttgagaatttctattcaataaacccatctctcttcttccttctccctggttgtcctcaattattccaagtaagaaaaaaaaactcccccttcccttcacactgtccaggccacccctcactctgccggactttgaacagggggaacaggagaagggcccagcttgcctgcaaaacctcgttaacgtgcagctcttaaacgcttgattaatttttgcagaatttacgacaggctttagctttttttccccaagctgtggcctcagagccacagcaacttaacttggtgaactcaagggggcccgaggtgggggtgcccccctcccccagtggcctcctgctgctggcacaccaggcagccctgcaaccaaagggagccacgcagatgccaccgcccaggcagaagacagacccactcgcagagcggcgtggcagccagaggagagatcaccaggcagccagaaccacggctgacttctggccatctgggactttttaatttcaaaataagaaagccagtagaaagtggacagagaagaaaccaacacggggtgctggcaatgatgcttccagcctgcaccctcccaaccacgccacgtatcccgggcacagggaccggccttatcggtctgccgggctgcccttcagagaaagggaagaacagatcctaatgaaattacggtttttaaaatgtctataaattaaatctctctcctctctccgtgaatctccccctgagctccctctcctctaccaggcttgtttgcctctcttcggttccctctgctcatgtctgtttttctgatatagacatcaagaggttacgggctcaattacaactccgctggagtctcagcatcagactggctcggccttctcttctcctcttcagaaacaagataccaaataaatctctcttctttatatttttattttcaatgccaaaagcctaaagattcattccgtggactcacagcctttttgaacttcgttcagatggtggggagaatattctttttaattgtgtgtgagtacaacataaatgcttctctctttatctcgttccccccttgtaaggacacacacaaaaaccttggctatgcctgacattttaaaaagggggagaggatggtataaatgtacttaatgtatgtctataagagggggcgagcgagccctggagaatattagtaggacatctagcacattctaaagtttggggggggacatcatgaggaatcttattagcaaaggtccatttgtaaagggtagatcataaaaggtgattttttttttaaaaaagaaaaaatttgcttctaccttccctaatactgccacgagatgcagaaggggagatgtgccatctatataattttacatccgaagagaccctcttcccatcaaaaaaaaaaaaaaaagttgaaaaatccaagtgttagtcaatcatcagagctgttgattcccgagaagaagaaaccagctctgagttgtaggtctaaggggaaaagcaaaacaaaaacaaaaaccccactatacttctggaaatattaaccagtggggattccaaaagctacttttcctggaaaaagcacttgagacaaaggtcggagaaagcggaagctgaaggtgaagcaaaaagaaaaacttagtctttccaattaactagactgggaaaaagaagggaggtgggaaaacacattactaccaactcattaattctttcctgtaaacaatttaattaaattctgctaaatacaggagaaatacttattttggagtgcttcccccaacctcaaaagcaaattcctccaggttcctccccccgtcatgctaacacctcccttgtctccaaactacacaacctttcagtgggtttccagcccaggcgtggactgcactgctgagggctgcgagaatgacagcctcatatgtctgaaagctgacacttcagccttgaaaagaaatgggggaaaataagctgttgacttcttggttaaagtattttcttgttctactcatgttcttatgtcactgggctaaaaaaagagagagagaaaaagagggggagagagagagagagaagagagagatgactttccttgaatgatctgtttaacctaagccagaggaaaaaaaagaaagtcattaattacttatgtgagctattgcttcagaaagacaataaacctgcccggtcgccatggatatgacatatttgctctgaaaacaacacaataattagcaaaggggaaagatacaaggagaatatgcaaactcctgagtttaaagccacagtgctcttttctactcgtaagcctctgttctgtttgcaatccaaatcaaacaaattttaaaaatatagcaaagagggaaataataggaatggttcctctcgcctctgagctgagcagcaacaaccactctacctccctccctccaatataaaataatataaaagagaaccagggtggcagaaagaaagaaaaaaaaaaaaactcaagtattgcctgttttatttcctatagcaggggtggagtcagttttttttttttttaagtgtgctcttatttagcattgaaccttctggccagatataaatttatttatgaaagccaaatgctctgtacatggcttacccctcccccccgcccccccccccccggccccgcacacaaagtaaatggaaatgtggaggggtggggttggggggggtgtccagttgaaaaagtaaagcagtatattcagaaagcaccatctctatggaagaacattcactccccctacctccaagaaaatgcaacccctgccttactttaatattaaaaatgcattaaatggttctacctacaacttagtcccaaaggatcattaggaaatgcaatcgctttgtatcatatctgtcagcgtgataaatatctgagtcagagtcagtttgcaatttttcagtgtcacaaaacaagataatttttttctgtcttcctttcttaattcactgcaccgcctccccacgcccccacccccacccccaaccagtcacaaatctacagaaaaatacctgggcagagaagaaaaggagaaaaagttgatgtactctcacataccagacagaggttatcgatattctcccaaaaagcaggcaaaattgaactttaaaatatttgggtgacaattttccccaaaaaataaataaataaataaagcactccagtaagtttgactaaaaactccttttcccctcttcccagaggctaattttcctaaaacagatggtcaggatctaaaagaggagcaaatatacctcaacccccacaggcagagaaatctaactttgaacttcttttaaattaaaaaggggtggggggcaagataaactattaataagtgtgaaaaaaattagctgagctacaagttttgtttttcttattaaaaaattatttaaacataaggggagcagatataaaagggagtttcatatttaactgactttcttatttttttaaacaatagcttttttaaaagattggactctttgatcttgaaagaattttgctcttatatgatggggggaggaagggggtggtggtgaaatgatctgttttaaatgatgatgcaacttagagatcaaagccttcgctttcttctagccataataagctgtacttgccacaaagcgtaaggctcccgggctgggctcctctccttcgtaagaaggaaataaaatgcgccgagactcagagcaagactccaagtctcggcaaggtgcaaagtctaaaaaacaaacaaacaaggcaaggggaaaaaaagaggaaggcactgcccctttaaacgttttagtgcatatggagtttgatttctgaaagagatcagtttaacatctccatagaaaccagcaacagattatcatcaacagaataaataactagtctaataaattaaacaggaggcataagatcgctggaaacctgattactgaagttcaacaatattccccataaactctccttaaccgcctctaaggtggctaacaagaagggggtgggtggcgggggggcggggcggcgatctctccaattcgccggactctggggacagagatggtggctacctcctggaaaggagaagttctccactctgccctgaagagggtccaggagctcccgcgaggggcacaccctaaaaaccgaagtttgggaagtgggaaagcggctgggggtcgggggagtggcgcgggcggccggagattgcgcaggtcgcgacgcccgcccgggacgcaccgcctggtcgccaccaggacgcaaacccggcgctttgcgctcgggcgccgaacggcccagcgccccctccgggcacgtggagcgcagccccggctcagcccccggggaacaactacccccctccccatgcccggcgcagctgctcctgctcagccgggacagctccctttaggacggcgacgtgtgtgtgtgcgcgtgtgtgtgcgtgtttgtatgtgtatgcgtgtgtgtgtgtgtgtgtgtgtgcgcgcgcgcgcgcgtcgtgggttgggcggggggacaccaagattatccggcgatctgttttccagtcccctcgtgcgctctcaccgcgcgcctgtaccagctcggagacgtcctaaatttactaactttgccccgcgactaccagggccttttccccctcgccaccccctgagtgtaccgggtgtcggcgggacaactacgcacaatgagggccgcacccccacactccactcggtcagaaacgcacactccgccccgtggcccagtgatccaggtttgggggagctccatactcaggagaggcgctactgccgcttttccggtgggcacgcacccgcacccgcaccgtagccagcgtggctggaaggaggtcctcgccgcgcccagagccggctttccaagctgaagctggggcagaggaacttgtgtggaggaagagggggtcccctgcctccctcagcgctccactagcctcccccaactccggacccgggtcggggatgacttggaagaagaatctgcgcccaccccttagagaaaaatctattattattatcttaatctacgcccccaaagtgtccctccagccgtgattgacggcgcatacacctgttcccttcgcggaggagcttccagcgccggggacagacattcgcccaaacgctccgcagcggcccagcaaccgcccgcccgcccgcgcccggccagcccccgccagcggccccagcgcgcctctgcccgcacctcgccaccccggcggccgccccctccccttccagacccggctgcccggcccgccagctcccggcagtgctggcttcggaaagagagagaaagaacagaaagcaaaacttcctggcggccgacggccatcagctgcacattctgcaaatgccaccgagtaaaaataaaccggccgccgctccgcccgtccggctcaccccgggcgcacgaatcggccccctgccccgggagatccctgactcggtctggcccgatcccccattcccgcgcgccccctggatccccgctccccgacgctcctccgtcagtcaccacgctctcctttgccgttaagccggaccctaagtgaccgggaaaccggctctctccctttggtgttccctgcgcccccacaaactacttttttctctgtccttcaccaggtgcctatttcagccctgtgcccttggattcagggctcctcctccccaattgttgagctccgaggtcaccctcagcccaccctgggggaacagaccccgaccgaccctctcccacgctgcagagcccccccggagcgcaccactctaccagcccgctagcccgccagcccagcgtcccacgtccccgggcgcaacttctcttctggcgcacacaacagccggcaacaactcgcccgaactttccccgggacccaggcgggctccagccgacagccgggcagctctgggccgatgccccggctccccgtgccctgtgttgccagcccttcagctggggaggcagggggtggggtggggaagggagtgaggaacgccacttgccgcgcctggagcagcgcacttgagataaacttcccaggcacagatgaaaaagggggcgccgctccccccatctaagaaatctcttgccttcgatttcctatgggggataccctttggcaccccgcgcctaagcgaacactgcctacctctgctggcagcacctacacccggtatccgggcacaagagccggctggaggggttccccacccaccccttcccatgggcaaagtcttgcaaagtcaccccaggcacccctcaccccgcctccttctctgccctggagagcgcacgacccctctgctgctggggggtggggtggggtgggggtttaaggggaaggagtgattacccggtattggagatcacctgcccccccgggagcccacagcgcgtggggcgcccccaccctatttgcaaagtcctgtgctcgcgcctggcacctccctctcttctcccctaccccgccaccccctcagttggagtaagcgacccccaggaggagcagccctcccctcccccggagccgcgcgccgggcattcccctggccacggcaggcaacgcgccgccccgcgcccgggtgccagccctccgtgccccctgcctccgcacggccggagttgggtggcagccgccgatcgcaggctggctggctggctcgctcgctcgctcgctcgcccgctccctgctgcaagcggcagccccgggggtggggggggtgcaccgggacagggggagagacggggaggcgccccgggaggcccgcggagctgggggacgtgggggggccgcggcggagggagcgccgagtctcttacctgcacttggggcggctttgggtgactttccaagtccgggggaaaaatgtgtgtgtgtttgggatggagcgccgcgggcgcgcatgcgctgcccaaagttgccggatcccggatttttcgctcccagtctccgctctcgcccgctgtgattatggaattctccgcggccgggcgggcgagtgggtggcatgcaaaacccgggccggatcgcggggccgggctccgctccaccctcacacccccagacctgcccctcccggatccttcccacccaccgcccgggctgagctcagcgtgtgcgcgcggcgagtcgcacggcctgcggaggagcatctgagcgctcggcccccttttgcaggtccagaggcttctacacccccccccagctgagttgagttgaggctaggggaaaagagagaagggatgggggggggggttactttccacctgttctgaaccccgagagagcccgagttcggttcccactttcgacagaagaactggctcttttttgcaagttagaatgttagaactgtggaacccaaaggaacgaaatgttctcactgtttgatatctgctttgcacttattctttgcaagggagtttttcattcaatctattgtgcaagaaataaatccttaagtgagcaagataggccgtgcagaatgaaccttacatggaggggctggggggggggcagataatacacattaaaacaagtggataatgttatttcagagagtgaaagtatccatgaagaaaataaaccaaggcaataggctaaaaagtgtcttgggggccggcatggtggtttacgcctgtaatcccagcactttgggaggccgaggcaggagcatcggttgagcccaggagttcgagaccagcttgggcaacatagctagacctcatttctgacaaaacaaaacaaagcagtgtcttgcgagagataatccccttgcccccagatgggggggaagggccttttgaggggcactttcatactttattgaagaaacccccttttctcccatacccagacttcccatttcccagttggtttgaggtggccacaccagctgagcctagtagtcagcttcagtgctgaggccctgtagctctggtcttgcctttctcagcaagcgcacccctcattccaggcctgagctgcttttcccttcagcataagcgtgggatggaaatatcgagaggcatgaaagaaactgaaaacacccagatgatgagataagtgagaaactgaccataacagtaaacgaaatagatcaatgatttgtggaataaatgaatataaattcaaagtatgacccacagcttcaagccctgctcaacagaatgcattaaactaagaggcaatgccacaggctggtaaacattgttgcaggctggtagtatttggagcctaatctgcaaggtgtcaggaaagcctctcaggaccagagaaacgacccaaaaccctgtatgatgattgtctaagacaagcatcttccgggatgcattcccatgtcctgccttaaactggaagttaattgtccagaagcatatggacacagactggagacatgatggccctctggccctgaggaggccaggatttg

SEQ ID NO: 89 - DNA, 105241 bp, Homo sapiens
  source 1..105241: mol_type = genomic DNA
tccccagtccaggtgtggcccctgcccagacccccctctgcctgggggaagagaagcagatgcctgcaggtgtagactgcaggtcggaaccatggggatgggtactcatggccaccaaggggaccacccctaacacaagaatgccgcctgtccccgtcccctccccagagctatgggttccacctggtttgctgtcaggtctttgaccaccagggcctgggcatatgagctacagaaagacgggcctctgaagcatcggagggggccccagagccttcctgggcaggagctgccttgcttcacgtgactcggccaacacccgcccagggttccctgacacattgcacccaggacatccccttcttctgtctccgggcctcagttttcccagctgtcctgattccttgtggccctcggccacagggctccatctgcctggtctctggccaggtcctcatgccagttttgcactcgtgctgagggtggcttggtgcatggtggggggctacgcagggcagatggcattcatctttggctcgagggctgaccccttcccaagatctgaggtgacagggcctgtctcaccctcagccttgtggtctggcccctggaggctgctggccagatcgatgcagccagctggtgcacatgccactgtccctggtacacctgtgtgtacccaaagaaggatccagggaggggagggaaaaagaggaggcttttgcccacaaagtaaactcgtgtctcctccacgctccccaccacagtcctgaccccagggacctgagtaaccagggaagctgcccatgggtccacttgccctggggctcggtgctctagagaccaccggttcacctgcacagccttggagggcctgactcaatttaccccacagcactgtacccatttcctgtcccctagagcctttgatcaccacagccaactgccctgcccacctggaagggcactggagtgtgggtggggacaagatggagccccagtgggggagagagatgagaagagtcccaggacgtctacctccgagggaggcaagtccccttcgtgggcacgggcgtgtccgctgctgccgctgtgtgggttcggagctggagaaccgcagccctggaaggaggagaggcgcgcttctgccacttaaccgagagcccaaatcccagaccggtccttgcttctctgaaacccacaaaagcaaaccttggggagcttgctgggcctgtcactgaggaatggaggtggtgccggggccagggcaatgtctggaggacagactcgatctatcttgactttcagaacgaggtttctgttgtcagacttggttccagacggtacctgaccggtggtgacccgacaggatccatccttatgatgctcaaagaatgaatttttaccaccgtgaaagaaccaccagcaggcaaaccgctcctcccctcggggccactgttcggatttctttgaaaatctgtttcctacacttcgcaaactcctgcggtttctgttttttatttggcaaacatctcgtttattaccatcatgaatatcatttggacctctgcaaagactatatacattcacattaacgtacacgctcagcttcaggcctctggcgggctgttcgtggctggttcagtagctgggtcactcccgtattgcactgagttcctagaactcctgatagccacgcacacagatgccaggccacgggccacgccacgcgcacagatgccaggccacgggccacgccacacacacagatgccaggccacgggccacgccacgcacacagatgccaggccacgggccacaccacgcacacagatgccaagccacgggccacgccacacgcacagatgccaggctgcgggccgtgcctgctgtctgtccttgtactcggtgcaagcatgaatttctttatccctttatttccttcttgaaatcgctgaggcagttgagaggagtggagggagggtgggcagggctggaggatgggagggagcacgtctgatagaaaacgtcaccgagacacaccccagggccagaggcgaacgcatctgaggggtggctgggcaggagcaccagggctatgtacacggtcagggtcttccctggggaggaggcagagggctgcttttgtttgtagtttttttgttttttctgcaaaagtttggaagaaaggggagtagctgcggtggggcgatggggccgagaggttggagttggggcgatggggctgagagaggtcggagctggggtgagggggccgagagaggtcggagggcgcggagaggagagaggtagaggaggacgggctggccgagaagcagtgtttcagggaggcctgctggctccgcatgctcgaaaagcagtcgagaatcaacccaaaagattgtcacagttttgtttcggaattatgctctctctgggaagaaaactttagcactttttttccacaagtggaaaacggaaatatgaaaagtcacagggggcgtgaggacagacggcgtgtcctttcctacacatatggagacgcaggccggagcaacggcacacggaccacgcacacgcggcggacgcaccaacgcctacgcagaagagaacaaaagtcgcttctaactgggcacaaaccctctgcacccaaatatcccgacacccacaaacaaaatcagaacagaagagaaaaagacccacatccaaacaaacccaagagcaagtgaaacagtgaaaaaaatactttggcagtgacaaacaaattttggattttgatttcttgtgtttgcttttttggatttcctttggagcagaggtgtgtccggtatccttggctggctagctagcaaggtagttcacaagtatgcttcctttgcttttttaaaaaaactttttggatttttacttaaagccaaagagtttaacattacaggaaaaaaaaatctgaaaccaaaaatgcatcttgagtcagaaatcgaaatctttcctcccgtcttcgctgatcagcctcacgcccctgggggaggggcacagctgggttcagatctccagctataaaatcgcagttttctttctccctttttaatcaggagggggagaacccccccgttttctttgtccatttctgagtagctcttttgccaacacacaaaaccccccaaaattctttgctgaaaatataagccaccaattcgattttttcattgaagagaaagtgtgtgatagtcatagagagagagaggatagagaagacagagggggagagacagacagagaggaaaagagaggtgggcagagccgccgcgcctgcggcatctgctctgctgtctaaagctcagtcgaggcttctgaggatgcttgaagagacgttgtcaggaggtctccgcgcggaatcattaggtagctgaggcaggtgcactgaatgcggttttgttggttctgtgtcttctttcggagaggggcagtagcagcagtgactaattggtcggctcccccaggtcaggcggggcgcagtgtctggcaggccaggcatcggaggccaggcacagcatccggtgggcctggagctgggtggggttggcacggtgctgtgtccggcaggccaggggccagtggggtcagcggggcacggtgtccagtgggccaggtgggctgggggagccggggcgagaaggccccgcagagccggcttcgctggggctggcagcacccacaggcagggaggggcccaggctgtgggcggcttcgggcggtccaggcaccgggtcggccaccacggctgtggggccctgcaggctctggccacacacgtggtgatgcttctcccagtcccgatgctggcagaaggacccgcagtagcgtgccgcgttgcagccgctgcacgtctcactggctttccgcccgcagttccagcagctctgggtgggggcagaggggccagtcagggctgggtctggccacccgaatccccaacacacgcctcaaccaagccattcagacccagccacgtcatcaccaggtgagaagagagaaactccaaagccccacagccctcgggccatgctccagatacagccactcactgggccattttgcgggacggcatcccactaccgtgtctcacgctccagcccacccagataggtctgcgctgtgctaactggacaacgacccctgcctcctctccaggaagccctcctgagctcaccaggctccaaaaccgcaaaaccaaagggcgtggccccggcaggattgaggctgctgagatctcaccatccgcctctgctgcatccacacccacccgtccccctccccacctctgccccacccctgcctctgctgcaccccctccacctctgcccccaccctgtggtgggctctgctcccttcccgtagggtgagttgtgccctaggcatccctgtgggcagagggggtgggggatgccacaaaaagcctgtgggcagagcaggtaggagatgccacacaaagcctgagcatatttcttcttggggcctggctggatctctcacagacggttgggctgtggggtgggaagcccaaacctgccctaggggagaagcccaggtccctatttggcctccaaagcctctggtaccacctcccaccccacctcgccctcactgccactgcagcagcagcttccctgcggactaggcactgccaggcacagtccccgctccaggccctggcccctgccggtccctccgctgggcccgctcccccgatgcctgcgtggccagcttcattcctcccggcatctgctcaggtgtcacctgccgtgaggcctccacagccccactccccacacacttccacctcccgaaactgcacgcctcacttctgcgtttggtgtttccttctcagtgccagctctgtgagagttgtgcctgtggtggtctagcttctccctagctgagagcaggcgtggaaatggccggtgcagagacccctgaatcgatggggctccatctcctcccaccccggggctggcccaggcacagatgcacacaggggcttcagatagagatccgccctatctcaagggacagtcctggggctcccctggaaagggtctctccctgtcccctcttcgtggacaaggcagaaaagggtcgcggagggtcctctgcccccgcctgcctcccaggtgcacgggcacaagcatcgtaattctcaggcctgccgtgtgcaccgggagggagccgggcgcctcggacgccacctggggccctcacagctctcctggatcctcctgttctcacaggctagagaacacgggtttcaggccaggcacagcggctcgcttctgtcatcccagcactttgggatgccgaggcgggtggatcacctgaggtcaggagttcgagaccagcctggcctacgtggcaaaaccccatctctactaaaaatacaaaaattagccaggtgtggtggcgggcgcctgtaatcccagctacttgggaggctgaggcaggagaaccgcttgaacccgggaggcggaggttgtaatgagccgaggtcatgccacagcaacaagatcacttcagtctgggcaacaagagtgaaactccatctcagcatcagccaacctgggctcgagtcctggccccaccgcttcccaaggccgtgacctcagacaagctgccaaccctctcgagccctcagtttctggaactacagaacggggacatccataggacgcctcactgaaccatgtgggatctctgtgctgataaagcacagtgtgggcggggatggcgtgcctgctgcaggatgcccgtgacaactgtgctgatgccacgtggaggctcagaatcctcatgggggtggcgtgggaccgcacgggagccgaggcaggggatgggtgtcagcgtggccgggtggccctacctcgctggagtcctcctgctggttgatgaccgtcagggcgtcctcggaggcctgccgcttcgcctcggccagggcccgctccatcttggcacgctccgtggtgatgagctcgtgcgctttgcgctccgcgtccgacacggctttctgcagctccgacatggcctgccgcttcacctcattcacggcctcttctgcaaaggacatgggcagggctggcggtcacatgggccatcccagatgggtctctggacttcctacgcgtggccacaacctggggacaggggctgtgtgcagctgaacacacgtaccatctgtgcacacaaaggcacatgttgatggggctgtaggcagctgaacacacgtagcatctgtgcacacacagacacacgttgatggccctcatgcctgtgcagacaagtgcatgcaaataaacacaggcatcccaggcatgtgtgtgcaaagctgggtcacgtggtgtcacaagtcaaagcttgcactctaccgcagcggctccccaggcactgcacccctgcagggcaagggcgaggcccaccccagggcctggtcagccaggggcgcacccggaatctgcattcctaacgcgagccgggggagctgctgctgacctgaagcacttggataactctgccgttccgccttcacctctggccccacccagacgcagcccaggaagccccctcgtccagggctctgtgctgtcaccccagaccctgctgttatcctcaccgcacttgccatcctttaacctggctggcctctgaagaccatgctccccgacccacacacagccacacacagatcctgatctgtgctaagatggggtaggctcagagcagcctccagggagcactgcccacgcagctggggaggccatgtttcaactccaccactgaaagagaccctgaggccagctggagaccccggtaccgctgcccaaccctaaccctaaccctaaccccaaccctaacccctcttgctgcccacatatctggctctgccccagcccctcccccaaggctgattcccacggcatgagcaaatgtccccacagccttgcccagcgctcagctccacgtctgcccctgttctgaccccattctgcccggactctggccccgcgtgcctgacgcgcccaggctccgagtgtgtgcgcttctgcgtgccctcctgggtgtgcaggtccaggacccactttattctgctgggcggccaccggtccgtttcctggtaggcgcaggtagcagctgtcctgccctaagtgtgaacctactctgacctctccgtgagccacacagcggaatgcagaaagccttgtagcctgagcccccagagagagacagaagctcttcaaagctgagccggtgagaggcgcatctggggccctggcctcccacagctctgctggccaggcccctgcacccccactcaccagccttcctccagatgtcctcaggcacgtagccggtgagggtcctcggcaggaactcgcgaggcacgtctgaaacaggggccggcgtcacacaggatgggccacgcggctgcccctcccacgctggggccctccccaccctggctgggccctgagtgcagggcgtgagtgtgtgcgtccctggggggaggcccaggtgccctcggacaaggtctggctcaggcacccagggcagtgcccgggcacggggggcattggagctgtggaccttggactcggctgggagccgtgtgtgtcctgggcctctcctgtgtcagcattcgtcgctgaggcggagaagcagagaccctcagggcctcccagctccgagcctctggcccaccagacgctctgagctccaggcttcctggcagaccagcccgtgttttcctacaaagtgaaaaaggtgcctctttctcaagcgaaactgttctgcctggtgtttcgttgcattgcctgcctgacagctcccaggtgtccgccccaccagagcaccccgtgtctgctccctccccccacaccccacacgcacctagctgaggcccttcgggaccggcggagctgctgcggggccgggccgcggcgggagcggggcccttctttgtgtcctcggcgtcgctgtagcgccgcgcccagtggttgagctcctcgcggtcggcctcctggcacctgcgcagcaccgtgagcgagcgccgcgtcttctccaccatgtccatgatgcagttcaggagctgggggcgggcggcgcagccttcagcacctcagagggaccgggacgcaccagacactcccccagcccactcggccagagccccggacaggatgggtgcccgaccagcccaccgcccgtgagagtaagggggtgagggagggcccacctccatggcttgcaaagatgggtccctagcctgggactgccgagcgcctgggggtaccagactcacatggacacgtgcctagacgcacgcaggagtttgggattctcctttttaacccgctcagcggggctctgcctcagggacctggctttccgcctgggctccccttccaaaaagcatgagggcgaggggcgaggctgacaacagtgctgggaggggtgctggccccatgcctggcgacccctcctgggacgtgctgcaggatggggtgggtgggttctgaggagcccagttccgggccgtccccgaacacgtcctgcctcaaagaggcctcggcactgcttttgcccacacttcttgcaagactcaggatagactctgggaagagccagtgagcagaaagtaagtggagggaagcaaggcccgccatgagggttttaggaatcctcctccctgggcctctcgagatgcctgggctgcgctgacagctgggaggaggggggctcaggtgaaggacccagccgctgcgcagggacggcgcaggccacacaggagggcactgagctcaggggcgcccacacagccctgctgtctccagcagccccaggccccatggggcagagccatggccgtgtttatgcataggcatacaggtgtggctgtgtggggacatggctgtgtgggtgtagctgtgtgtgggcatggctgtgcgtgggtgtggctgtgtacatgggggggttgtgtgcatgggtatggctgtgtgtgtgggtgtggctgtgtgtgtatggctgtgtgtgggtgtggctgtgtgcgtgggcgtggctgtgtgcgtgggggtggctgtgtgtgactgcacgggcgtggctgtggctgtgtgggcgtggcttgtgtgggcatggctgtgtgcatgggtgtggctgtgtgtgggcatggctgtgggcgtggctgtgtgtgcatggctgtgtgtgcgtggctgtgtgtgtgcgtggctgtgcgcctgggcatggctgtgtgggcgtggctgtgtgtggacactcacgttgttgaggtgcttccactcttctgcccactcacgctctgtgagcttgtggtcgatcacttcttcctgccgggacccaggcaccactgtggatgggggaggtgcacgcttaggtcccacccacagccagtctctgccctattctcccagaccccgccctctgctcccaggccccacccgtgggctgtgcccgctggggacgatggacagggtaaccgaagggctggttgacttggtgaccgtggaggatgcctgggttactgagccgcctggggctctgggccgactgctcttcccctgcaacacggcacacgcctccaagggagggttcagtctcagtcccattctgcagctgaggaaactgaggctggttaagaggatgtgtttgcctgtggtcaccaggcagggagcggtgggggtggggtgtggaccgaggctggctggagctggagcagtgtcctcagccactggccgggaaggctttgttagactaagcgtggcctgaggatgcctcagtgccaagtcacaccatgacctggacctgccttagtccgtgaatcaatgggtaacctcactgggaggagctggtctcagtcattcgcggcagccctctgcggtcacccgcaggcgcccatgactccgatgaagccacgccaaacaccacccaaccacgtggcctcggcacccgcctcctgtctctgcctgtgaacaccgccagccaagccgaggccagggctctcggaacacgctggctctgaggcccatcctattcggggttgttctctgctcagttaaactctgttcaatacagcgtgtctaaggtttttcccttttgacaggctccaggactgaagccgcagaggccactcccacaggtcaccagaaactaagacgtgagtgacgcccggcagtggccgactcttccgccgtggctgtgcccatgggagacgtgagtgacgcccggcagtggccgactcttctgcggtggctgcgcccacgggagacgtgagtgaccccggcagtggccgacttccacggtggctgcgcccacgggagacgtgagtgatgcccggcagtggccaactcttctgcggtggctgtgcccacgggagacgtgagtgacgcccggcagtggcttactctttcgtggtagctgcgcccacgacttctggagacatcagaggcttccaggccccactgttttctgcatttggccactgcccacgcttctggggctgaggtctccctcttggggcccttttcagcccctaaagatctcctagcctccgaacctgaaatggctcccccaaattgcagaggaggtggggaagtggcagccacagctcagtcaccagcctgctctgccgcctgtgaagctgcagctggcagcaacaccccaaccaaaatagtggctgagacgtgcccgacagctggcgtttatttctgtattagcagaatcgggtgggagtcagcacctgcctgacccggctgcagcatgccagacgccgtcacctgctgcctgggccctggaaccctccgcaaggtgggggctgggagatggccttgtgtagggcaaggcctctgctgaccctgctgctgggcccccaccgggccctgggcctctgtctcagcatggcagactggaggcctccctgcagcctgtcctgggggggctcctggggtggggctgggcctgaccatctctgggttctcagcacagaggccgtcaaaacgtcaggcaggctgggctgtgagactgtgggtgcattatgtgtgctctcaggcctcagtctcctcatctgtggtatgggggtgctgacgccaccccactgacgggctcagaaacgagtgaaggataaaatgcaccgagactccgtgcccacctctctgttatccacaccagcctggcctcacgcagagactctgtgcccctctcctgctctagataccagccaggcctcacggcagcccttgctgggccctgcattaactcccccaggccttggactctgagagttgggactctcgtctggcccaggtgacagaggaggaaactgagaagcagagagccacgtgactcacctgtgggtggactgtgggaatcgccaagctcggatgagaaccacgtgggcagttccaggcccgaggccgcccaccccggggggagaggtgggttcagggcccaggacaggcccctctgcagccaccgctctgctccagggggaatgccaggcagggggaaggggtctcccgagctcaggtgcacacagctgcccgtggtgccctgtgcccacatgctcaggtgtacatgtgggcgcatgtgtgctcctgtaacacgcgtccacgctcccgccccaccgggctgctcaccaagcggccgatggcgctctcgtagctcccgggggtctgggtggcggtaggcatctcggaagtggtgggccatggctatgtcctccaggcggtagtgcggcggcggtgtgggctgcggtggcccgttgctggggctgtagcgctgggcagggttcagggtgcatggccgtttgctgaggtgctcggggtgcagcgggtcgcggtctgacccgttctctttggtcctagccccaagagcaggtggggcgagggcagtggacataggatgaaccggggacagaggtgcaggtggggtgagaggcagacaggcaagggcagagagaaagaggacacgtaagggcgagacagaaacacggagcaaaacaccagccccgggaagcccagcccggcgcccccactctctgcccctctgccggggcccatgccagcctcaacccctgctccagctgcatggcatcctggggcctggtggtcaaagagccggactcgctgctctgggaacgaggagagggatacaccaggcttccgtaactggagaccacctgccccttgggcagcagcagcacaagagcgtctggggcagcagagggggcccagcccaggcacctggggaccatggaccccggacgctcggagtccatgcccggcacacaggggagagccgtcctcccaccagcctcctccctgtcctcctaggctccccggagcatctgagtctgcagcccactggggtgtccgcccgtgcagccaccaagcctgctggccctagtacacctcgccacgctccctcagcccgagagagccggccgggctggctgcagccccagaggaggttccctctcttacccagaggggagcagggtgagccgcgtgtccacggcacccccagcccagatccccggagcccacaggtacctgtcgggcgtcctcctcttgccgttctcgttgacttccagtagcagctctgaggagtcgatgggggaggaggcgctggcgtccagcaggagctgctcatgctgggccaagtactgggcgggcgtctgcttggccaggcgtgcacagtgcaggagctcccgctgcagcaagggcaggtttgcctgtggggtggggaaggagggcctgggtagcatgcaggggtgcacagccctgctcaggtccgagcagagggggcctgggctgggtggccgaaagctcaacttgacctcgggcctcaaaggtcaaggtgctcgacctctctgggcctcaagttccttcctagcagtgccatgggagggtggcgtgggagggtgggcacagagcttcgcaggagtgcctcacctgggccacacggcgatgtggggcatgtgggacttgagcccagatcctggactcccagggtggggctttcccaccgcacccagctccctcccatggcgtggtctggagaaggcgagaggacgaaggggcagcagatcatggttggtcttcccgcctgcacccgccctgcccagcaggcaccacatgacccaacacagctggggaaatgcaggctcagagagggggaggcagccctgggcctacaggcggctcacacgagggagctgggagtgaaacccagctgggattgcctgcagtgtgtctgctccagccctgatgggaagccctgaggttcagcttccccttcccttcccgctggtttccagccttggccttgatggagcgtggacctaggacgtggacacccacgttctgtggctgctcaagtgatcctccagccttggtgaggacggcctcaagacccacgtgtgcgggtaaagactccgcagcatgcggccgaaggacggcccggtgtacgggatccgtatgcagaccctgcctttgacgcctgtgtgtacccgcggcgcccgccgcctcgtccttggctccaggctggcactgctgggccgcaagccgggctcctcgggtgccttccccaaagtcttcccagagctgccgcgggagggcggacaggcgtgctggaccctgagcatgctggaccagggcccagcagcaggccacttgggagagccagcggttctaagcatttgtaaataaatccaattccccaactttctcatgcgtttcaaagctgccacgccgccttctcctgccagcgcctccccattccccacgagtgcatccaccaggccctcgagcagtgccggctgccggcctgtttttctctttggatggctgaacaggggccaaccggccatctgttgaggacatcaggagcatgagctgggaaacgaggtcccgggaggtctgaggagccaaacatcctccctccctcatcagcccctccccaggggcctcctcttggtcagttcgggaaccggctggtcgctgttagggcggggagaacatctggatccctggctggctggggccagctgaggccagctgggagccggggcggtgggtggggctgcatcccccagcttctggaaggcctgacccttgggctgcgtgtggggcaggctcaggaaagggtgcagagaacccaggactgggcagcatcagcgtaggggccggatgcacagcagccctcggcaagcagggaatgtttcctcaaggcctgcggaatggggtggggactgtgggaacctccggcagtgcctccttcaaggcagtgtccccactctgtccccaggagcccagggcacccggggaggtgtcaccactaaaatgctacacacactgagctggtcaaaatgccccaactccaccactgaacggaagttctgcctgcagaacttctgaagctgccctctgcacagatgggcgctcaggctggggaactggtgtttgcaatgacggcggcggtggctgaggcactagttgagctacaagggctttcgcggactccgctgctctgccaagcacccagctaaagcctccctgaccgtgggctctgccatagaggggctgtggccttgggctggtcatttaacctctctgacccttgctgtatctgcaaactagcgctgtggagcctctggccgagacagactccggggagctccgggtgaatcagctcagtcctttcccaccaccccgtgagggagattcaccaccccaactacgagagagagggcccaagccagggctggggttccagccaagcaggcccccactctctccggcccctcagccacgattcctgccgtttctaggatgatgtcttcaaggactgcgtgagagtaccccagactgggcctggcgggctgtggatgtcttgggaaggtgctacccctcccccagcccaggccacagtcaggaacaccgaggcccaaggggactggctgggggtcactcccactcggcacctcctgtctggcctgggaaggtcggactcccccactgcactctgtgtctgaaggggctgcggccctgcaggggtgtgggtggggttgggggggtgcgggtggggttggggaggggtggggtgggggaagggtgtgggtgggggaggggtggggtgggggtggggtaggggtggggtggggtgggagggggtggggtggggtggggtgggtgggaggggtggggtgggggctgctccctgggtgggacagtgacagtagggccagggttctggcttgtatctgagccacaagacctggaagcaggactggccgcaagatctttattttttatttttgaatcctcctggcctccccctagaagcgccatgtcagagaggtgaacagacttcatgtcccactggccccgggccccgggtgggggcacgaggtgggctggccctgagctccagctaccccacacaggccgtgggatcccctgtgtaccaaggggagactgaggtggacacggccctcacgagagccgggccgcgggcggcacctgctggggcgtggccgggggacaccagggcctgaccagacgtcatggacaggggccgtaggcctggtgggggcaagggtggggatgctgcggcgtttctctgcctgaccctgatcctcagttaagcaagggtggctgaggctgggggcatctgttggtaataagcaggcgcactgtgtccccaaagactgggaggggtggagtccgcagcaagttaaaagaagggaagggaagggccgctaacgaactgcaaacgacgccagatgggcccaggctcctgccactccagaagcttctcttttgtcaccatctgggagcatgagcacagcagggcgtgggagggggcggaggaaggcgggaggagggatggagcgatagaggagggagggcaggaggaaaggagggggtggtgggagggagggaggactggggcagcggagggagggagggcaggaaaaagcagaggaggcaggggcgggagggagggagcgagggtgggaacagaggtgggtgtgatgtggggtccccttggggagggactgaggggaatgagggtctgaccctgtaagtgccctgggacgaccagggcgtttggaatttgacagacctaggtttgagccctggcgccctctctccactacctggggggaacccagagcctcagtttccccacctgttaatcaggaacatggcagtgcctacactacaccttgacagaggccaacaggtctgtgagagaccttcctgaagcactcctcctcctccagggacgacaccccgcgattcctcctcctccagggacacttcaaatccctggacgacgccccgcgattcctcctcctccagggacgacgccacgcgattcctcctcctccagggacacttcaaatccctggacgatgccccgcgattcctcctcctccagggacacttcaaatccctggacgacgccccgcgattcctcctccttcagggacgacgccccgcgattcctcctcctccagggacgacgccgtgcgattcctcctcctccagggacgacgccccgtgattcctcctcctccaggggacgtttcaaatccctggacgatgccccgcgattcctcctcctccaggggacgtttcaaatccctggacgatgccccgcgattcctcctcctccaggggacgtttcaaatccctggacgatgccccgcgtgaatctagaacatgcctcacctccctgtagtccccgctacctgggaggctgaggtggaagattcccctgagcccgggagtgaggccccgttctttccgcgtgtccctccacgctgtctcctcaacagcctgaggatgattccattttgcagatacagaaaccgaagcacagaggaactggcctcacccaggggccaacagctgctaagtggcaggctcgggctcaagccagggagcatctggtctggtctgtcctctggacccccgaggggaggcctggcccagcagagatggagcccacagcagtacgggcagtgctcaggctgggcccgaaggtgtggccaggctggcagctcccaactaagctccacggaaccctgaccccaacacgtgctcggcagagaaggtcacatggtcagacacatttggggaacctttcctcagctcctgctagagatgtgcagccgtcttggggaaatggagacccgcagagatggcagtctgactccacggcactcccgtgcccgtcccgtctgtgtgtgcgtgggaatcactctcccatgggaatcactggcttcattcattcattcattcattcattcgttcagagacagggtgttgctctgtcgcccaggctggagtgcagtggcgtgatcacagctcactgcagtctcgacctcctggattcaagcaatcctcccacctcagcctcccgggtagctgggatcataggtgcatacaacgctcagctaatttttatattttttgtagagatggggtctagctgtgttgcccaggctggtcttgaactcctggcctcaagcaatccccgttcctcagactggcatctttaaaaatgcaggctctgattcagcaggtttgggccgggccgagagcctgcaaagctgacaagccccgcgtgctgccaccctggtccacggttgatctgggtgtgaccatctgacctgctttcacctgacacctcttcatccatcggcctgcgcagccacagaagccccttcccgcctgtctaccgccctcacctcccgccctcacctctgctctctccaccccacgtattctgttccagtcacactgacccctctgctgttcctcaagcacagcgggcgccccatacctcagggcctctgcacgtgcagttactgctgtctggaaaaccctgcgctggctctgcacctagctccgccctcatcctcagccctcaccaacacgcctccaagcaaaggactttcggaatacttctccaccacgtgcagctgcagatttgagagtggctgtggaccgaacgccttcccaccccagggtgctggctccaggagggacctgctgcatgtcctgggccctatccccgagccttgcccccacactggcacgtcgtcagtgctcaaaaatcacccgtggagtgagcgagcacattcggccaacggcaaccagaggcgaaccggacagctctgtcctgtgctggatttaagggctgataatcatccggtctggcaactaattttcaggccttaactagtaggagtcaaccctgactagtcagcagtgctcccctagggtaccacagggtcccaggttggccaagatcgatgcctcacacctcttcatccacctgcctatctggccacttaagccccttcccgcctgtccaccgctgtccacgctggcaaggagtgggattaaggggccttctagggaggctcccgcagcacgggggacgggtttcgcattaccttcaggaagggaatgacaaacggccgcagagggaagttggtggcctcctgaagcttggaatgaaactcctcgatcgtcaatgtcgagttctgcaggggagaaaacccacctcacatcagcaccgctcggcatgtgagccagcgccgacccacccatgcctgaggaggaggcttccgtgttggaggcaggcaggcagcccaggagctgggcacggcctgagagggtgcaggtggcatcgtgggagcgggtccacgcccggttgtcagcgtggagcccatgtaaggagtggccgtggctgcaacctcattaaacggagggaatatgcatgtcccaaggccccggctgtccctgcccaactcaccaccaggcccagcaccagtgtgcgcacgcgctccccaatctctggggagatgtcgctgccaaactgctgcagtgtggtgaggaagcgcttgagcttgctgagctgccgggccccgcaggctgggggcaggtgctgtgtggacaaggaggctgtggacgaggtggccgggccattgctgaagccgttgggtgtgcacggtgcaccattgatggctgttggtgagtggctgctgccgttcatcactgcaggagggaagcggacatgaggacacaaaggtgatggtgacaacacaacccagacggcggcgacagtgagggaagcagcgactaaggtgacaatgtcaaaagtgacggcaacaatgatgagacacaaggacagtagcgctgaggatgacagcaggagccctgggcccgcccagggcagctgagctggcccttagcatgctgaccatctgtccttccggccctgctctgagaggtcacacacacccccttacagacctggaaatggattcccagggaggtgaagcctctttgccccaggtccccaatgggtaagggctgggatggcacccacaatggtggtggccgtggaatgactgcgttctgagtgtggcttctcctgcctggcaccactcttgggacttgctctggggctgaagtcaggcccttcacacccagcaggggtgcggcccctacgcctggcctgggagacaccaaccctaccaggctggctcaggttttcactgtgaacagggagcaaggggcttctccacacgtcgggggcttgatggctcacttcccactttctggaggcacaggagacttggaaaatgagaagtcgctcatcccccgaaaggccagctaccatcacctctggcatgatgttcccaagcaatacccccacccccaatcaggcatctcccagccctgagcaatgtccccacaacaggtgcctcccagccctgagcaatgtgcctccccacacacaggcgcctcccagccctgagcaatgtgcctccccacacacaggcgcctcccagccctgagcaatgtgccccccccgacacacaggtgcctcccagccctgagcaatatgcgctgcaggtgctttccagcagagcaatgtccctcctacaagtgtctcccagccctgagcaatgtcccagacaggtgactcccagccatgagcaatgtcccagacaggtgactcccagccatgagcaatgccttcatttgcacacagccccaacgcctgctaatggggttccagggggcagaggagctgggacacccaaggacacactgggtgggttcctgcccctggcggctggacacgcagatgcccgtgcacacaggccagtgcatgttgaggacaagcaggtgacataaggaacagctgatgagcgcgctgcagggccgcctgttggccactgagacgtgactgcctggctggccctgctattggggtcagtgttccaggggcctggcagacatggggctgctatggaaagtcccagggccgggcctcaccccttttctcaggtgacagagctaaggccaagcctcttgcaaggcggccagcgcacccctcctgcgcctgggacacccgcaccccgtgcccttggcctcaggagcctgaggggcggcctccaggctctgaaggcaggtcagaggtcacagggctcccaagtcccttgctgacaggggagggggactggatgcctctgggaggcctgaagtcctggccagctccttctgtcaggaggactgaagccccgcacacactcacggctggctcccgcctcctgcagaaggacacgctccctacaaagggtaccaactcccctgccctcagagcgagccctccatttccctgcctccactcaccccccaccacccttacacacatgcacgcacacatgcacacacacatgcatacatatacacatgcacacaatgtacacacatgcacgcacacatgcacacacacatgcatacatatacacatgcacacaatgtacacacatgcacgcacacatgcacacacacatgcatacatatacacatgcacacaatgtacacacatgcacgcacacatgcacacacacatgcatacatatacacatgcacacaatgtacacacatgcacacacacatgcacacacacatgcatacatatacacatgcacacaatgtacacacatgcacgcacacatgcatacatatacacatgcacacaatgtacacacatgcacacacacatgcacacacacatgcatacatatacacatgcacacaatgtacacacatgcacacacacatgcacacacacatgcatacatatacacatgcacacaatgtacacacatgcacacacacatgcacggctatgatgtacacgctcgtctctcttgctccactgtggccccaagtgcccctctccaggggatccacccctcacccgtgctgagagtgtgggtctacgggtggggggcagctcagagccacctgctccctcagggccgaattcctccgaggccccagccgtgtgttcgcacctgtggctgagacctggcggggcctgtgtgcgccgaggaggaggggaaaaccctttctacaggatggagacgcccctgggctgggctggtgcagcggctccccctgggcagccggcaggcaccagctgtttccttcctgtgccctggatggtggggggtcttggtgtacccttcagatcaggccagccctgcccatcctgacctggcccctgggaggtgacccctgctgagtgttgtggcctctgtctggacgggagggaacatgggacgtggggacctacatgccggcccccctttctgggctgcgtccccacagctggggctccggctaggccaggcctccctttctacccgctcctgcaggcctggactggaaggggccgcaccctccagagggcactgaccagcccgtacctccaacaaggcccttctgaggggtcaggccctctctaagtgtccctccagtaacctttaggtggccgccatcagcttcctccactccgccttcccagaagccgcctgaggctcccaccttcccgacccgtggtctagtggcacctgcgaagtgcgcccgggtcaggaagctgtgctgtggcccgggctgggctctacacctgcacacaggctgcgcggttatcacacacatcccatgcggcaaatgggctccgaggaaccgaagacacacagcagggcagcccggctcccccagattgcctcccgtccccggcaggccccacacaccgagcaaacagcgctgggcacagtggcacaggggggaggccggccctgtgctctggatgttcttggtggagcggggggaacaggtgtgcccacgactgcctcccccggggcccagcgctcactctgctctcactccagcctgggcctcacagatacccactgcaggggctgtgggaggccaggagggcgggggatgctacagaggccctcagacacaccagcgtggtgaggaagtccagacagacacggccctgccctcgagggctgggggaagctgccctggttaggagtgaggaccggccgccaggcccagacgtgccctgtgagtcagactcggcgcctagcctcagtttcttcatttgcaaatggctcccaacccatcctggagttccaagtggggctccagggaccagaggacagcatggcagtgacctcctttgtactgtgtgtccccagccagagtcgctcaggcctgacctgggcttccccagcctctcctgcgctgcccaagtcagccccccagggttgctccatcctgactggttttatgggtcgggtgttgtgtgaggctgttggcaataaacagcccccacacctagtggaattctggaaaccactaatcgcaggtcagatatggcacaaaaccttgagtgcacgcgtggcctcagactttccctacgggggggctgcaggattgagacatctctgttgctggggccgcgaacctccacacgctgttctgagcggctgctcccctcaaccgggcaacctgcacagggggtagcctgtctgcgcccctggcttgaacgatcttagcagcgccttcctgggctcaggatggacgcaccggccctctggagcgcgcggcaccgataacggcgtcgtattctggggctttccctcttctggggggacagtggacgctgacacaggatgcaccgagcccctggtctctcgccttctgagcctctgtccggaggaccccaccgcgctgccgagtttccctctcaatggtgagctccatgtggccacacggtggactgtgacacacacaccccgtcaagactgaggatagccacttgcggtcacccagccaggccaggagatggcccgtcaccatgggagacctcactgcagcgggaggctggtttctccagaacacgagggactgtcgtcaggactgtggaccttccagcagcttctcagacgcgccacagtgcacgccggggcccctgcccaccgccccggccagcctgggcctggccctcccttaggtgcgcttaccagccttgccccgggtgcctggtccttccggcggcctgctcgccctcgcctgcccgcgcactccctcccgcgctgctgggcagtctcagcagctaaagagacgccaaaaataaccccggcacaagcgctttcattcccacgacaggtgtgttcctaagttagaccgcacacgtgtccccagctgaggattgggggcacacgcgagcacccccgcggctcccccagcctcagagccttggtgggggggtcagatgcgacagaggcaccctaacgcagcccctcctgtcacccctgctccttgctgtgggggctccgggatctgggattcaccaactttgccatccataagatcacagagtggatgacaagagccactgtccaggagctgcacgccaggcgcgagtgcgtggccaggcccatcacagaataatggctgtgaaaaggacagccctgtgcaacagaaacaacgcacagttgttctgctgccctcgttcttagagccgggagtgccacgacagccacacctgggccatgctgccaggctggctggtagtgatggaccggagtctgtctgatgggctcaagcatggctgcactcagtggttgacaaaaactataaccaccacctggtaagagcccatgctccctgaacgcccgccatgggccacgcacgttgacagaaacgtctgctggtgactcaagtctgctgagctctcagcatgtgcccggccccaccatctgacggctcctggagatcaccattggcactaggggccatgatgacttccattttacaggtggggaaactgaggcacggggggtggtacctggccaaggtcaccctggcaggaacagttgcagctgggactccaggtaggtggggtctgccctagcaatagctgagctacaggctggccagggacagtgtctcgcccctcccctcggcactcgcagtcagccccattggccatgttttgctgctggggaaggagagctcagagaggctctgctcctgcctaaggccccgcagcttggagcggagggtctgtgggatgcagcgacccggcggctctgccctcctgcgccctcttctccctaaggaggcaagaccaacacaacagaggcaatgctgagggtgcggaggccggggaggagagctgagcgcccccagggcagcagtgttgggccagctgaggatgctgcggtgaagacctctggggaggcctgcggtttttgttattttacttacagagacagaccatagaccattttaagcagccatgaaaacggccgtggggcagcgtcgcaggcccgtcctctcgatctgtaagcaaaataagaagaacacgctgtcaggaggggcgtgggcaggagactctgccctcaggggcgcccgcggccaccttttcctacttctcagagtgatttttggtgggggcgtgggcaggagactgccctcaggggcacccgggccgccttttcttgcttctcagagtgatttttgattttcggaggggcctgggcaggagactctgccctcagggacgcccgggccgccgtttcctgcttctcagagtgattttctgacggggctctgtcaccacctggggccaggccactcccctctccgagcctcagtttccttctctgagagtgggtgatccctaagggccgttctggcagcactgttccggagtttacaagaaccgcggcttctctatgagcaggggcggggccccttgttttcatcgtcctcttcccagaaggcccctgtgaccccatgagcaccatcctcagggacctgggccgaagccgcgtgtcctaaaagcgacctgagactcggcttggagtctctgaaacaaagccctgggtcggcactggaggaggaagcaccaaacaggaagaaagattcggctgggctcagtggctcacgcctgtaatcccagcactttgggaggctgaggcgggaggattgcttgagcccaggagttcaagaccagcctgggcgacgtagggagacccaaactctactatataaaaaaagaaagaaagattgaatttgttcgagctgaagtcagtggcgcaggccacaggaagacaggctctagtaaagacgggtagtgagttctctgtcatgggggtaatcaagggcaggataaagccttagccctttaagcgtcctcccagctttagaggagcttggtctgggtccctgctccttatatgccttccccctccccaccccccaccccacagcagcaccgcagcttcaactccaagatgaatttgcgcccagggctgtcactgggcaagagaaacttcggccctcaagtctccgttcagactcagtctcccatcagcttggctcagaggccagtccccggggaggagcctcccggcagggctctgcaactgagctgtggcccctgaagggcacccaccacccaccagccaggggcaggggtgcggccaaccacctggctttcacggaattgtgtggattaggggataaatctgaggctacctcaggggtggccagagcctcagactgatgctgctgacagcccagtgggactgaagcatcggcttagaaaagaaaaagcacctgcttatctctttcataaccttcacgctccttaaaccagctgggacctcaccccaaaaacatgaccccaaggcgggctgggagtggagggagcaggaaggaccccagccccaggcatgccggctgccctcacatccgttcacaggtctccagaagcagagcccgacgctctgctgatcccaacccacctccagccaggagcatcagaccggcaccttccaagcagaggctgctggtccccagggaagagcaggtgggggagacgcacccttgagggtctggggaaccaggctcagcccacggtgtttgtccctgacagtggggcctgaggttgtctgtggagcgggtgttttaggcactgcgcccatggccgggtctcccgtggtccgtcctgagcgtttcctcccccggggctggggtatactgcaaatttaacacagcagcggtctccctctacctatgtgggctcggtgtggtcgcaagctgcctggtagagagacggcccgtggtttgtaccagaccggagggctcttccgaagagagggaagggtgatcccagcccggccacatcgccgtgtgacaaggacatgtgagaaaaagcccagccagcctctcactagaaaccgtggccagctccgcagagccaggacctgcacgctgggcccgccgtcccccaggacctgcaaaatcgtgagtgcggcgtcccgactctctgaggcagggccggccccgcgggtgcagggagtagccgttaggctgtttggctcctactgagtgccgggcacatttccagctgtacctgcctctgggcggcacacctgggggcaccccattgctgggccaccccattccccaaccaagtcgggaggctgactcggagccaacatcctacaaacagggccgcaaatctgctgcctgaccgcacagccagtgctctctccagatggaggggagatgatggccaaagccctcggcggagcaggcccccagcctcagcggcagagccagggagggagccaggcctggcctatagccacccggtgctctgaggacagtcgtgacgtaaagggactgaggaagcagctctttctggcccgtcagggacccggggcaagcaggacggaagtctcaggctccccgcccagagaggggcttcgtttgagtttcagagcctggggagggtcccccaggtacggggctttctggccgctgcatgtggaggtggtacatggagtctcccccctgcagacactgagatgcactcctgagcccccagccttgagggacagggacgctgccaccccgccggcccagcaactgggccaaagagcaccaatgtctgtcctcaaagccaaggctctgcgggtgactgtgatgagaactggctgttccctgccccacagcctcccagggcccaccatcggcggctctgtgcgccaagcacggccaaccccttgccagggccagcaagacaaggcctgacagcttcttgaggtcccacccttccggcctcctgtgccaaggcccccaccctggcccccgtgctcagccgggctgtggagctcctgagatctgagcccctccaaggccagagctgcctctgtggtccctccacggggcctgtacgcaggtgacctgctgtatgaccctgcggaagcccctgaccccatccgagttccacgttctctctggatgagcctggcattcctaggcctgccggacgaggcaggaagcctgaggcacagcggccggctttgacccatggccggccctggtgaaaggcctgtgtggactcacctggccccaccacagccctgggaggacctgcattgcagaagaggaagcccaggccccccggagggcaaggacatgacccggagctacccagtgggaagcagggaagctgggatttgaaccggccaagcctgggctctgggccacacgagctcctcacactcagggctcacagaaggtgcccgctggctccgggcaggaagctcagaatttcaaacaacacaagggcctcccctgaaacacctggccctcggctgccaggtgggggctacttacgtgtgtgtggcgtgaaggagggggggcgtgtggccccctgggatgcggcaggcggtgggggcggcatgctggggggtgtggaccggggctgcgtcttcacctccgctggggagtccggcatcgctgaggccttagctttcctgtccactggggctgcgaccaacggagaaagaaagagtcggtgaagcaggctaagtgcaaaggccagggcccgcagccccacggttcccagcgaaggccccactgagtgtccgcccagcgctggggcagtctgccccaggtgtcctgacaggtggctgacgtcccacgtgcaggatcacgggggcagaaccaggccggaggacgggcttgggccagctcatctgaggtggccggccaggctggagctggggccctcggtgtgtggccgccctgcgagagccgtgccccactccaggcttgaggcttctacagaccagggagtgggcagtgccccgaggcagcggtgccttgctcccacctccatgagcatcccccggggggtgttcagacagacctcagcctcttcccccagtcctgattcagcaggtcaggctgagacccagaatttgcatttccggcatgttcccaggtggcgctgctgctggtctggccctggaagccatggttctaagagtcccttccactttcagatgctagaaggctcccctgggctggggggcgggggacggtgtctgcccagggagaggccggcaggcaggccatttagggcggcaaaacctctattttaaccgtcttctgccccggtgattcacaggacagccaagacagaggcggcattgacttcaggatggccgaggcctggctgcgctgggcgcagcccccggcaggtggtaacgccaggacacgtgattaatgagaacctgcagctgaacaagattccctcgtggtctgaggctccctgaagtctgagaagctccacccagggccagctgtgtccggagacggcaggaaaacgctcaaggcgctggtgggccgggactggggggcacggagcccccttgtgccacccagagagcaggacctgcagacaaggttaaccgaagggcctgcagcacagacgtgcccgagacaccaggaggccaagccagcaccctgtctgcggcattttctgcagggggtgcgggtgtaagccccagggcctccccatttatcttaaggcaaggtcagccagtgccaaagcaaggcagaaagacctgctatccgtggctgagacttcgggggcctcagcggcttagagcagcaaggtaggcatcctcaatctgctgaataccggactgccccgcaccctgctcctgctgacacctgtgggtctcacccacgactgccccgcaccctgctcctgctgacacctgtgggtctcacccacgactgccccgcaccctcctcctgttaacacctgtgggtctcacccacgactgccctgcaccctcctcctgttaacacctatgggtctcacccacagcctggggcatgaaacaggtgaggccacagttgggggctggtatctgtcgtgttattagtcaactgtgggcgctgcccctgcttctgcccgttccccattcccggggccccagcaccatcgtcagacggagagatccacccagggccacggccacgcggactctgtggaaggtgacggataaatgacttctacagcgatcacatgccaaatacggcacaaacctctgctgatcctcttgccgccggctccttttacagagaggcagagaggttcagaggtgctgaggtcctgcccaacatctcagggcagtggcgcctgggctctaaccggcccctggtgctccaggcaggagtggagcagtccccctctgctgggcctgtggggagtggtggggggaggaagcagccagtaaacagccacaggcctcgcggcacctgctgtcccctccgcacagccgctgacctccctcgcacagggcgccctgctcctcctggccacccgcctgtccggaggctgatggctgggcacacgtgtggccacagctgtgggggccatcaacaccgcctggctgcagggccggtggccagtccctggtgacaaccaaagaaggtgaatgtggcagggtgttcctgtggtgggggtgttcccggctgggggggggggcgttcctgggggggcattcctggggggggcgttcctggtgggggcagcccttccagaccaggctgcccttgggccagcgtgggttgggcatgcccagaagggagcaggcagggatgtggccgagagcttcaaacgccaggctggctcgggggacacaggtccaggacactggggatgccccctgtttggactttccaaagccctcccatggaggcggctacatttgagccacgagacttgaataaaacagaagtggatgcagagagccccactggggagctggtgccgggcgctggacgggcgctcgtaggatggacggacatgccacatttcctaaggtggagagggtggccaggagaccgctgggccgtcatgccacggcgcaaggagtcaccacagccgtcacccaacaagggctcatggccaccacctgcgtgctcacggccaccacctgcgtgctcgtgacactctggatcccgaagctagagcagacagtgccctgccggcgccctgagcagtcggggacttcatgtggttccctttgggcagaacaggaggctgtccctttacttcagaggcctggacagaggctcactgcaggaagatccttctcggtgctctgcagatatcgacgactcattgcatcctcaccgagaccctctgcggctgatgctgccatcagcccattttactaggacggaccaggctcggagagatgaagtcatctacccaaggtcacaccgcgagtgtgctgcgggccgggatcggaaccacgacctggtgttgcccccacagggccaggactcggcaggactccaaagtctccgcttgtcatcaacacgcttgcctccttttaggcctcaaggtacttgcaaagaggcagcaggtctgggattcaaacctgaggccgaacggaggctgcaggggcaggaggccccgtgcctgaggaacaccctgggagctggtggtgtcctcccctccgttctccaggccccaccccgggttgtgcgggggcagctgtgcaggagatgggacctttccgggccccaccccggattgtgcgggggcagctgtgcaggtgatgggacctcacgggtgtctgttgaatcctgtgtgagtgctcctggctgtgtggcctagggagagcctcttcccctctctgagcctcactttccttcctctgtacatgtggaggaagccaggtgacaggaagatgacgcggagttccccacgccctgccttggcaagcaaggaaaccaggccaaggctcatggagcaacgtgtggccgggacctgctcctggcgctgcccctggcacagactctacccgagaaagcagaaagtgacaaggaccctcagagaagatgaggggtgagtgtggaaaggtagaggaacagcatttgtggccaagagaacagcctaggagttggccaggacctgtggagggacctgggaaggaggggggtgggggagtgggcagcggggagtctggagctctgcacagcagcagctggcgccgtctctggggcgggcacatcgtctctctcctgcttaatacccttcagcagcttccactgtacatggggcttcaccagcccacacccactccatgacacccatctccctgctctcccccagtgcggggctcagggccatgcacgaccccccaccgcccctcgttccctctgggattcagcttcaacctcacttccccaggagaggctgccccgcccccgtgaagctcttccatccttccctgttcagtcctcaggatgtcaccccacactgggcggtcctgcctcttgtttgacctgtttgcagggtctctgtgcttgactgggccccccaggatgcagctcgcccagggtagccttcaaaggaaggcccccagaggaaatgcctctttgggttcccccagcccccgcttaggggctggaggagagcaaagatggaagtggggtgagtggagcgccatgatcagggcgggcctgaggggaggtggggctgaaggaggggcggggctgaaggaggggcggggctggaggggcggggctgaaggaggggcgggactggaggggcggggctgaaggacggtggggatgagggggcggggctgagagctagtctgcggcaggtgggaggggctgggctgcccagctgcaggacaggtgctttctgcagacatggggggctggttgctcagggcaggagacccatggctgccctggacacccatttccttggcgctggctgggcagggaggcaccgtgggtccaccccacagccacagcaggaggctgagtcctgccggcctggcttcctcgggcaagccacagcctctctgtccatttccttgcctcttcaaaggggatggagatgaggccgtgcgcagcaggggggtccagcactctccgccatcactcgaaatggtggctattattatcctcctctatccctgcacccccaagcagtgtggggagtctctggagctcccaccggcccacagctccaccaaggccaactgcaggctcctctccaggctaagacaccgctagacaggggcagcctcgtccttcctaggtgcctggcttcccaccccattcccctttgaggccctgcacctcggccacaggccatttctactccgcagacccacttcgaggctcggaggccccgtgggctaccagcccacggctgcgaaccacacaggaagaggcctggccgcatcccctcgtccccaagaccacttgctgaccctgctccccgctccagccgcaagacggccccgtccagacacacggaggtgaataagtcatcaaaccacttggaaaaataaaatcgcacagagcttcacagtagacaccagtgtcctggtgcaatggccctgaggcaaccccgggggctcagcagcgccagaaaggggaccgtctctgtctcaaggcagaatagagaagtggcaggaagggctaatgtcacggaggaacctggtgccccaggcctattctcagcaccgtctacccgctgccccatgaggcgggccctgtcactacgcccactttctagacggggaaactgaggcccagagagggtgagtgacttgttctgggtctcagagcccagaagcaccagggcatgtgcctgcagcccccaggagattaaacggtcccgatgccagccagcctggaccctgactcagccttgctgggacagcccaggcatccagccccacgctgggacacgcggccctgtgggtgtcacataggccgaagggacgctggctcgtactggaggctggggtgggtggcccgtcaccatacagggtctggggtagcacctggggtggccggctctgaggcatgagcggaaggaccatctttcaaaccccaaggggttttctttccagagctcgaagtgcccatgaaagagaaacgaggcctccagcatccctgaactctacatcagctgcaaggggaccccggtccccgaggacacccacatgtattttcaaacagctcccgaggcccagcgctgcccgtgcagaagaaagcatggaatttggggagggctcccgaggcctggccgcccagcacaagggggtccctggggcacctgctgtccccaccctggctatcctcctgtggcctacacaagtatcctaacccctccctggctcagaacagcactgaggtcctcctgctggggtgggtggggtcagtctgggtcccagtcccttccctatggccctggctcagaggcaggtgggcagcgggtgcggaatctgacgagaagggctctgacgcccggaggggaggaatctcatacagaggaccaactctgtcctcacggattcttccgcggccctgagatcctgcgcttctctatcttacgagtggggaaacagaggcacagagaggctgaggagggggagagccaggtgtggatccaggtgacctggcccagctaccccttccccactggccacagagggcacctgcagcctgggaaccccgaggggaggcacctgccctcctggcctccctctgtggcttgggcctctgccaagtgtccttctcactccccctgcccatgactgacggtggcatcttctaattgtcccctcaccccagagcaggggctttgcctgtccttcccaccctcgatggctcaggcactggctctggacacagtgcgcccctctctgggcatgcctgagtctgccctgatgttgggtttccctctatgcggttttccccaaagggtctgggcatgcaggaactggtcagatgtctaaaggaagaggacagggagagagtgccagttcctcccccagccctggctgcagcctcatctgcctcccaagctcccactcatcaagaaagttcccagacctgccagacgtggtgactcacacctgtcatcccagcactttgggaggccaaggtaggcaaaccacttgaggtcaggagttcaggatcagcctggccaacatggtgaaaccccgtctctactaaaaatgcaaaaattagccgagcgtagtggtgcgtgcctataatcccagctacttaggaggctgaggccggagaattacttcagcctggaaggcagaggttgccatgagccgaattcgtgccaccgcactccagcctggacaacggagcgagactctgtttcaaaaaaaaaaaaaaggaaaagaaaaagaaaattcccagaccctggaggccgctccccggggcccatgggagaggccgtttctttcccagacggcacatccagttcccagcaaaatgtcactaacgggccgggagaggaagccgctttgcaggttgggcagagccagtgggaaagagcctgcaatgtgccggggccgctcatccatcacttccccgtccgtgggggcacccagcccgccctgcccagctgggaaacagccacagcccagggctcccagcctgggagttccagaactctccatggaaggaggacccatggacaccagtgcaagagctcatctttccggccttccccgcctcgtaccctcgccagctctggagtaacaagccctgcttccgctgtaaccttctttgacccctcacaaaagccttggggcataggacgctgggcaggtaacgcaggtgacctgtcttgaggcctttgcacaggcaacatagccacggtgatgacgtcctactgcgtgccaggcctgacctgagcattttgtgcagaacacctcatttcgtgcccccgaaagtctagaggctgtcaggtggggaaactgaggcacgggccctgggcacctggctctggatccgatcctctccgtgggtttggaatatgctcccggggagcggggggcaccggctctgcccttcctggagctgaccacaggccccaggcaggggaggaggagggcatggcctgcaaccaacccgagggctccaggcctctcctgttactccagccgaaccctcatcccaggatgccccaaagtccagcctcagaggcccagcaaggcctcttgcaaagccttttctggggctgtggtgcaggcagggctcggagatgctcaggacaggtccaggacgggctctggacccagaacagtgctgtgcctcagttggcccctccataaaagtgcagaattaaggggatgagctcaggctccgggccctgcaacctgggtgggcagcctcagtgtccacatctgtgcaatgggggtgagggttgacatgaatgcacgcgtggcagtcactggcaaatcccaggcaaccccagcggcggctgggacggaggacaccactacatcccgggtgaccccgacggcagctgggacggaggacgccactgcaacccgggtgaccatgacggcagctgggacagaagacgccactgcaacccgggtgaccatcacggcggctgggacggaggacgccactgctttaaacagctgtttattttccttcagaatcacacggtcccacagcttcctctgggaaaggcacagatgtgcaaagaggagaccccgagagtcatccgtccacggccgccctcccgcctcctcacagccccggagatggacgaccccgcacccacgctgcccctgagaggtgaggtcatctgaggtcactggccacggccgtgcagtgagtgaggggctgagccaggaatggagccccagcctctgaactccagcctctacttggccgggcagccgtccagtgcagtaaacccaggccaaggtaaacccgtacacttggatttctggggaaccagagggacgagccaccctccaacacatttcccaagagctgtccacggcggctcccacggcggctccccagctgcttggccagtgccacagtggcccggctgttcctcgcttggtgcctggctgtcccctctggcctcaccagctgtcccctctggcctaaccacacgcactaccccacacccgcctgtgctgtgcctcggtcactcgccgcacttgccccagggcctttgcatggcggtgtttctgcagggaatgcacttccaccaggtccccgcaagtctgcctctcatcctcacacctttgctgcaggctgcctccttcccggtgatgctgcagcccgcgcggcccttcaccctggctcccctcctgtcaccggctctccctgtagctctgctggtgagcccacccgcctgtcctgctccttctcttctcttgtggatgctccccgtgagctccaggagggctgggcttcctctacagcctacaacagtgccggccacactgcaggcattcagcaaacacttgctgcgtggtgactgagaaaacctggaaaggcacagcccactgaggaccggacactcccagcctcagtgtcctccggagccaccgtcatctgaaggcgtggggacaggcagtgccctcccacctcaggaagagctgtggggtgagctgcggatggcgtgagcagtgcagggcggccctcgcagcggggtctctgtgccactctctggtgcccctgaggggcatgtgaaacagaggagaacctggtgctgactccgggaagggccctgagaaggtctttgaccagcatcagacctggggctcccaggccaagatagaggcaaagtgaagggacgtggggccccttcttggcaggctctaggacagtgggtgtccccccaaatcccctcgtatccagatgaccaggaggcggctccctcccctgcccccagcccccagcctccagggctgtgccaagtgtggggatctggggtgggcagaggcggcctgagagcctcaggcgctgccctgcggccgcctccacatctggcttgtatccagccttcctgcctggcgaataagcagccatataaacacggggagcagtgccttctctgccatcggtctaggcagaccctcccgcccccacagggacaaggagccaagtcctatttctctcccaggcccttccaggtcctcatgggcctgacccagggcggacccttcctctggccccactcactcactcctgctgcccttcccgccgtggacaggaacaagggaccctgaccccaaggcctgtgggtgatgacgatggacggcacggggttgccatggcaacagagcggggccaggtggcaggaaacccagttcgcctcccgcgccgctgtgtgaactgactgtgaactcggggtgggggccgtccccaaatgtgtatgagtctctggctccccttgggtaagatgcagtgcctctttgggtggggtcacagcaaacaaaaaggctttcgtaaactcaaaagccctctgtggccctgccacggggacgtcatctctggcgatctgaaggacaggggcagggagggaacgggaacctcaggcgccctctccctgcaggaacggagttggcttttccgtctcctaatctggcctcagttttctcatctgtaaaatgggaatggggatggaattcccgcagaatcacggagggacgaagtacatgagctcacgaaaagcgtctagaacagagcgcctggccgctcgccctggccacccagctgtcatgcttcgggctatctgtccggccacaacggccgcgtggagctggtgcaggtggggcttgtctttggcactgtgcccagagctggcccataggtgacactgagcatcagtgttggggaaggggacccatcggagagcctctggggcacagtgaagaccccccctcctgcctcgcagctgtgtgggggaagctctgttgcccagagttggctggcagggcccagactgcccaccggctgccatcaccaacacgaacaggtacccagggcatgccttcagccggcctgggtgcagaggtcccgtctgtcacagaagtgctgctgaaccgtagcagacgaaaatctcacaaactccctccgggccccggcccagggcttcccgttggaaggtgcacaggccggcctctgcctgcaggctgggcccacccgcgcctccccaacccactacgtggctccaggcggacctggccttgcctcttcctttcccaaggagagaagaaagcctccctcatgggtttttgaggaccaagaaggctctctggatagctgcaccctgcaagtgaacccagggctcgccaaagaaatgcggaagatgggacaaagtgtgctgtgcgtcctggggccagatggggacagatgggctgggggtctctccgtcagtcttggccagccacgccagctgtgcttctgtccctcccgttggcctcagggccttggctcctactggaatacttccctcgatctctgcatagccgtctcctcatcattcaggtcttggcgcaaatgtccctcctcagagaagccttccctgaccgcccatgtccctgcccccacgctctctgccccatcacccatttttcttctccagccactcgtcaatgtctgaagcctccgtctgtgttggtcctcgtgtttacgcccgtctcccccagggcagggccctgaacagcacctggcacacggcagggccccgtaaaggtttgctgactggcgcataaggacaaagccccctatctgcctcccctggcagccctgtcctctgcaggttcaacggggcggctcgctgctgcaggacagagcctgggctgggcttgaatcgaggcctgtcccctctgccgtgtgagcccagcaggcagctcccctcatccattaagtgggaggaacacacctcccgggggtgcgtctgaggaataaggagctaattgagtctgtcctgcagcaggaggccagggaatgccggtcatggctattcagggccctctcccccaaggcgcgtttcctgctaatggcctcgatttcccaccctgccaaagcccctgccctttcgatgggattgcagctcttccagtgcagaggcggggtccacttccctgccccctggatctgggctggccgggggacttgctttggctgggggcaggatgtggcacaagggatgtcagatgaccctgagcctggacgtcagcggcgggcagccccactagccctctgtggagcccccacgtgaacacgcccaagatgagacacacgcaggacagggttggcccggccacttggtggagctggactgaccgtggctgaccacggaccagccagcaaacccagccacgcccagaagaaccacccccctgagcttgccaaaactgccaacctaaagaactgtgagccaaagaagggtggttgctttgagccactgtttgagggtagcttgttacatggcgatagctgactgatacactttggtacttagaatctcaacatatcagagctgcaagggacctgagagacaatcaaatttcacagctggtgagagggaggctgggaagctggagaagagaagtgacccatcttgtctctagccgaaccaggcctcagatgccaatgctgcacttgccctccgctactccacacctcattcctccgtgggggggtctcagccgggaccagcaattccaccttcaggaatgcattctcaggacatgtgcacaaacagtgatctacaaggatgtttgtcacagcatcgtttatgagaatgacaaacggaataaatacgatgactcctcagagagggctgggtagataaattatctactcgacacaaaactaaggaacctgaaaatcacaccgtggccaccttcattttggaaagctgtttgttggtatctgctgactggaacagtcacagctgctggaatagccggctcactcctgggcacagaacctgcagaagagccaacccacagacacaggtgcctccagagcaacaagccacagctgcaccggccacttcctcagcaagcgtgcaccgaggtagagggacacgaggctgcagcacggccatacaatggaatacaatacagcaaggaaaaaggacaggcccaccaagtacaacactgcacacggtctcacaaatgtacagcactgcaagcggtctctcacaaacgcggtggccaggccccgcagagcatgggatgcgagagtccgtttctagaaaattcagaatcaggcagcaacactctgtgatgctagaggtcaggaatggtggccaccctgacagcgcagtgaccagagggggatcggaggccttggggacaggtcggaaaacgtttgtcaggcccatagccgtgtgcacgtgatgctttgtggtgcacacttctgtgtgcagtgctgcgagcatacatttaattgcaaaaatgatgtcacgggacgctctctattgacatcccctatgagtgaacatcaacaaggcgacaaagcatgaggttctattttggaaataaaaacacgcacagaaagacgactagaccaaaaatgtgatcgtggttgccgggcaggacgctgtcgcagccatcacagtcttgccatgtttttaaagcgaccagggtgagtctgggcctgtcctctggcttaagcccagagcccctagccatcaaaggtgccatcaaaggtgccctgaccctctgccctgcaccctgtggacagtgcccagggcctggtcttctacagcaccctgccggttgagcaaagcctggaaaggctgggggagagtggtgagctcagaggctggagtgaaaaatcttccctgctccccaaagggccgcaaatgggacccagatgtctggggcctgcttgccccgtggccgcacacaaaggaagcacattccttgcccagctgctagagctgcgctgccaacagcaactccctgagcgccctgggggaggtggccccacaatctgggccgcccgctgccggggcggggtgggggtgggggtgtggctgccagccgggggcaggggtggagggaggaaggggcgctgtccttacccagcactggccctggcaccctgggagtcctgggggtagcgggtcccttctcttgtctccatgcccccaagccaccaagggaggcagccgaattgcagacaagcaagcttccgttgaggatccgtgtgctgggggtgccgccaggtggtggcgtgggtgtggggtggggaggaggcgtgggtgtggggtggggaggagatggggctggggggcctatgggtgggtcgcggggtggggaaactggtgggtggtggcctcctgctctgggtctgcctatctgagtgaattctccagtctgatctcaactcagaggagggacagctccttcaggagctccacaagcagcatggaggggggagcgtggaggggggagcgtggacgggggcagcgtggaggagtggaacgtggaggaggggagagtggagggggcagcatggacgggggcagcatggacggggagagcgtggacggggggagtgtggagggggagcgtggagggggagcgtggacagggggagagtggacgggggagcgtggacggggggagcgtggaggggggagcgtagaggggagcgtggaggggggagtgtggaggaggagcgtggagggggagcgtggacgggggagtgtggagggggagcgtcgacgggggagcgtggacggggggagcgtggagggggagcgtggaagggggagcgtggggggggagtgttaagggggaagtgcagagaacgagcagacacgtgggctagacacagggtgggcgggcgccctggtgggctgtgtggctggtcacctcagtcagaatctcgccctctctgggccactccctgccaccttcccctctcaggagcgtcacggtgccctctatccattaggcatgtgtgcgtgtgagtgtgcatgcatgagtgtacgtgggtgcatgggtctgtattcatgtgtgtccatgggtgcctgtgtgcatgggtgtgtgtccgtgtgtatatgtgtgcactcgtgtacacatgggtgtatgtgtgcatgtgtattcatgcatgtgtgtattcatgtgtgtgcatgggtgtgtgtccgtgtatgtgtgcactcacgtgtacatgtgggtgtgtgtgcatgtgtattcatgcgtgtattcatgtgtgcgcatgggtgtgtgtccgtgtacatgcacttacatatacatgtgggtgtgtgtattcatgtgtgtattcatgcgtgtgcatggctgtgtctgtgtatatgcacttacatatacatgtgggtgtatgcgtgtgtattcatgcgtgtattcatgtgtgtgcatgggtgtgtgtccgtgtatatgcacttacacatacatgggggtgtatgtattcatatgcgtattcatgcgtgtgcatggctgtgtccgtgtgtgtgtgcactcacgtgcacatgtgggtgtatgtgtgcgtgtgtattcctgtgtgtattcgtggggtgggtgttgcgtgtgcatgttgtctggtaagggctgtgtgacctcagggatggctgcagaacactccggcctgagtgaaaggtggtctgatctgcagacagagcttctctggaaggaagaagggcggcccctggggagaggtgggtgggctgggtggggaagggggatggggggctcctttgccttccctccttgcctcccagccctttattgtatgccacatccttgttttatttttaaaaatgcctcttggccactggcacaggcccctccttgctacagcccctgggggtgaaggcgagactgctaggtggagtggccaacagagaggaggtcaggctggctgtcatattggttactagacaggcgtggaggggccaacagaggggagggcagggtctcgaacgttgtatcagttactagacgggcgcagaagcacggattcttttagaaaaagagggctgcttaggaggctgaggcaggagattcgcttgaaccagggaggtgggggttgtagtgggctgagatcccaccactgcactccagcctaggtgacaccgtgactctgtctcaaaaaaaaaaaaaaggaaaaaaagaaaaaagaaaaaggaaaaaagagaagaactggtggaatctgagatcatcggctgtcggctgaccccaggcccgggctgcaggagttagctggccctgccctctgcacagccacatgcctggacttaggtgtggagcagaaagtcccacagacaaccccagacacaagcggagcggagaaccttccaggaagaggctgcacctggttctgaaggctgcggaactggcaccgtgggagaaaggtgccaccgtgggaggggagggcctgccccggggagggcacagaggctgggatgctggggacaggcaggtcacacagccctgggaacgggaccctcccacgtgcagggcctgcagggaaggctcagctgtctgcggagggtctggaaacccctggaaacctgaggcctctgttaggattttccaccaatgaggcgccaggggaggctacaccggttcccaaagtgtcgtcgctgtttaaaaaaatgtgtgaattggctgcaaatcaccttgaactctgcagagggcggctgccaagtttaaagtcagccactgccggtgtggacgctaaggaataattagggtctggcggctcatggtgcccctgcgtcaagtcaagaatgttttccctgaagtgccagaatgttcccccagcaacccccagcagtgtcataagtgtgacatgtgatgtgcgcacgtatgacacacacatgcagacgagagtgtgcgtgaagacgagagtgtgggtgtggacgacagagtgggtgcggaggagagcgtgggtgcggacgagagtgtggggtcacaatcccctctgtccctccggggtgcgtggagggaccccaggagacggtgcaggcgaaacccacaaatcctagcagcccagacaggactttagaggtggcctccctggagtggaggagtggacagcctgggctggctttgccctggggcttcccgccacgtcctgtgagctggcatggccaggctgtgcaggaagtggcccccatggagagacagcgtggcctccctggtgctgactgcaggaagcccctgggaccccaggaccctgggccggggatgcctgtggcttttctttctcacccccacccaaatgcaaacacgcgcacaaatggccttttgcttctcagttttttgacactgaggcaccaagctgggccctccctgatccctgcaggccgggggtgaagggaggcctgggagaagaccccaccatggcctgggccctgtcctcttgccctggcatcagaaggggccctgatccccctgccttcgcagtgtgggctgtggctgcccctgggaccagctgcatcacaacgaggtcccagcccacagccgtggggaggccttcgccactctcacctcctggacagggtggggctcccgcccctccagagcccacacggttactggcacaggccctgagctccaagcgtgcggcccaccaacctcctcaaaatttgtggctgttgctggttttatgttgtgagccccacacaggaggctgggtggcctccaatgcctccaggagggagggctgagcagagctatgcccaggccagagcccccagcccagaacattctgtcttcttgccctaagaacttttgaaatgtcccagaagttccatggcaggtcacccacatggcccagcccggcctcccacggcagggggtgccgagaaccttggagccacacggcctccagggttggtgctgagagaggtcggagctgcaggctcgccgggttatcagtgtaaaaaagtagaggttccccttcaaagatactttcctccccgtctaattaggaataaacagtaacttctcttagaagcaaaatttattcaaagacctgtgctgacattcttaaatatctgctagccttaataaagaaatcaatgtactttatgttcttagctcccacaatttagcctaagtatctgccctggcatgtttatactggtcgaagcaagcattaggtcacggcctgttcctcttccttatttgaaggtgtttttacctttctcagcattccacaaattacttcctccttcctttgttctcctctgcctttgcctcttttaaaaagttctaagttgcgagccaatcgggacaaatacagaatgtgaggtcccgttccagccaatggaaaccggacacagcagtaggtataaaaaaaccggacacagcgtcaggttataaatgaccctggtctccttcattcggtgtactctcgtggcaaaactgctggcgagtgtaccctttctgcagaaagtaaatatggccttgctgagagaattaaatttacgttcaagtgctatttctttgcagcaccagggaacaagcactctatttctaaataaacattcctaacatcagcgtggcctcaggcgctgtccctaccgcccggtattcactcagccttacgggtaagaagctcagtgcccatggccatgatcacaagggcaaaacccactcctcgaattctccaaactgcacgcatggtgcagggcaagcgcgggtgttccctcccacccagagcagcctctccgcggagtccccgggcgggaccccagttacttctgagcacgtgcagtctggtgcatgtttactctaaaaagaaagacaaggatggtgcctacaagaggaactgttggaaagtcagtgtcgctccacgtaatccgtggacactgtttcaatgcaggtctggaggccgcatcagaccccgccccacactgcaactcctgggcctcggttccttcatctgcacaaaggggccaatgatagcgtctccctggagagttaccttgggaagcagcatgagaattgatgagaattaaagcgatttacaagtgcaggcatacagcaagtgctcaattagtgccagtctgtaaaccagcagcttcccgagcactctgctcaaggattcaacccgctccctggggtgggcgttcctgcctccctccttccccagatagtgaaagggtcaggcggtgtgcgcccgaggcctgccgtcctcccacaccagggactcgcaagtcagctgaccagtgaagcttgtgcaacggtggaatgttctaggcccatgcactgacagtcgctggagccccaactggctgccaagtacttgaaaggaagccctatgaggggagaactgaattttacattttatcttctttttttgagatggagtctcgctctgtcacccaggctgaagtgcagaggcatgatctcgcctcactgcaacctctgcctctcaggttcaagtgattcttgtgcctcagcctcccgagtagctgaggttacaggtgcccaccaccatacccggccaattttttttttttttttttttaaatagagactgggtttcaccatgttggccaggctggtctcgaactcctgacctcaagtgatccgcccacctcggcttctcaaagtgctgggattacaggcggaagccaccacccctggccaggaatatttcatcttaattaattcaaactccaacggccacaggtggtgcatggtgacggagtggcaggaggccccaccacgcaatgccaaaggcaccaaaagtgcaggtggacaagggcggcctctgcctccccgtggggcagccacacctgcctgctcctggattctgccaggaggactgggtccccagcccctccctgccctgcctgcttgccagccccagctgggtggtcttcctccagccaggcccacctgaggctgcctcccgccctcctggaggccaagcccctcgccagggggctacattaaacagcagggccaaactcactggggaggcatcttggagagcagcgggacgggtgtctccacaacctggaacaacacatcctttctctgagtttaaagaaaacaggctgctctggaggcaaaccttttaaacagatgtttcctcttggcggaacctccctgctccgcccccaccctgggccttcccccaggcaaggcctgcccggctctcacagggcggaggcctggggcaagggagaccaagtgatttcaattctttctaggaaaggggaggaaaatatttttaaaaatgtgttttacaagcctgcctctgccattgttgatgtaaacaggtaaattgtttcctgcctcaattaaaaacatctgccacataaatgaataccaattaactcatcctgtttttaattactctgttaattacacgcaggcagcagaaaggatgggcggggggagcagggaagccgagccgatcctccgtgccacgccgccccaccccagcttggcaggatcggaaatgtgtctggctggtgacggatggggtggcagggaggtggtggcacgtggccagccgggatttcccgatccagggcggcgagtgggcccctcttcccgggatctccctgggtggggtccagcccctgcccctctcctgccctccctctctgtctgcagccccctgctcacttcttgggccacattttgctgggggagggagggggggcggttggggggaggcctggattttgtccaggaagttctgccttaaggctggggtggtaggaggataagagtcaccctaaacaggacccctgggaattaggatcctgtcagctgccatttcctgagccgtacatccgcggtgccgggggacttgcggctgcagctccctcatttgaagttgcttcctcggcggcacctgggacgccccccatatgcgccatagccttcgtggtaatgacacagtttctcgttcgcttgcttcattaaatgtctacctggggaatggggacgcctcaccccgtctcacccagacctctctgcgcggcgcattttgactcccagttcacacgtgtcaaagctgaggcccacacaagcaactgcctgtccagggttaaatcactgggacaggccagggtgagccgtgagcccagggctctgatttcagggctggtgtcgatgccaccaaacgtgtcgtggccaggacatcccgggagctgggttcaatggctgaggctggcctgcgccacactttgggtgggggtacttccggtctaagggcatctgagggtcttcacccaagagggtaccccatgcctccctggaaaacagcccccacagaaactgttctcaccctaggtttctgcagtctaaggatgcggagatggccagacctggctgggctctcagagccggtctagccagagtaaaagtcctgtccagcagcagggcctaggatcctccccgggaagactgctgctgccttagcaggattgagggggccgagggcttcggtgcactcaccatgtctgccccgggcaccagcgtgggcgcagtgggaaggggctgtatgggcctggagcattagatcctgtctgccctttgcagcacagaggaggcaggacctgagtcccagggcctggccatgctgatgcccggggcagacattctgcaagcagtctgcctctcctatcccacgccagggctatgcttgaggccttcccgagggcggggtcaagaatgcaccaatgcccgggacagcagccaacccacgcctgttcctgggcaaatcccgcctacaggccgggtcccagcttgcagccgtcggagggtggtggacggccccttcctggaatcccatcccgacctcggagacggtgacaccactgttcccgtggcacaggctttgcccctgcgtggtttcacatggccaacaaaatactaactcatttaacctcggcagcacccccacccaggaggctgttctgttatataatcacgatgaaaacataaacctctcactcttcccaccgtacagatggggcagcaaaggcccagagaggaaggaactgctcaaggtgcacagcggacggacagagctgggacccgaccagctctacacggctctttacaggcccccagcgccctcacctagcgcaccccagctgcctgctcccaccaggtccctccaaataccccacgtctccccaattcgccaaatgtggagggagagacgcgggggagtttgtgatgtgctgagatggcacagcaggttggcgagctgggagcacagctttggggtttgaagtcagcgtccactggtgtgggcgagtcccctggccttgctgggcctcagcgttctccctgtgaaacgggggggacccgcaccccctcctcatcgcacagaggaggtgaggattcggcgcttctgcccactgccccctgcctgcctccttttccaggcaggccaccaggctgagctgctagttgccttgaggtttcctgagctgccagggacttgcacagagacctcaagctgagtgggggcctctcagacctttggccacccatgttacccgccacatccactgccaccagaagggctgtttgtttggggcctttgagacaatttcagcaacaaatgcacttcctgctgtgtgagctggggagcaactgagccgtgagggggcagctggggagcagctgggttgtgaaggggctgcaggctctgcacagcccagtcctggcgcgcagcacagctcggggagggaggccaagctgcgcatcctccgcaacccggctcacacatgtcgctcctgctgtcagggtgggaaggctccgacatggaggtcggctttggaactcgggctctgggctcctgggctggacaccggcaccgtctaggttggggaggctctgggaaagaccagaatgccgaacccacccccgaggaccgtcctctctcaaaggtggggccgggggaggagcccagtcaaaggtgagaggccaggctcactggccaggactttggagcatagatcaccacagtgcaaggaccacgaagaccctgggatctcatgctgagggtgcacagcccggcaagggtgcacagcgacccagccatggttacagcaaagaccgcgggtggaggtgggggcgtggtcaggcaaggtcacagcaacccagccagggctaaagcaaggagccagggtgggagggccgcgcctgctgggctaaagcaaggacccctgcggtggggcggggcaggtggtggtcatgtctaccctggaggggctacacctgctgggctgagtcccagtgagcctgagtgaagatctgccctctctgggccccgccttccttgctattccctgggagctgcaacggctgtgctgacgtggggcacactgcgtgccttcaggaccgctccagtcgccctgcacaagctccgccctggccctgcctccctggggccgccgaccacaaggaggctagactctgctgagacaaaaggagagggacccggggtccaggaaggtggggaacgaggctctcgggggcgatggctgggatggccttggagacgggtccagcaatgggcagacacaggccagggggagaagagcgggcggagggcccagtggtggctgcgggggccaccagggcagctctcggtgctgtgtcgtggggcctcgaagcagctggaagcagggagtggcccctgcaaggcagcacaggacaagccttgtggctcccagaggcagagccccatggccgggagcatgaggtcactctcgtcagacagcctctgctgcccagatgcagatggtctcacccattgccccagctggccggacgcggcggggacagccaggcactgggggccaagcaggtgcaggaaaccacctgttgaatttagacccaatcaggggctgtgaaggcgagtcctgcccacagcttcgggctgatggaggccgctgccaccgcctcccacctcactgagtgctctctccaccaaggccacagagccacactccccgccaccacgtgtgggtgcagacagtgaaaactgagggacggccctgaagaaattacaagccaccggtcaccgtggccaagcccagggcttgctgtgtctgcgaggggtctcagctctgcaccagcccaagggggaagcagtggagagagagggacccgcccggaatcacacagcaacggcctcgtcctggacaccgagctcgctgaccctggggcagcaggccatgtccgcagtgggcagagggccgggttccagccctgcccggattggtcctctcccagcccccggccttgggaaggtgccaggcaggcagatgggccgggcttgggcacggtgcagccgcagccgtggtggcagctgctcgggggagacccacaaggggcctgctctgctgctccctcctgagcggtgccttccgggtaccctgactcatccaccaggcgctctcatgcagcctccaggagatctgcagggggccagggggtggtgctgctgagtcaaaacagcccccagggaatattctgcaggggagggaggcccttcctgtgccaggcagccagagacctgctccgagtgccctgcgctgctctcatcccagcagaaggacgactctgagggtggcaggcgggacaggcagtcactttgcagtggcagacacaggctcagagaggctccaggcctgcctgaggccacctggatgactctgaatgctgcttctccctccagggcaccagggtaaccggaggcttctagtttcttcaggggccgtccctcagccttcactgtctgcccgactgcccgccgggagcccctgcgtgtgtggagatggcaatgtgctttcccgggggctcagagctgctcctgctccccggcgacgggcttttccaggctgcggcatagggagccccggtaccaaggacatgggtggcactgcggagtcggtgccatcctctctacgccagacgccatgtgaacgtttttacgatgatttttaaaagagaggctgagaaggaccaggaccagaaagacacggctgtcctgtctcccacaggctgcagcctcgaactggcaccatctcttctgccccctggaaggtcagctccgtgagacgggggaggcccccgtgaattgtgcagggagcacttggtgggcgctgggcggtctcacgttccccacctgtgaaagggggttaatcccactgtgatggggccagtgagcgaattcccaggagggcagagcagagccgcagccgggggtacaactggcttctggggccgggctgccgcctccaagagcctaaccttgttcccagaggcgaggagtgaatctgggttccgtgcagggagttccagcacctaaaaggtgtgacaaattcctcctccaatgtccagctggacaaacctcctcaatccaccactgaaggccccccaagcgctccgagggacctggcgtgctatgggctggggggcgtctgtcccagcctcgtctccaaaatgtcggtgtctgctcagccctgtgctgtggttttcaggggtcgaggctgagcgacctctctttctatctctcctgctcggggccagtcaccaggccggagtctcagggctgtgacacagaggtttgtcatgcgtcacaccaggtggccctgggtcagccaacgagctttgtgtcaggacagcgtgggtgagcgctgcccccactgcatggctgcagggaggcccgagggcaggatcttcccaagggacaagctggccatggtcccgtgcgtgccagggtggggcctgctgagcctcagtttcctcggctgtaagacgggacggaggtgttcacagtgggggttgctgggaattcctcctctggattgggctggtgcctcggtgcaccgtgggctcccaggagctcacaaggccttccgtgcctgtcccttgtgccccacctcacagcgaggtccttgcagcagcagggcagccccgtccggcccccgctgcctccctgccctcatctcctttctctgagacaaggctcctcactggtcctggaggtggcggcacactcctgcctcgggcctggcacgcgtggtccttccctcctcccgcagctaagttccacgtccctttaccagagaagccagtgtcaacccccacggcccttggtggggcaacatcatcgctgctcccttccttcactctgtctctgccagacggagcagcagccccgggcgtacagcaggcaccaatcactatttgtcgagggaatgaacgggcaccgcctaacgagttgggtcagatggaggcgtggctcagagatgtcagcgtcaaggccaggtcgacgtgacaagccgggtcccgccctgccctcgggtgcatggacttccccaggcagcactgatgcccccgctgaggtgaggccgctgggccccatctgtggggagaggcagctggaaactgggggccccagatcctcctcgagccagatcctgaccccagacccagcctgttttctgggtgtctgaatcctgccggggtggaggaggggctggggaagaggtgggtccacctgttctcctccagggacctccctgcaacccttcatgaggtcagagctgggcatccagggagacagcgaccctggccatgggggccacgccacccaggtaccagcctggcatgcagcctgcaggtgataatctccgggctgctctggggctaggctgcagctgtaggggggttcagctgtcacagagggagccggggaagccagcactgcctgggatgatcccccttccgcctcctcctccccaggccccggaggcccagctggccgtccgcccgtgcggacacccgggagccaacactgacccgaagacaggtcagccagacttcccacctgctccctcaggaggtgggatccggtcccctcctgctgggctgcacgggccacgatggaaaggcgcctcgtgacacgctgcggtcagctcagaaaagccgcagatgctgacacgggcaaccctgcccagtgtggggcgtcctctgaagtgggagccgcagggagggcctcacggaggcctctgtccacaggcagcggctcccggcacccaccgctgctgaccgagcccctggcacccccaagccgagcctttgaaccccagcagggaaggccacctggccgagaccctggccaccacggggccatcactgtcccacggggctctgttccgactccttggcccgagggtctctgagcaccaccagggttgcctcacgcctctgagtttggggtggtttgttcggcagcactggggcccggggcagcttcttgcccggcgtgtggcacagctgtccttgttgggggcgtttctgggatcctgtggtttcggggacgctcccctactccctggccttgggggccgatgaccaggtggagcgggcccggtctgtgagggagtcacaacgccaggtcactccaagctgcctctgtggccacacgtccagctgcccccacacaggcgagacccatgatcaagccccagggctggaaagcagacacaggggatgtatttgtttgtggaatcaaatacgacggcagcttgcaggcagcccagccgctgtgcaaacaaccctcttccagcacccagtgagggcgtccctgaagcagccggcgaccccgggcgctgtcacccgccaggtggggtatggggaccgtccctcaggcaagacagggtgcctgtgtactgagcgcctcgtgtgtcaggtgcaggtgcagacaggcaaaagtcctgccccacggagctgacctcggacgggagcccaggaacactgtgcaaacgtacgagaccgaggctgggaggtgtggtggttgggagaggcacgggtgggtgactggatggccactgaaaaggtgccatctgagcaaggcctgaaggagggcagctgggagccacgcaggcgtcggggggagcattccaggcactggggccagcagcgcaaaggccctgaactgcagccaggcacggtgggccagcagcaaggcggagcagagtgggtggtggaagggaggggagtttgtgtggtcttggaggccccacgaggacctcggctccgttcctggagagctgtgactggcctttaatgggttccatctggctgccgagtgcaaaatagacctgggatgggggtcaggggtagaagcaaagaaaccaggtacagaatctggcacaagtcacgcggtcagagagcaggtgctggagagatcccataactgtttgtggaatcaaacaggacagcagcttgcaggcagtctggctgccgctgtgcaaacaacccagggcgcccctgaaccagcccgtgacctcaggcaaacggcatccatcaccggggccggcacaccatcgcctgtgagaggcgtggtgagggctgctcccacgggcctgcgggaggacccggtgacagcaaggccaagccccctgcccaccaggacagtggcttttcttgataatttatcccttgaaaccccgtggacaattaaacccagagttaccaggtgagccagggattctactcctaggaatccaaccaagagaaatgaagacattcatccacacaaaagctaccgatacccacagctgcatggtccacgcaaaagctaccaatacccacatctgcatcacccacgcaaaagtcaccaatacccacatctgcatcatccacgcaaaaactaccaatacccacagctgcgtggtccacgcaaaaactaccaatacccacagctgcgtggtccacgcaaaaactaccaatacccacagctgcgtggtccacgcaaaagctaccaatacccacagctgcatggtccacgcaaaagctaccaatacccacagctgcatggtccacacaaaagctaccaatacccacagctgcatcatccacgcaaaagctacccatgcccacagctgcatcatccacgcaaaagtcaccaatacccacagctgcatcgtccacgcaaaagctaccaatacccacagctgcatggtccacgtaaaagctaccaatacccagagccgcatggtccacgcaaaagctaccaatacccacagctgcatcatccacgcaaaagtcaccaatacccacagctgcatcgtccacgcaaaagctaccaatacccacagctgcatggtccacgtaaaagctaccaatacccagagctgcatggtccacgtaaaagctaccaatacccacagctgcatggtccacgcaaaagctaccaatacccacagctgcatcatccacgcaaaagtcaccaatacccacagctgcatcgtccacgcaaaagctacccatgcccacagctgcgtggtccacgcaaaagctaccaatacccacagctgcatggtccacgcaaaagctaccaatacccacagctgcatcgtccacgcaaaagctacccatgcccacagctgcatcgtccacgcaaaagctacccatgcccacagctgcatggtccaccataacaacaatgggggcaacaacccacgcgtccatcaacggacacacaaaacgtggtctttctgcacagtgcagtgcagctcagccacagggaaggaggctccccactaggctccagtgcggggagccacgaaggccccgagctgacaaagccagacacaagggccacacgtggccccgtcaccttcatccgcggtgtccagaacaggcaagttcacagagatgcaggagcgggggcagactgagggctgggggtggaggagcgaggagatggggagggggcagactgggggctgggggtggaggagcgaggagatgggggagggggcagactgggggctgggggtggaggagcgaggagatgggggagggggcagactgggggctggggtggaggagtgaggagatggggaggggcagactgtgggctgggggtggaggagtgagtggcagtgggagtggggtttcctttccgggtgatgagcacgtgtgggagcgagctggcggggggcgtggcgttgcattgtgagtgcactaagtgctactgaagtgacactataactccacgatgcttaaaatgataaacgttatgtgtattttcccacaattaaaaaaacagcggggagactgagacaggcagctcatgacctattaacctgcccctgccagggacccatccacgttgctaacagcccaggagtgatgagtggagccaggctgcctcttccctgagtttgggcaccttaaatgtgagaggggctcagcctccctcccaggggccctgctcctgtcaactggggccaacttgcaggcaggtagcggaggcactgctgtgactccagccctggctctgtgagcctggctgtgctggaaaccaggagggtggaggccaggcccagaaggctgctggctggagtgagtgggagctgagcgaccttcttgctgcaaacaacccccttccagagacacaagcacacccttaagggtgggaagcgctcacaaggaccggtctgtggcaagtgacaagtgacctttccaacccgaaggtctcctcggcagaagccccttcatgtgccaaggacgagccagaggtggagaagggccgtgggccggccccgtggacgagccagaggtggagaagggccgtgggccggccccgtggatgagccagaggtggagaagggccgtgggccggccccgtggacgagccagaggtggagaagggccgtgggctggccccatggtgcagagtgagcaggtgctgggggcactggcctgcagctcaggcctctgcttgtccctctggtcaccccagtcctggggcagcatggtccctgggtctgggcaggtttggttggatgcaggtgctgtggtccccagtgagccctggtgtcacggctcacgctttataaaagctctcaaggggtcacagtgcagaggggatggggaggagggtttggggagggtaagcacttcgccggggcacttatcatttgtggaacattctctgaggctggctgtggggatcccctgtgagtctggacagccaggtcataggtcatgcttcctcctggcccggttttcacaccgtggtaccccacacgcatgcacacgtgtgcacaccatcacacactcagactttacacacatgcacctgcacgtgcgcccctggcaacggcacccgacgcagtgaccttggggctgctgtcgtcgggaagacagcctgccaggtggcccctcacacggcccctgcttccccctcacacggcccccgcttccccctcacacggcccccgcttccccctcacatggcccccgcttccccctcacacggcccccacttccccatcccggaaaacaggcagagcacacacttccaggaaagaggccgccctggcgctggactcaatgaccataaaacagcctcttaagctgggtgcagcggctcacgcctacaatcccagcactttgggaggctgaggtgggaggatcgtttgagcccaggagcttgagacagcctgggcgatgtagcaagaccccatctctaccaaaaaaattaaaaattaaaaaaacaattagctgggcatagtggtgaacacccatagtcccagctactctgtaggctgaagggggaggatcgcttgagcctaggaggttaaggcagcagtgagccatgatcgcaccactgcattccagcctgagcgatagagggagaccccgactataagtaaagggaaaaaagaggcagggcgcggtggttcacgcctgtcatcccagcactttgggaggctgaggcaggtggatcacctgaggtcaggagttcgagaccagcctggccaacatggcaaacccgtctctactaaaaatacaaaaaaaaaaaaaaaaaaaaaaaaaaaaaaagccgggtgcagtggtgtgtggctgtaatcccagctactcaggaggctgacgcaggagaatcacttgaacccgggaagcagaggttgctgtgagctgagattgcgccactgcactccagcctgggcgacagagtgagattgtgtctgggggaaaaaaagaaagaaagaaaagaaaaatggcctcttgggccaggtcctgggagctcgagggaggtgacggcatggagccaggacccggagacgtcacttctgatggaagtccgcacgcccagagacaggccaggccctcagtgtgcaagtcaccagccttctctcctttccagacaggctttgccctgtggccccggccctgcctggtgcacctcccgtttgcctcactggtcaactcctgggggctgttttgcgctcccccagtgcagggtcccagactgcacgcctcacagtgccacacgtctgcacgcctctgcacacgtcacgtgcctctatacgcctcacacgcctcacagtgccacacgtctgcacgcctctgcacacgtcacgtgcctctatacgcctcacacgcctcacagtgccacacgtctgcacgcctctgcacacgtcacgtgcctctatacgcctcacacgcctcacagtgccacacgtctgcacgcctctgcacacgtcacgtgcctctatacgcctcacacgcctcacagtgccacacgtctgcacgcctctgcacacgtcacgtgcctctatacgcctcacacgcctcacagtgccacacgtctgcacgcctctgcacacgtcacgtgcctctatacgcctcacacgcctcacagtgccacacgtctgcacgcctctgcacacgtcacgtgcctctatacgcctcacacgcctcacagtgccacacgtctgcacgcctctgcacacgtcacgtgcctctatacgcctcacacgcctcacagtgccacacgtctgcgtccccacagccatagtggccacttcatgccacgcgtatgtgacttggtgaaatccccgtccctctgctctgtgcagtacagcagccgcaagcacaagaccggcacgaggaggacagaggcgagaccccagtgagccaagctgcacgctgcccccgggagagctgaaaaaaaaatacctcagtcgcttaaaaatcagtgcatgtcgaaaataatgagttttggacacactgggttaagtaagattatatattataaacattaattttgcccggtctcttcttccctttttcaacgtggccacgagacagtctgaaatgatccacgccccttccctggcatgccgaagctcccttgggagaggccgcccctcggcacacggaggcaccggcgagaagggctgccccacgcccctcggcacacggaggcaccggcgagaagggctgccccatgcccctcggcacatggaggcacgggcgagaagggctgccccacagtggctgctcaggtcacaggaggggccgacttgggcccataggggaggctccatgcacgttcccgaacactctgctcccaggtcccctgttggatgctttgggcttctgggcatgaaaagtgctggaccctgaaggagcagctcggccgcagaggcacggtggggacacagcagccagcagggccacacagagagggtctcagccacacacctggccggcacggccggcaccatcggggggcgacaggcgaggctccatcttccctgtgcacagtgtgtggtgctgaccaacccccgcaagggacagatggggacacggaggcccagaggagcggagaggagtctggcctcgctgcctgcctattcttgctgttggcagggcctggtaaaggaggcagagatgccacgaaagaggcacgaagggccgtgccctgccctcttccacccccgaagttcagaaggacgcattctttttttctcggagacggagtctcgctctgtcgcccaggctggagtgcagtggcgcgatctcggctcactgcaagctctgcctcccgggttcacgctattctcctgcctcagcctccccagtagctgggactacaggcgcccgccaccacgcccggctaattttttgtattttttagtagagacggggtttcaccgtgttagccaggatggtctcgatctcctgacctcgtgatccacccgccttggcctcccaaagtgctgggattacaggcgtaagccaccgtgcctggccagaaggacgcattctttaagggagctgaaggccacgtggtggagctgcaagcctccatcaggcacagggatacgtggagtccagcacccaaggcccctgttctgtccacttgggcacagccacggcccagagacccaacgctgcccccggtcaggggcagtcctgggttctgatgtctctggcgcaggagaggctgcatggaagggccccatgtccactgcgctctgagtacaggctgggctggactaggctgtggagccctggtgtggtggccaaggcaaggggaggggcccggcaatccccaggcctggtgagagccccccaccacctgcgtggggaccctggtggtgcagaaatacctaggctctggagggcccaagtcaggtggcctcggctcccaagtgggaattctgcctctgacagggagtaactagagtacaactgatcttaccctcagtttcccctctgtaaatgggtctgcaggtggcgtggtgcacccgggggcccagggcttggccccaagcttgcaggctgtcctcgcgtgggtggagcaggcacagggcctggggtctgggctgtgccagagtctgaccatcgaggtggtctctctggaccaccccattttgcaaaggtgcagacaatgaacttctgttcgggggcctgcagagaagggggcctgggtgcagagctgcatcatgccgcatccaccactgagcctcaggacaccaccgggtgtccccccagaaaagggacgaggctgatggtcccagtccagacacacacatcccagctcatcacagcccgaaggggtaaatgcctttgtgactgcattttgcgtttgagacccgagggacagatgggaatatgtggtgtaggtcacgcagctgctgggaggggagtcgaatccaggtgggggctccaagaaaccgaggggctgcccatccccctccccgctgcctccgggaacagggcagggggctgcagtcacccctggccctcgtggggagcccctccccacctgtaagagggtctcactgcagctggagctgcttcccctgctggcttgatggcaccctggctttcccgggtactcagggaggtcgggtacactgggcggggacttcctcatgagttccatgtgtgacctggggccaccagggtgcgcaggagccctcctgactgccccgggcatttcctgggcgtctcccaggtatctcccatcctggtctccggcaggtcccacctgctgcctccccggtgtggactttcctctgctgagtaaacagaagactgccccggtgcctggacttcctccccaaacctcctcctgccacgtccaccatgaccccagcctcaggggcagccaagcatccaccacgaccccagcctcaggggcagccgagtatccaccacgaccccagcctcaggggcagccgagtatccaccacgaccccagcctcaggggcagccgagtatccaccacgacctcagcctcaggggcagccgaggaggctctgagctgcccagacccgacggggcagaaccggccctgggtggctaagcgggcgggaaacgcagaggcaggcggccgacagcagtgcggggtgagctgccggctgggctgctggtgccttggctccgggagacatcttccttattacggccaaattcatctttgttttccttcccagtgacatctggctctcagtgaggtcccacgaattacaaaaagcagaagtctgaacttctgttttattgccacaggaaactcattgccacagcacaggcggaaagccggatcccggcgggtcctgagtccccagctcccaccctcggggcaagctgcgagctcagaagtggggactggggagcagttatctctcactctcctcatcgtcagtttccagcccaactgccaggtctccgcctgagtcttttccactgatgctacaagggcggtttccactccaggaattttttttccagacaagcaaagcccttgcctgcatttgctctcggctaaggcggccctcccaggcctgcccggtgggctgtttcccgcagcacggcctgggctccgctgaaaggaaggtcccggcctacggaagcgcagaagcagaaccaggccttctcactctgcccaggaaagtcaggaggtggagaataaaacccccaggaaaggatctggggtgtcgttcactgacgcaggctttcccagagagactgagccacgaggtggacgaacagcgtggtgtccacccaacctggccctgacaccagggatggtgacgctgtcgtgagcctccctctgagctgccctcaagcggcctgcacctccctagccagtaccccagcagttgtgtttccacccctctcctgcccctgcgaggcagcgggtcccagcccacagtgtgcactggactctgcacactcccggcccactccctgccgtccccacgctggccctcccgtgtcagaactcagtgggaagttccaggggcctgaccaccctggatgtgtcacagacagagccccgtggtacccacccgcgtcgggctcctgcgctgtgagctaggaacttctgtgggcctcggcttcccggtctggaaagtggggcagcagcggtgccctcagggctggctgccgtgaggatccaatgcagggcctgggtgcctctcactgcatgtgactctgcccccgcctggtatggagtaggtgttcgatcaatacttgcccagggaatgagcactggaggacaggcactttttgtcctgtaagtgaagtggtggcaaagccaccctccggcattgacaaattgtagagtttaggtcctttccgtccccaggggcctggggccagcctgggaggtgacatcggttgcctggacgtggatttctatgaacactggatgccatgtctgtgataatagccgggcaatgttccagtggcttctggagggtctttagcaacaacgacctccctcccctgcacagcagggcaggaagcagaggtggggctggccagaggtgcagacctagagcagccgggatgaggctggccttggggctccatgacccaggcagggcagaggtcaagttctcccacccgtgccctgaccccagatgggccccagggcctgtatccaggtgagggcttttgcacctacagtgctaaccccgagtcatgaccgagccctcagccaccagatcccccagtcccttgggggtgctcaggtgctctaagaatgtggcccggcaggctggggatggggaccgacagcacaggcaaaggaacgcccgggcagggctggacagggactgggcggggctggacaggggcctggagacactcgctgcggcccgccgtcagactggctccctgcatgacctgtggagtgactgtacctctcccggcgtcggagacggggaacgctccacggccctcgtgggtgttacagggacgcgacagtgcgtgtaagccccagcgctgttgtaggctctaagacccacccaggaaggctccacgaccctgtgagcaggagacacaggccacaggcaggcagtgcagcaagtgcgggccgggagagcagccccatggagacgccagcgccttcacctgtggcaccaataacaaggccctgctagtccctccatgctgggtctgaacacccgcgtggcacacacggcactggggcacgctgaagttgcttctggttcctccctgccagggaaggaaattcagagccacttaattcaagcaccatccttccaccctggcactgtgggaggctgaggatgaatcagaaaaccccaaagtcaacctgctaacggtgcagcagggaaggggggaggccagcggagagccccaagatggttccagaagctggcagggaaatgcctcacccacctcacaccctccctgccaccccagaggcggcagcggcgaggcccggccctccccactgcagccctgagggctgggatcttggggattagtgacccagcctgctggcagcatctccagatcctcgcgtagggagaaaaattaatttcttccagtcatgcagaaatgaaaatacgtggagccaaaccagagagatttcctggaggtggtaactgaattacgcagatagcgggcggcaggggaagagctcaggggggctcgggcggctggtgtgtggcttcgtagccccagagggttctggaaggcgatgtctggggaaagccctcccactcaccagccctggcttcacaggtggtgacagcacggccccagcaccacgaaccactcatgtgaacttcccttctcccctgtcactagaggatcccagcacatcccaggagagatggagcctgccggaagactgatcctgatgcgacactctcttccctccctgagccccaatctcgggtggaggccacatctgttcctcctgctctgggcgcttcttcctttctgtttccctttcagtgtggaagagtggccgcttgcccagcaggacggtcccaaatagcatggcttttccaggcacggtgctgtcggccgcacagaacaggaccctcccggcagctccggcttgcacagcatccgcctgtctggcccctgtggaagtatctgactcccaacgcccagactggagcgggggcaaaggacacagcccgaccccagaggcacacagagccagccctccacggaagaacgtgcccaggaactgtgggctgggccttcctgcctcctcccctgccgcgaaagcgatgccaggggcaggtgagggtcggacgcgctcaggcccagccctcgccccttcaggtctgggggacacagtggagtcccagcctcaagaagtttccccaacctctcagaaacttgaagggcaatgccaggtaccgaaaaaccggcccccgccccttatccccggccgacccgtccgccgaggtggctgccctgggaacctcctgttcctcgtccaggagaggaaacgcacacccgggccggacgcacagaagccgcaccctggctggggccacaagcctgacagctaccgacaagcccccacccacaggagcacgcgacgtgctctcttttcaagggaaaggtttttcttcctgggccctggaatgggcctgaagtcagccggcctcagcccacagggtgaatgaggggtgggcacagcccggccgcggccccagcacacacgggcggacgcaggggcgggggagcgccagccccgcagtgtgttcggagcccagcggctctgagtcgccgccaccagcctggccgccttctgctccacgtaagtgaagtcagccgtctagggctgcgtttccagccatctgtccctccacagaggctcacacctccctccccgctgttcccacagcctggctcggggcctgcccaacacagatggacgcttcccaaaggctgtgcgcgccatcgctgccacccggctgtgccgaggcccgcggccgtcaggaccccagggaccgcatgccaggcagggtccaggacccccagcgcggaccacctttagcctgcggggcagcgccggggacccgggcaggagggagaggagcaggagggagctctggacccccctccccagaccggccgccgccacctctgcctctcccagggccgccctcggcctccccactcccgggtctccgtcacgcgggccgcggggcctttgttaggaaaaccgggcggccccaggggagcccgcgagactcccagcgcccgggcgcgtcgttcccctcgaagtttcgccgcagcccccgcaggtcaggctctgctcacggggggctgcgctcagcccggatgggtgggcgctgggcgggttggctccaccctgccgtgggcaccaactttgaaaacggcccgtgcgctcggcgcggctgcggcgcagatccgggaacggcagccgcgggcggagtcggggtagagcggcggcggcgcgcggggcggacacggcacttacggtcggggggtccgggggatccggcgggcggcggacggcgcacactcgcgactcggtccgggagtcgctgctccttccagcttggtccccgcctccacgactcaggggcggctgcgcgctgtcttctggcgccgcaccgggctcaggcgcgcggcggggctggggcgcgcggggcggccgcctgggccatgccggggactcggctccggccaccccgcgcgggaacaaagcgcgcaccccgcccggggcggtctccggcctccgcggcccgcgccgggtccagccgccgcgcctgtggctccaacgccgcgcgctcgcccgagagtctcacggggccccgcggcccccgccccgcgcgctccgcctccgcctcctgccccccgccgccgccgctgcgccacctgcctcccgcccggcgcccatggcgctcagctccgccccggggcgccggcctggagaggggctccccgccgccgagagccgcccccaacgcctccgccaccggggcggcgccctaagaactggccgtgggggccggggctgtgcggagcgccgggagcagggagaggggagaggggcgcggggagggggcgacgggcgcgccgcctcctgcggggggcggcgcggggaggcgcaggcgggggcgagcgaagaggttgaggggtgcgggcgccgtggagggggcgcggctctggggggcggcccccgcctgcgcccaccctctccccctccgcaggccgcgcacacccacctcgcagcagtcggcggccgcgggcctcgcagctttagaaccgcggcttctggcggccgcgcgggaggctgaacgggagttggggggtgtggggggggtggggaggtggggagttgggggggaggtcgctccttcggccgccgcccccgccccctgccccgcgctcgcccccagcgcggcgcctggcccggcccggggccacctccgtgcgtggccggcaggggtcgcgctccccccgctcagcctcccgggcgggtccgatgcgaagccctcgcttcccgcgggtcccggggccaggtcatttgcatacactttgcattcatttgcatatcgtgcgtttcatgtccacctgcagaaacgccccgagccgctgctctgccctctccgcactttctctgccggcaggccccctcccccgcccgctttgcctttccctaaagtactttgtggcgtgtctggcgcatttgcctgcttagtacattttagtaaaattggcgccttttccctgtttcctgccccaacgcacacgtgctcttactttagacacaagcggctggggggcccaggggtcaccattaggagacacaagaggccagaccttcagagcagcagggccttggtttgcctctcatttcgcataaattttgcatgtgaaggtccgaggtccccaatccccaatataaaaatatggcaacgtgcgaaacatggcccattccagctttgtgccgcgggccttttccccccacccctcgtccctctcatggacttggctctacccacctgagctggcagaggaaggggacggaaacccagaacgggggctccgtgagggggaggacagcaccatgtcctcctgcagcccctgggcagcggtctggtcagctgggtcactaaccgcagtgtggcccagccagttcctccagctcctggctgtgggaagtgctgtctgaagccagccagactccgtgaaaattgtgacacaaacgccaagcaccttcattctcctggttttcagactgtgcgtaacatggtgcttgcccatgtggctcagcccagtccttgtggaatggaggttttcagactgtgcgtaacatggtgcttgcccatgtggctcagcccagtccttgtggaatggagggggagttctgagcccaccccacagtacagtgcgagtccccatgcggtgggtgtgttgcctaaggttaccgattttatgctcgaaatttatccatcctggctccctggcttcatggactctgaggcacagtggattttaagatgcaccattattttgtgtgccactaagaaaggaaaacattctgccggtgataatcctaaaacgcccccaggtttcagagattttacaaagcaacataaacgtgggagtgggggcaggtgggagaattcagcagcgaaccaccctgaagtcagtcgggttgtgagctaaacaatgcctgcggcagctgtggctgcccacagggcctgggagcagaagctggcctggacctgggccggaagccctcacccagcaccagcggcacgtccgtggtctcggttctctggaccgcaggcttcgggtgttaagtgaccagttgcaacatctctgacttacacagggtgctcacaaccatttgaggagtgacagacctgaaggcactgaagataccactgcagccatcagacaccacaacccaggcgctgcacctgccccaccgcagcccctcctccctactcaggagagctgtggtggcgtggtagagaagaaagggatatcgcaggcaggagggcttcctttagtgctgtgagtgggtcagcctgacgcctagcccagcggtcacagggtggtcagatggtcctggcagtagctggcacagagctgggcaccgtctctgcatttccccccgtgctgtgcggatgctcccggaacgcccattttacaggtggagaggctgagcctctcagccacaccgacttcctgctgccttatccaagaactggtttcttgccctggatgcggccaagtcacagctcctgggcatttcgaggggacatttaaggaggagactaccagccctatgtgaaagatgtctgcagtctgtccgacaaggccagcgtcacctgtgcgggagacagaccacgggcgagcaggacctcggagggccacactcagggctcgggagggggcagagccgtggaggagggagctcgagggtgtgcccatggagctcccagtgtgtcgctgtctgtagaggcaggagctcaattcacttaaaagaaaccaccacggccgggtgcggtgggtcacgcctgtagtcccagcactttgggaggccgaggccggcggatcatgaggtcaggagatcaagaccgtcctggctaacacagtgaaaccctgtctctactaaaaatacaaaaaattagccgggcgtggttgcaggtgcctgtagtcccagctactcgggaggctgaggcaggagaatggcctgaacccgggaggcagagcttgcagtgagccgagatcacgccactgcactccagcctgggtgacagagcgagactccatctcaaaaaaaaaaaaaaaaaaaaaaaggaaaccacctcccctcctcatggcatggcagcgtttccaagtaaagttgactccccatcagcatctggtgccccgatcacacacccatggaagccctgggagaccgtgcctggctctagggcccgcggcgcacagcggggcagccccagctttgctgacctgtgctgggtgtgcctctgaggccccaccctgctgccctcaggaaaacaactgcagccttctgtcctgccaactgcacttctggccatcctgatccccctccccaaagggcagcacccacatctgatttccctctcaaccacccaacagtgcccagctcaaggtttggataaagacgcagtttataaacacttgccacaggcgtccctgcactgtcacctccccgcagtcatggccccttcttctgataccaggtaagactcgctgtctgtggggccctggccaaagggcaggcgctaggccctctcatgtgccctccgtgaccctaggaggtaggtcttgccaccagccttgtttgccagaggagaacaccgggacccagaaagcttgagtaatctcagaacacaggctggtctttggcagagctggagtcctgccaggccagcgtggtccagcgggaggccaggccatcactgttgctgaccttcagaaaatagttctgagcactatagactctcaaacattttctgttataactaaaactctgcaacaaaagtttagatagctgccaagaatagaaagtctgatacactataggtatagatatttaaaaataagcgggtggctaatggattctagataccatagcaatttgatagccactgtcgttcattaaaaatatctgaataaactcgtcttaaacacctgcattttcactcagctccctacctagaacagtgagtttttaaatataacaccaaaagcatgatgcatacaataaaaatttggcaggttggatttcattaaaatttcatacttcggctctgcaaaagacactatgaagagaatgaaaagacaggccatagactgggagaaaatatttgggaaacacatatctgatgaacaactgttatctaaaatatacaaagaactcttaaaaccaaaccataagaaaacaaacagccccattaaaaatgagcaaaagatctgaatagacacctcatcagagaagagatctagaagatgatctggcaaataagcacaggaaacgatgcccagcagccttgccactagagagtgggtcagcacagccacgagaggccacgacacgcctgttagaataactaaaactcaacacacggacaaccccagatgccggtgaggatgtgaggcaacaggagctgtcattcattgccgacgggaatgcaaaatggtacagccctttggaagacagtttgactgtttcttatgaaactacacacttttaccacgccacccagcattcacgtttcttggtatttacccaaatgagttaaaaactaatgtccacacaaaaccctgcacattaatgttgatagaagtttcattcgtttttaccaaaacttagaagcgactgagaccgccttcaacaggtgaatacataaaatactgtggcatatgtagacgatagagtgttatccatgacaaaagtagtgagctatcaagccatggaaagtgaacattgatggccgggcgtggtggctcacacctgtaatcccaggactttgggaggccgaagggggcggatcacctgaggtcaggagttcgagaccagcctggccaacatggcaaaacctcgtctctactaaaaatacaaaaattagctgggcgtggtggcggtgcctgtaatcccagctacttgggaggctgagacaggagaattgcttgaacccaggaggcagaggttgtagtggcagtgagccaagatcatgccactgcactccaccctgggcaacagagcaacactccatctcaaaaagaaaaaaaaaagtgaatattgctaagaagtcaatctgaaaaggctatatactgtctgattccaactcaatagcattcaggaaaatgtaaaatgatggaagtagtaaaaaggtcagtggttttcagggggttatagaatagggaaggttgagtagggagagcagagaggtttgtttgtttttggaggcagagtcttgctcttgtctcccagactggagtgcagtggcatgatcttggctcactgcaacctctgcctcccgggttcaagcaattctcctgcctcagcctcccgagtagctgggattacaggcgcccaccatcacgcccagctaatttttgtatttttagtagagacagggtttcaccatgttggccaggctggtctcgaactcctgacctcatgatctgcccacctcggcctcccacagtgctgggattacagacacgagccactgcttctggctgagtttttttgtttgtttatttttagacagggtctcactctgtctcccaggctggagtgcagtagcgtgatcacagctcactgcatcctttgacctcccaggctcaagcgatcctcccatctcagccccagctaattgtatttattttttgtagagacagggttttgctgtgttgcccagactgcacagaggatttttagggcagtgacactattctgtatgacagtctaatggtagacgcaagtcatatgcttgtctagacacatagaatgtaacaccaagagagaagcccaatgtaaactatggatttcagttaatgaaaaggtgtcagtattggttcatcggttgtaacgaatgtatcacaccagtgccaggtgcaatgtagggaccccccactagggaacaagtcggaaagagtaatgagaactcggcgctttccgcccagttgtcctgtaaacccagaaccacgctaaagaataaaatctattaacttaaaaaattcagcagacaaaaatgaggatatcaatgacattttatttgccgtttaaaagacagatacaaacagactcttctgcagcgcctgaatctctacatggcccttctctcccttaatgcctccttccattctacccagccgatttttatcctaatatgttttcatgtttgaaagtcttttgattcccctatcgtacaaaactaggtacatagttggaatgtcaagatttaaacattttcctatgttaaaatttatttcctgggctggattatcgttataattattggtagtatacaaccgatacaaacaatgtgaatgtattacacattttgagaactaataaggatacaaagtaggctgggcttggtggctcacacctgtaatcccaatgctttgggaggccaaggaagtagtatcgcttgagcccaggagttcaagaccagcctgggcaacatagcaagacctcatctctacaaataataaaaaagttagccgggtgtggtggtgcgtgcctgtagtcccagctactcagggggctgaggcagtgggattgcttgagcccaagaggttaaggctgcagggagctatgatcacgctactgcactctagcctgggtgatggaacgagaccctgtctcaaaaataaaaataaagatacaaagtaaatttttgttggaagacatctcgtaaaaggagggaggggcactttttggtagtagtttgtgtattcatgcatgaataatactgccagaaaaagacaggatttgacattaattccattcccgtggtgggtgtttaatgtgaaagccagagaatcttcagtcccataaataactcgatcagaacgggagctgtgtcctaaccatctcactgtgacctccttctgagagtcagatgccgcaagccacgtggtgattggtcatcaaagtcatttttaataactatcagctgacaaatcggttctgtcccccctcaattctgtttcatgcaaagacaagaaatcagcaggttgcagcagagacacattcgtggcgagtggggagctgggggcaaggcaccaggctggccccaggcagagagacgttggtctttcttggggaactgggagagggtgactgtgcaggggtagctgggaaaaggacccacactggcccaagcaggttctgccttggccgtcagcctgggccgtctggtgtgggcaccagatgacgcggcttcaagttgcccacaaggtcaaggagaccctcccggaggcagggaggaaccctaaagcagagggagtccgggctccggacaggaggcttccctgcctcaggagtgtctcttggctttctcccctgactcacatcggcatcgctgcttttgcagaatgaggttcctaattgtgaagtggcttcattcacgtattcatttctttcttccttcactctccatatccaatagaaagcaagttactgaagcttgccaaacctcagtttttcctgtaaaacggggctaagagctggctggcctacacatttgcaatgtggctcaaagacaagttcagagttctctcttgtctttgttgaagttcacacgagaaccaggccaagcacaaacagttggaaatcggaagtgtcccgtaggaaaagcagccggtgctcgtgtgtaaaagggaatgtggatgggattgaggtggcatttaaaatccctggagaagcacaaactccccagtagatggtgtcaggacaactgccccatgtggggaaaatgaattatatactccttacttcacttggaaaaataaactccacttgggttaaagaataaaatgtgaaaaactggaacagtgaaaggattaggagaaaaaagcagagcaatttatataataccagtttaaaattaaggcagccgagaaactctgaaaaaattttaagaagctggaggggtttggccgtgtaggcatgagcaacttccatgtcctgaaagagacaggggaccccgataagagatgggttgggaggccgggcgcggcgcctcacacctgtaatcccagcacttcgggaggccgaggagggcagatcacttgaggtcagcagttcaaaaccagcctggccaacatggcgaaaccctatctccaccaaaaatacaaaaattagccaggtgtgatggtgtgtgcctgtagtcccagctattcgggaggctgaagcaggagaatcacttgaacccgggaggcggaggttgcagtgagctgaaatcgagtcacctgcactccagcccgggtgacagagcgagactctgtctcaaaaaaaaaaaaaagaaaaagaaagaagatgggctgggagtgggtgtggggacaaacgacagtggccccagcacacaaacattgctacagagaagaacaatacaagcactcaaaataacgctcaacaaacttcatgagtaggcaaatcccacaagaagaaaacaaaagggaccagacacagtagctcacgcctgtaatcccagcactttgggaggccgaggcaggcagaccacttagggtcaggagttcaagaccagcctggccgacatggcgaaaccccgtctctactaaaacacaaaaattagctgggcgtggtggtgggtgcctgtaatcccagctattggggaggctgaggcaggagaatcacttgaacccgggaggcagagttgcaatgagccaaaatggtgccactgcactccagcgtgggtgacagagattctgtctgaaaaaaaagaaaagaaaacgaaggaacgaaaacccccgccactctcgaagtcacacggcttccctgcttctcttcctcatgactggccccctctcctcctctcccgtctctcttcacctctctttatctggatctgtctctgcttgttctgcgtttccctgttctccagggcaggaaccacatcggtctgttcacccctcccctggaccggcaccgccacagagggtcagagtgttggcacctgtcttccaggtctgttcacccgtcccctggaccggcaccgccacagagggtcagagtgttggcacctgtcttccgggtcagttcacccgtcccctggaccggcaccgccacagagggtcagagtgttggcacctgtcttccgggtcagttcacccgtcccctggaccggcaccggcacagagggtcagagtgttggcacctgtcttccggatctgttcacccctcccccggaccggcaccgccacagagggtcaggagtgttggcacctgtcttccgggtcagttcacccgtcccctggaccggcaccgccacagagggtcaggagtgttggcacctgtcttccggatctgttcacccgtcccctggaccggcaccgccacagagggtcagagtgttggcacctgtcttccggatctgttcacccgtcccctggaccggcaccgccacagagggtcagagtgttggcacctgtcttccggatctgttcacccgtcccctggaccggcaccgccacagagggtcagagtgttggcacctgtcttccggatctgttcacccgtcccctggaccggcaccgccacagagggtcagagtgttggcacctgtcttccggatctgttcacccctcccctggatcggcaccggcacagagggtcagagtgttggcacctgtcttccggatctgttcacccgtcccctggaccggcaccgccacagagggtcagagtgttggcacctgtcttccggatctgttcacccctcgcctggaccggcaccggcacagagggtcagagtgttggcacctgtcttccggatctgttcacccctcccctggaccggcaccgccacagagggtcagagtgttggcacctgtcttccggatctgttcacccctcccctggatcggcaccggcacagagggtcagagtgttggcacctgtcttccggatctgttcacccgtcccctggaccggcaccggcacagagggtcagagtgttggcacctgtcttccgggtctgttcacccgtcccctggactggcaccagcacagagggtcgagtgttggcacctgtcttctgggtctccatccctccctttgtttgttgagtgactgcatgttctcatttccttatcatacaattctttgagaggtatcattagctgcgtcttattttattttcaccttcttttctgttacctgtatgtttgaattttcctataagtatttttgtttcatctttgcttttttaaattaaaaaatcagttttaaaattgcacctgcagtacaaaatcagggtggcgaccgggttgctgccattccctcccctcgggtctgtggcttctcagctccagctcgggtcacagacctgctgccacggccccagggtgggcacagggctagcaggacagtcatgcaggcagccgcggccccagcgattggtccaggaggagggcaggtgaccacacgcggccaatcacaatccttccctgggagtttttgaactggaacaagagaggaaggacctcttctttgatctgcgtgggaggcaagcccagagtggcctggacagccgctgggaagagaaggtgggcagagcggcggagggtgtgctaatggttgggtctgtggggcctgaaaccggtgcccctgcccatcctatagtttggtgcttgagccagcacagtcccaggtgtccctgacgcctccgagctgggtttctgtcactcgcagctgcagcattctggcacagacccttggcccaggacccctgtgcagaggtgggtttgggtctccccggccccagcagccccaggagcctgtgagatctaagccggaagctgctctgggcacctgagtgctgacagcccgagtgatgggaacaggctcgctactatgcagagacagagagactaatttttatcagccagatacctggccaggccccagggtggacaatctccaaaccgcatgcatcccggcactgacaaagccgtctatcattgctggagccaggacacccggggaggctgtgccaggccacggggtgagggagctgcctccctccagtccttctcccgtggggcactgagacggctttcagcaagacaaatgcccaggccacagggtgagggagctgccgccctccaatccttctcccgcggggcaccaaaatggctttcagcaggacaaatgcccaggccatggggtgagggagttgccgccctccagtccttctcccacggggcaccgagacggctttcagcaagacaaatgcggccctgccactccctgaccgagataaagtctcagctcctgagcctggggtgcctgctgctcgcccccatcgcctctctgagctccagcctcacaggcacacaccgctcccctgcccagaacattctgcccacaaactcctcttagcctcaggtccctgctgagtggccattcctgctgggaggcaggaattccctgatctacccttcctgagtctgggagagacgcctcccatacccccatgacagcccatcacaattgttcacggatctctgtgttctccctcaacaaatacttggcggaccccctggagccacagctcaaggcttccttcccccccacccccacaccctggggacagcatgtccaggacccccacgcagggcctgtgtcgagacggcatgtccaggacccccacgcagggcctgtgtcgagacggcatgtccaggacccccacgcagggcctgtgtcgagacggcatgtcccgccatcgggtttgctgctgaatgagcagatgatctaatgagtgaccgtcctcacccacgagaaaaaacacaacctggtctccgtctgccggttagatcggcccccagtcctgctggccccagcgatgacagaggaggaggaatgaggagtgccgtgcctgggctgggccatcgcctctctccctcggctgggtttgtcatgctcagccagacccgctcccggtggagaggccgagggaccctcatttctacgtttgcatccctttcttccagggcctgcggggctgacaggcacacagccagtggtgaaggttcacggaagaacgaaggaaggagtgagcgtggggagagccagccaggctccccatgtccacccagatggtgagctggccctgccctggagacactgtgtccagaggccagcatagccctcaaaacggttcccacagctcccagcggagccctcaaaatggtccccacagctgccgcccactcttgggaccctgagtgtggggaggctggggttgagcagtggggatcaggatctggcaggatcggaatgtagaggcctgggggctcccggctggggacagtgccagcaggagtggccgggacgatgacgaggtgaggtgtctgctcccaggctgtgtgtggcttggatgccaaagcgccttttgctgtattcggcaccctgagacccttatgtctgcctattgaaggcacagtttactcccgggaaaataaacatttgggtttatttcgctgtgactgcaccccctgaatcttaatcatatgtgtctctgggtttcccttaagggggatggctccccttaagatgactttggggctgccatgggccttgtcacctgcattgggctggtgaggacagggacagagatgcccacagagcaggtgggctgtgctcctgccctgggcaaatgagggcaggcggcctctaacagctgacaccatgtcaggacagtggctacctagcaggaagctctttcatctagagtcctggtccttcatgcctgggtgtggtcatggcccctctacagctgccagtcagagaactgcccaggagctcccactcctcctctgaagaccccaaatctcaccactgaccaagatagccctctgaccacagtgggctcccccagccaccacgatggtaccccaactgctatgaaaggtcccctgaccacaacaggcaccctgaccaccatgataggccggccacccatctactctgacagcccccttcccctacagccctgcccaagtctcctgacccacccaagggtcctgaccccacccaaggctcctgaccccagccaaggctcctgacctcacccaaggctcctgaccccacccaagactcctgaccctacccaagactcctgaccccacccaaggctcctgaccccatccaaggctcctgaccccagccaagtgtcctgaccccagccaaggctcctgaccccgcccaaggctcctgacctcagccaaggctcctgactccacccaaggctcctgacctcagccaaggctcctgaccctacccaaggctcctgaccccgcccaaggctcctgacctcagccaaggctcctgactccacccaaggctcctgacctcagccaaggctcctgaccctacccaaggctcctgaccccgcccaaggctcctgacctcagccaaggctcctgaccctacccaaggctcctgaccccacccaaggctcctgacctcagccaagactcctgaccccacccaaggctcctgaccccacccaaggctcctgaccccagccaaggctcctgacctcagccaaggctcctgaccccacccaaggctcctgacctcagccaaggctcctgaccctacccaaggctcctgaccccacccaaggctcctgaccccatccaaggctcctgaccccagccaaggctcctgaccccagccaaggctcctgaccccgcccaaggctcctgacctcagccaaggctcctgactccacccaaggctcctgacctcagccaaggctcctgaccctacccaaggctcctgaccccacccaaggctcctgacctcagccaagactcctgaccccacccaaggctcctgaccccacccaaggctcctgaccccagccaaggctcctgacctcagccaaggctcctgaccccacccaaggctcctgacctcagccaaggctcctgaccctacccaaggctcctgaccccacccaaggctcctgaccccatccaaggctcctgaccccagccaaggctcctgaccccagccaaggctcctgaccccgcccaaggctcctgacctcacccaaggctcctgactccacccaaggctcctgacctcagccaaggctcctgaccctacccaaggctcctgaccccacccaaggctcctgacctcagccaagactcctgaccccacccaaggctcctgaccccacccaaggctcctgaccccagccaaggctcctgaccccacccaaggctcctgaccccacccaaggctcctgaccccagccaaggctcctgaccccacccaaggctcctgaccccacccaaggctcctgaccccacccaaggctcctgaccctacccaaggctcctgaccccacccaaggctcctgacctcacccaaggctcctgaccccacccaaggctcctgaccccacccaaggctcctgacctcagccaaggctcctgaccccacccaaggctcctgaccccacccaaggctcctgacctcagccaaggctcctgaccccacccaaggctcctgacctcacccaaggctcctgacctcacccaaggctcctgaccccacccaaggctcctgaccccagccaagtctcctgaccccgcccaaggctcctgaccccagccaaggctcctgaccccgcccaaggctcctgaccccagccaaggctcctgaccccgcccaaggctcctgaccccagccaaggctcctgaccccacccaaggatcctgaccccacccagggctcccgaccctgcccagggctgccaacccccaggcctgccgagttcctgctccctgaggctttgggaaagactcaaaggctttgggaaagactccatgtcagttgtctgccaggagagccgtggagggcagccgcctggccccagcccgaggccatgtagagcctccagacagaatggccaggaaactgagtcagagcctgtttatcacgcgtgtgacggagggcgaagacctgcatcacgggagaaccccacgcacacggagctcatggcctgtgccagggtgggcgggagaccttcacccacccgccgggtccccgggacacagcgtgtccgcctgctcttccccaggggtctcagggctctctgctctttgagcccaggatgaccctgctcccccaggctcagagcccagcagctcccggagggtggagggtagaggaacgcggagcttctactggcctcacaggcatggccccattcatttagttccacaggtcggggcttcccagcaggggacatggaggcccagaaagcatttgtctagagtcacacaataccgtggcagagggaggcgaggctgggacccataggctctgtctccattaccccaacctgcagctgccccacctggcctggtgtctgttactggtggaccctgctggcggagccctgggagaaagaggcgctccaggcgtgggcggcgggggctggcatctgctcctcggctgctttcctgaccgagtttggaactggaccgcatggcccttgccctccctctgtgccttctccaggtggcgtcacaggggcctgcagcagctgcaccaagcccggcccctggggttctcagctgcctggcaccctccagtccacactgtactttgccagggcctctgaaatgcagaggctgaaccacagaagaagtggctcacccggagactgcggcagcctgaagtcggctgaaccacagaatgagtggctcacccggagactgcggcagcctgaagtcggggccctctacgtctttgtcacgctctctcccggaacaaaaccgcccttgggcttcaggccccagaggttatgcccacgggcagctgcccagcagaaccatcatcacacgagattggttgctcactcctcccccatcgacccactccccggcatcttccctctcaccaaatgctgccggtggttctaacctcacagtctggacagccagctgatggccccagaggttcctggtcagaagtgctgcctttccctgccctcgggacacccccgcccccacggcagatgccactgcctttcagggccagtagcagacatggcagagcactctccgtggggctgtcacctgactcgggataacagtgctactcacacagcacaaacggggtcggagcttgcacagagaccacgatgccccctcagcccagggaggacgacgcaaaggtgatagctagtccctccacccccagacacatccccttgctgacccccacacctgtcctcagtgtacatctgggaagcccagagagggtcagtggctcacctgagacacacagctgtggtgagacaaggttctccatagactgtcagccgagcacagataaactcaaaagcagatgcagtgcacacttattcagacataagaaggaaggcaggtccgacacacgctccagtggggatggacccagaaaacacgggcgagtggaagagctggacacaggatcccgcttacacacaacaccggaaaagacaaatccacagaggcaggaagcagatcagtggtgggcagggcagagggagggaacgggcctgactgcccgtgggcatggggtttcttttgggggaaaatgttctaaaacttgttagcaatgatggttgcacacctctggggctttgctaagtgccactgacttgtgtacttgagatgggtgagttgtaagatgtgtgggttatacctcaacaaggctgctggaaaaccacagtagacccggaacgaaagtacctgtgagctgctcacaatccctcgctcacagagaggccacggaactttgtcagcgcaccagggcagtagcgggatgggtgtcaaggccgtgcacacccacgaggccgtaggaagcctggtcaggctgtcggggcctcagacggcagaaacctatcccgagaggaaagggccctgggcacaggctatggcagaagagcttcgagagcccaaagctcccagggaagctttgagcttcctcaaaaagctattttgagcctaaaatagcttcaagagcccaaagctcccagggagaagttgaggttgatgtggtcacctcgaatggggaactcctccaggaaggaaaggagaagttttatttggggtgggggtgttagagtaatgccaggcggggcggcgggggaagaaggttctggggcggggcgttagagtgacaccaggtcccggtgcagcgctcgtgagtgccccacatccctgggcatcacacgcgtgtcgtctggagcagaagctggtggagaggtgtccttcctatttctcagatggggagactgaggcctgggtgggggcaggtggagaagcacagtcgccgcccagcagcccagcactacctttggagggagacaaactcgctcccccagggccgggggctgggggcctcggtgtggcctttggaaggagatgaacttgctctcccagggctggggcctcagggcctcagcgtagcccaggtctgcgctggctctgggctcttcccgctgcaggtgtgggtcccccgtgggcagctctcacaccacaggcctggctccctaggggtatggtcagagtgggaccctgtaccgcctctgccgcccttttccctttgcctccatggagcgggcctgagttcccagagggctgattcctctctctgccccgacccctggcaaccctgtcagctgctcattcacctaatagacaagtgctgtgtgcccgggctgtgccgcaccaacccagggccaggattcagaggggaacagagaggaagccccatcctcgcgatgccaaggtcccagcagctggaggggcagcgccctgctgattgacgcgctgaatcgtgtgcccccgtccttactggcaggcacgccacatgtgctgtgtgccatgtgttcaggtctggcctgggcctgctgtgtcctggtctcatacacgctacatggacagtcacatgagcagctgctgtggccgcggacgggtggtggggacagggcatgaccctgttgggggagcagaggggtctccttgcgggagagagttgaagtagtcctggcgatgatggtgggctcccaggagaggtggagggaacacgcatgcacgcccagggctggaggcacgtgggtgttcagggcctgtgaggaggcccgggcaccaaggcagcacccagcgcttacagagcctgcaggtcttggacagaggtgcaggcagaggcaggaggtggcatgggtcataccacctgtaaaagccaggcgcagtagagaatgttctagaaataaatgtgatgctgcgattgcctgagagggaacccaggtgcaggagagggaaggtcccggggaaaccctccttttcctcctccttcctcccagcagctgggaaaggcgatggagagaaaacgggagcagggcagagacggtatctgggattacaggaggaaaggtggctcattgtttaaaaagatcattaagcctgtcatcccagcactttgggaggccaaggcaggcagatcacccgaggtcaggagttcgagaccagcctagccaacatggtgaaactccatctctactaaaaatacaaaaattagcaggatgcagtgacgggcgtctgtaatcccagctacttggcaggaggctgaggcacgagaatcacttgaacgcaggagatggaggctgcagtgagccgagattgcaccactgcactccagcctgggtgacagagccagattttccaaaaaataataataataaattaaaataaataaataaatcattaaggttccaaggaaagatgagtctgtttccctcagatgattttcagtagaaaacaggcagagataagacaaagtccttgattcccaggtttgtctgccctcccaggacagcccacgagatgtgagtggtattgaatgactcaggcctacacctgctgggctgggagggcagggcactcttctgcctcaagctctaagttcaatgtggacggcatctgtgaaatgggactgcgtcacctgctctgctgaactcacggggccaggtgccaggtcgacggggttatgggtgcagaggctgtttgaagatagcagagaagatgtgaagaaagaagtttgaaaatcctggtgtgagaaggccctcgggagtgtcacatttgaacactattgatttgtggactggaacctaccggaacgaatccatttgtcatggggcataaacagaagtcggctgagtgaggcctccacaagaatctcaattttccttatgaaaagaggctggcctagtctttgtcctctgccccttcttcctccttcctgcctggaatgcagacatgatgcctggagcaggggcagccactttgcagccaggaaaccataagcaagaggatagtgaagctgaaagagcagaaatgccaggtaccagacagtgtcgttgtggcactggcctgggccacccgcctctgggtttggtcatgtagaaacaaaccttgtttacacccccgttaggttttctgtgatttgcagctgacataatcctattggctacagggatcaaatccatcacagggaggtctgccagattttggagattacagatgcagaatgcctggttaaatttgaatgtcagataaacgataactgatttttagtgcatgtcccaggcaatatttgagatacgcttacgatttaaaaatttgtttatctgaaatttgactttaactgtaatgctattcactgatgaagtcacagaatccagagaggctgtgagacctgtctgaggtctcgctgtgggcaggtggtggatggggctctgccttctgtcttccacggcctctccttgctttgatcctgatctggtgtctctagagctttctaaacctgctgtaacagatctgtaaagaagggggcctgtggatgccgccagagcccgtgagaggtggttcccagacagggggcgcacggggagtgacggaaccttctgtaggaactgacacacagcactggagatttccactgcatagtaaccgacactcacccctgggcattcccaccacatagtgactgaccctcagcactgggcattcccactccatagcaactgaccctcagcgctggacattcccactccatagtaaccgacctcagcgctggacattcccactgcatagtaaccgacagtcagcgctgggcattcccactccatagtaaccgaccctcagcgctggacattcccactccatagtaaccgaccctcagcactgggcattcccactccatagtaaccgacactcagcactgggcattcccactccatagtaaccgacactcagcactgggcattcccactccatagtaaccgacactcagcgctgggcattcccactccatagtaaccgacactcagcgctgggcattcccactccatagtaaccgacactcagcgctgggcattcccactccatagtaaccgacactcagcgctgggcattcccactgcatagtaaccgacactcagcgctgggcattcccactgcatagtaaccgacactcagcgctggacattcccactgcatagtaaccgacagtcagcgctgggcattcccactccatagtaaccgaccctcagtgctgggcattcccactccatagtaaccgacactcagcgctgggcattcccactgcatagtaaccgacactcagcactgggcattcccattccatagtaaccgacactcagcactgggcattcccactccatagtaaccaaccctcagggctggacattcccactccatagtaaccgacactcagcactggacattcccactgcatagtaaccaacactcagcactgggcattcccattccatagtaaccgacactcagcgctgggcattcccactccatagtaaccgaccctcagcactggacattcccactccatagtaactgacactcagcactcggctttcccactccatagtaactgatactcagcactggagatttccactgcatactcgtacttttttacttttacaaaagcatcaattgccaatggatatttattttccacaaataacatgagacgccatgaaccagcctcgaaggtgaatgcacttcccaggctgctgtgtccactgtgtctgctggggtcactgtcctgtgggggacgctgaggcttcctctgtgctcagcaggaaaagcattgtgatccattacccatgcctgtcgtgagtcccgaaggagaggcccagggcccaggccactctgcaccctgagggcacgtggtggggccagatcaccaaagggcacatttgggaggactgaacacagatgccgagtcccctggaccacgtttcggggggagacagccacgtagccggagccagtgccttcccacccagcacctcctgtggtcctcacggtgctcggcccagccacgaacatgggtgtctttagatgtcgcctggtgggaaaacagggggagcaaagcctgctgctgctttctcgtctgtgccccgaaccctggagatgaggggcgctgaccctgcacggcttctgagcaccgacatgaattcccaggtccactcggaagggagctgggcaaccccaccccgcgtgtctgaaaacttccacttgcttgatttccacagggcctccaggagggcacagggcacgccaccccactctgtggtttgcagaggggagataacggaggttgggtccaaagccacatcctcagcacctgagctgcagggacacagtcagtgccaggggccctgggcagatgcgtagctgggcctggcaggatgctgggggtgcttcttcaaatctggagggggagctggaagaagcagacacaggcccagggccggagggagagaaggtgggggcttggacagaggctgtaaggagtttctaccaaagtccagggacagtgggggaaggccaggggtgggcgctcatcttctgccaggggtgggcgctcgtcttctgccaggggtgggcgctcatcttctgccaggggcgggcgctcatcttctgccaggcttttttttttttttaagaatgttaagatcttttaaaaatttgtgataaacagaacataaaatttactattttcaccattttaaagtgcacaattcagtggtatttagtacactgacaacgttctgcaaccagcgcctccacctaactccagagcacatcatcaacctcgcagtgaatcccggccccaggagctgtcactgtcttctccacaccctccccatggtgaccccaaatccactctgtctctgtggatttgttatcgtggacattccataaaatgggaccagaccgtatgcggcctcttggctctttcacttagtgtgatgttctcagagctgaagcaccgcgctgcagtgcgcatcaggaatagattttagcggcgtcatgcctggatttccctgctcagctgacacttcgtgagccaggcacacagcggcccgaggagagccgcattctgtgactcagggttctgcgggatcctggaatgcagggaggctcgggtccgtgcacgtctgaggcaggaggcctggcctggccacacgggcgtgggttcctcatccctctgagcctctgtctcttcgtggtgacttaggggactctgcatctcgcttgcagtgcatcttgagaaagagaagagctctgtctgcagtgaggagaggacagagagctgcccagagctcccagccctgcacctgtgaggtaggtggcacagctctatgggggtctttaaagggccacgcacacaagaccatctgcatacctgggccgatcggcttaaaggaatccatatgtgggtcttcaccttccagattgttctgcaaacacggcttggggtcagctgtgtgctgctcctgcctgctcttcccccaattcatgggttgcctctctctagcatgagtctgatgacagggcttcgacccaccagtgaaaacctggggcaggccccatgccctgcctgcctcctgttcggaaaccacagacccaaaggtgtaaaaaatcacgttgacttctggccctcctggtgttagccaggctgccaagggcccagtggcctcttttgacttttaatttactgctggtgaggcttcagttagggttagggtgcagaaaactgacaagttgcaagctacttgttgttctgaagaaagattgcacttcactaattcccactcgtcaggttccgtgtggctttccttcttcatggggtctttaatgtccctcgtcccctctgaatcacctgggctgcccgactggctccctcatcgcggaataatacacctttcacacatgcttactgtatgtgtgtataagaactatgtttttaagatttgaaaaatatactttgacctttccttcctgcttccttacctttttatcttcccatccatctatccacccaccaacccatctatccatccacccactcatccatccatccacccatccatccaccatctatccatccagtcacccatctattcatccatctatctatccacccacccatccatccactcacccaccatctatccaactgtccatccatccatccatccaccatctatccacttatccatccatccatccatccatccatccatccatccatccatctatccatctatccatccatccacctaccccacccaccatctatttatccatctatccatccatccacccaccacctatgcacttctccatccatccatccatccacccatccatccatctatccacccacccatctatccatccatccatccatccatccatccatccacccacccacccacccacacatccatccatctatatcacaattagaattcaaagtgaggcatttggatcatttaataacatgcttatttgaattaatatctgacaaacatcagtctgggcagattgtttttcagtgaggaccagttctgccctttgtttttaaggcagcatttctataaatcaagtgagctaaatgtgcagattttcataagaccagatgccaaacactggtaacatattaggtatgctagaaaatacagtttttgagactgtttaatcaatgtttagaggctgcaaattggcccatgtggcaccattgccaagggtcctgtgtccagcctttggtttagaaggatacttggtgcgcagcgccagccacaggccccgaatcctgcttctacaacccagggggctaggtccctgcggggcagagagtttgcagaacaggtgtgtgccacggccaacacatgcctcacacactgtatgcagctgttcttctgtgacccagtggtgaggttgcggggtgcagctgtcaccttatttattttaacaacgtcttgtccacagatacctgtcatgtttgaaaacctctctagtggctcctgggccaccattatctgccaaaaacgaagcagcataaggtctgtgtgtggccaggctgggtgaggctgctttgtaagcaatttcatcttataggggaacttggcttgtcaaaaaaaagttttagggagctcgcaaacaaaagcattaaaagcccacagaaccaccggctttgagaatcgggcctggtgcttggcacctgacaggtcctctccactgtgcccggtccctcctctgtgggctgatgtcaggggaggggacgggggcccattcggcagcaggaacagagagaccccacagagcatgggtgcatacagagttccccctgggccactccttggccagggaaagcagacctcgcctcctctcgtagctgcaaggtggggcccctctggacggagtgggctttcccggtttgtgtgggtcgctctgctctgagggtcactctgctcactggcctgcacagtcccaggacttccccgacctgagtcacagcacggcttcctgaaacacatcttggccacattaggccgtctctagggacagactccagagcagccagctaacagggctgccattttaccctggtccttggcaggagtgaggcctgtgccggggtaggggggtggcagcccctgtgagtgcccacagaggagagcagagcgggggatcgcgagtccacagacctcccggcccctctcccacctgtgcagcatggctgggctacctcccctgccacaccctcatcccacctggggtgaccaccaaacccatgtccagacgaggaccaggcccaatcaacctctggcctcccatgaactcagtagtggaagcagtagaagcacccggtgccaggccctgcccagcgcccagcttcccagcctcccttggaggccggccctggtttccacaaacaaggaattcctccaggagcaatggacactcttgacctccagaaccactgcctgccatcaccaacacctgcgctggacagaggcctttctgaacacgagctgggtgggttggggtggggggcgtctccagtgactcccgtgccctggccctgcctggcttgcagagccacccagatggaagtcggatgcagcacgcccactgctgcccctcagagaccaggcgctcatttcccccaggaagccgggatagggcccacacccaccctggactctggaagcccaggatgagaacttcgtatcacactctagtccctgtggccaatgtcttgtgtttgccttggagaaaccatgtgggccccaggggacgagggaaagcatccttgattgaagcattgtttgtagcacgggaaattgacgcactcaacctctctccatagggaagctgagaacagtgcgctggtgtgtgccacccccaacccccaacccccgaggtgccactcggccccgacacgcggcagcaccatgccaccccccagcccccgaggtgccactcggccccgacacgaggcagcgccatgccacccccccagcccccgaggtgccactcggccccgacacgaggcagcaccatgctcaatgcagtcagcctcgcaggtgtcgagagaggaaattgcaaaggaaaatgagaattcgatgccttttctgtaactgtgcgagacacactgcctgggagcgacggggacggggcaggatgcctggggacggctttccacaccctaagtgctgccatgcgtccacctgttcagttttcacagatgtgccggagacggggactgctattgccccatttaccgatgaggaagccgtggtggggtgtggggtggctaagcctctgagctaggtccccccaaccccttgatcccatctcgccgcccccaggtggggtggccttccgggctggggacactggacctacaggaattcctttctataaagaagagggaaggaaggagcaggccggggacggggacggcgtgctgccctgcgtggctcccgcgacctggcttctcctggggggttaaagatcagccacagagcacaggggtgagggtcaggcgcacactgcctgggggctcgtcgcggctcagccctcacactgccccttcctgtccagggcaccggggaactcaggacgccccctgccccggagcagcgcgtccagcgggggtcggcgtgagctgtgtggaggcgcccaccctcccttgcagccagaggtaggaagtagaagggaaagaggagaggtcgctctgtggcctccagaatgtcaccattttcacacatgttcagtttataaacttttaagctttctgcatccttcttttcgcaccatgactaaagtgactgaaattctgtgggttcgacgggtcatggggctgagttgggaccatgtgaccacagggctttgatgaggaaccccccataccgcccatgctggggcccacctggaggaaataggcccagagaggcacgccctggtgagaggccgaataagggtggaccacaggggactgccaggggccctggccgcaggactgcccgtcccagctgtctctggccctggggaggggctcagtagggaggggcgggaagcacctggcagtttcagtttcgccaggaagcggctgcctgctgtctcccttcccacccgccgcccggagagccccccaggtggggacggccccttgcactgcagacgaggaagccccagctgaggggccgcaggacaagcctcacggctcctggcagtggggacagagccaggcccagcctcagctgcgtctcaggaggacctggggtgggagaagcccctgggggccgagagcagatgagggcagatctgactggcatcttctgtcacctgctggtgaccttttagaacacgtggtcccaacccttggtctagaatatgctgccgtgttggaggggcagaagcagctgagacggctgtccgtcccccgcctgtcagtccgtctgtctggggctgggggtgtcaggacaacacccaccactgcaggcccccttgggaataagcggcaagaagcttcggggtccagtttgcaccgagcccctccagcggggacgcctctttcatttctgcaccctgcgcctggcacggaggggtgtgcggtcagcgggtgggggctgattgggtgacttgcagtgacagggtggcgaggccctggacctgagtgccatgtgacccccatggaccataacccctctgagctccagggtctgcagcgctgcaggcctcacacaaatcgggggccaggagcctaagatctgctctctaaatctgggagcccagccagagcaagccctcagcagacccagccccagtgtgcggcctggtgcccccgttttgaggaatcccccatcctctcgtgagcagtcggctgggtcaggctggctccaccggctctgggattcggctgcagcctggcccggatgccgccggggtcaccgccatctggagtgaggggctgcagcggacacggctggagggacggttgcaaggtcccctcccccactctgtccccctcaggtctgtgaagtcgggactttctagacactcaaaacacacctggacttgggagctcaggaggaagctccgggagcccacagggtggggtgaattctccagttccttctctactgggctccctcccggctggtgcctcctggccttggcaggggtgggaggcctggtgtctgcagggccagctgcgggggtcgcaagagcggggccccttgggaaggagtgccaggaagagggtctttcctcaccaaatcccaccccagccttcaggaggggctcgccgccaccccgttttacaaacaggagacaggctggggtcagcgtggccggtggacagcagtttccattcccaccatggtcgggtccagccactgcccctcacagaccagggagccgagggagaggggggcggggccggcctgacgacgcacagacctcagcaccgcccgtggggctgcatcttgcaggctcagggcagcaggccaggcttggctgccagggtgcgagtggcaggtgccggggggcaggtgctggggctcccggtgggccctactagagggcaccgtggacccggtccagttagggtgagcatggcctggggggttgcgatttggcagagcccccgatcttctgcaaggctgtgggttcaccccatccccctccacaggggcctcccaaaatgagccccagaagctgtggctgttggaggcttctgccatgtcttctcaggagggcatgccttctggccccactcctcccagggagaaagccacacttggggccctcaccccaggagtcctcgtctccacaaagggggcgcctggaaaagctgatggaaattcacgtcagtgggaggcaggcctgggggaggggttggcccactctccaaaagctgccagtgaaacggctgctctgcagctgtcctgggccgagagaggatttcactccaggaggcggtggcggcggccccaagccggcagccttgctgtgtgatcagctgggtgtcaggatgtgcttgatccaggggtcggcgacgcgggtgtcaggcagcacctgcgtggggcttcctcaggtgaagcaaggagacggagaggtgggttcggaggggctcagctgagggcgcggctctcgtctcagagcagggcgtgcagtggggtccctctcctgagatgcgacctcagctgccttgcctctgggagggtccctggcagagatgcacagcctgggaggacgtggcccaccccagccccgctgtgtgagctcggctggtttcctgacctttctgatttgtgtcctcatctgaggtcagcgatgcccttgaagtgttgccgggtgaaagccgggaagggattgccgtctgccccttccctccggggccacagggcctgagttcctgggaaaactgtggagccagtccctgcctcagcaccagcaggatgcacacagccaagtaacaactgaaggaccaggagcacggaggcctcgcctcgcctggagatggaatagactcacgccttccagggctcagcaccctcctgggccagcaccgtctgctgagggccctgctgcaagcaggcaccagagcccctgtctcgtgcagccgacgctgggggccgggggatgagtagtacgtaagggggcagctggtttttctcatggggtgacagattgaaggagaggaacaccgagggaaggaggtcggtcgggagggggctcctcggcgagggcatagcacaggcacgggctcgggaggcttgtggagccgccaggcagccggggctgtgagtgccggaggccgacgcggtggggtcgggccgggagggctgggccgtgggtgtgcgcaggtgtgatgtggctgacgtgttttcatcaactcaattttcctttttttttaaagacacggtctccctctgtcatccaggctggagtgcaggggcgcaatcttggctcactgcaacctctgcctcctgggttcacacgattctcccgcctcagcctcccgagtagctgggattacaagcacccactaccacactcagctaatttttgtatatttactagaggcagggttttgccatgttggccagactggtctcggaatcctggcctcaagtgatccgcctgcctcggcctcccaaagtgctaggattacaggcatgagtcacggcacctggccttgatttttcaaatgacatggtgacccagccactctctgcccacctgagagagctgcctggggcctggggtgggcagagctgggagaggaagcccctcggtggggtccccgctgtggacctgtgtcctgggcaactgcccgacaggcctgggagcggccgtcctgggggtggacttgggggttttgtgctgagaacttcattggcgcctgctgcaggccggcctctggctttgtaacagtcgacctgagtgacccagtccacagctcccagctggagttccttcaaagggtgggtgggcggccctcagacaggcctctcttttccctgcttctctccagctgcccctggccgacgtctcctcggaggagcactggccggcgagtcctggctcagctgtgaccaatcggcctctccctgaggccgctcttcctgcctgcgcctccccggtcaactgcagtcacggaagtgaaagtgccggaaaacccctgcccagcgcccaggcaggttaacgggacgcactgcttctcggtccacatgtggtgagaagtgaaagttgtcttcgcctaaagagtggcctcctagagccgcccccatggggccacttcctccaggaagctggcccggattgcaccctgaccctaggcaccgcccctgtcttcctaggtgctgattcaaggtctttctgctggacaggaggacatggctggttgctgtccttgtgtgtggggatgggctggtatggggaaggagcggagcattccagcagccactgaggcctcagggaagcagtgccacgcttactggggagggagggagggaggtgcacttatgggacctggaaagctggctgcacctggcagtgaggacgtgcccagagcccctgctccctgctctgtgccagtggagcctccggtggggagatagttgggggggagtcaggctttgtcccaccgtccactctcctgaggacttcctgcctctgtggatgcccctctctctattactagctcatccattcctcttcaccctctggccccagagctctgcactctgccgcctctgtctgaccttcgtaaatcctccctcatggagctgtccatgcactggcagccctgtccccttgcgatgctgctggctttctgccatgactgacccaggagggattccagggcaagcttccctccgagcctggggctggactccacggtcagtctgatttcacagcagcaagatcctcacatctccagcccatctgcctctgccccacagggtcagcagagcctgctgtgtgcctctcagaacctcagtctcttcttctgtgatagcagtaacagcagcactcccaggctggctccccgacatggagccccccaacaccatgtggtcaacaaaaggggggacaggaggcgggaggtgaggtctgagggtgctggggaccttgggatgatggctgtgatggcactttgctcacagacacaggtctgacagctaccatccggcccctttgcaggcacccttggggctgcctgtctgtctgtctgtggcctcagacgtcttgtcatgcacacactgacctccctgcctctggctggagcccacagacaccctggccgagctctgcatgatccaccagctccaaagcccagcagacacagggcctgcggctgaaggaggagtcgggctgagaccgcccggctgctcatgtccactccccctcccaccgcgcccccttgatggggcacctcccataaccggggctgcctgcagcctctccagtgcctccctgtgtcccaccgcctggagtgcagagtgagtggctggagctctggcctagggtgggctgggccttagaagaaggaggcagaggaagatttgggagggaggagacggccttgcaaagacagaggtagtggctgcggcacggcggccacagcccaggaacacctgggaccagcaggacctggagaaggcaggacctggaggagcacggccatctgacgccttagtttcggacttccagcctgcggcactgtgagaacagaagcctctgttgttctgagcccccagccagcttgcagcccatccttactgcagccccaggagatagaaacacccggggagggcaatccagacccagaacattccagacccagaaccttccaatgcagaatattccggacccagaacattccaaacccagaacattccggacccagaacattctggacccaggacgttccagacccacaacattccagaggacagctgggcctggatggccacttgaggggatggaggatggagagtgagtggtggcaaagcccagccccaagggcaaggtcgggtagagggagcccaggctgaccgcaggctctggacgtgacccctttgccaggtgggctccagccagggctcaagcttcctgcacggatggtgccttcacagcatctgcccagtccccataacatctgcccgccttgcccggtccccataacatctcccgccttgcccggtccccataacacccgcccgcctttgcctgcacccctccactgatagtgctcaccacctccccgagatcccacgtcgtccctctaaggtgacaccaggcaggcctgactcagtttctcccccatggaggtcccagcacatggcactgaaacttctctgcctcagcctacacttgccaggtggatttcaaaatctctgtccctggcaccctcctcgggtgacctggttcccatccctctctcctgaggcagtcaggtcacctttctgacctccgcctcttcttctgcaaagtgggcttggggggacaaggcggtgagagcctgcacagctccgagcacacacagcgggcgcctcgtaaacccagcaccgcaagcaccgtcttcaggggttccttctgcaccactgggcccaggggtcagtgaggatccagaccctccgcgtgagggggctggtgaaggagcccagggaaggggtcccggcccccagacggcggcgtgtgctctgtggccatcttctgattgcttacacctcagcccccaggacgctgtcagaggagacgaggggctgaggtcctcccaccccctgcacagcacacagacgtctctcctgcccgccaccaaacgcgcagcaacacagccctgctcagtacgcctttggtctaaagacaggaaggttcttctacttcagcttttagaaatattactgttctccccagagtttaaagccaatcggcctgttttcaggcctcaaaggttttaggaactcttgggaggcctgtgtgcctgacagccacacagtggggctgaggtgccctcaggtctgtccaggaccccccgcagttcccatgccccccatggcccccgctcctccagccaggcgaggcttgatgccgaggctttctggcatcacaaggctcccacatctgtcccctgggggccttgggaggcccctggggtacaggatgagaagccccaagtgctggtattcacatgtaactctgctgcctgatgtggctaaggctgtcccatgggtaccctggaatagggccgggtggttgcacggacagaagcccctagaagccaggggcaggaccccgcacccaagtgagaccctgctccctcctcacattgcagcccctaagcaggggctccctgggggtgggcacagtggctgggtactctgtgttagaggccaccctggccctctgctcctgacctgcagccatgtcagaggtccaccctgaccctctctgctccacatctttagccatgtcagaggtccaccctgaccctctgctcctcacctgcagccatgtcagaggcccgccctgaccctctgtttcatgcctctagccagcagcccctcgcatgactcaggcacggggccacctcttggccctaacctccttccacggtagacacccccgtccttccacagtagacgcccccatcctaacaaagcggcggctctccatgcgcctcagagcccgtctctctccgcgccggtgagaacctgctctcacgcggggagcaggtcggaagggtctgaaccatgaggaaactgaggcccagggaggaagcacccggcccaaggccactcagcgccaggggatagacagggccgctccagagaggacgggatggcagatgccagggccagtgggctggtgctgccttgaaggtggctctgagtcacccattcgggagaaacgaacagtagcactggctgtggtgaggtccggcctttgcattccgggcacccggggttgggaagttcctgctcacatctggggcccttgtgggggatggccctggggccccacgggcagctgcaggtgggaacagcctcaggcagccgccgccaggacctgctcagggaatgtggtctccagagatggggacacccctcggtcccgggttctgtgtgtgagtgtcaggggtgcagtcagaccttggacctgacggcctcagtgagagccccgcgagacgggagactgtgagctcctgaaggttccgacggctgctgggagtgtggccacgagggccactgggaatcggggccaccagcctgcagctgcagcccccagcgtccggggatccttgtcctgggacttcgcaggctcgggtggggggtatcagcaatagctggcgtcctgctggactggacccctccccagagcccgaagcccccagaagggcaggcccaggttccccgtaaacccccactgccctggctggaatcgttcctcggacaggggcccagggttgggtccatttcctcctcaccggggtcttgggccagtgccctcccctctggcctcagtttcctcatccaacctgctgtgaggtgtcacacccggagggcatcccaggaggaggagggctctctttctaggacccccccatcacttcccggctgcggccctcccacccccaggagaacacagcccaccctcctagacggggctgagcagcccggcctccagcatctgcctctgggtggggctggggcacctggctggcacctgccaaaccctcaccagcccacctgccccagctgtgcaggacctgcctgtggggtggccctgttgatatctgaggtgagtcaacacggccatccgtgccggcactgtcaactaagctgggcaggccccgcgaagctctaaggagtcacagccccggcaccggctgccgctctctgcccccaccccaccaccttcccctcgagcctcttacctgggccgcccttcctgggaccccggggtgcggagcagccggcagatgccaggaggccgctctccagcacagggtgcgtctgggacatggagccacaggtggatcccgaggctgaactggctgccctgtccctcagtcttgaagccggcatgaggagggccaccctcaggggccaacctggagcccaggacaggcctctaccaggactgcctttcccgacctcctgcagccttgagggaaagaggaggggctgggccagctggggcgtcctggagttgggcctctgtccctggaaagccgaggccctcccggccaccaactgggtgtcctctgccctggggagggggtgggagccctggggctcatgtgacgcggggcgggcctggggctgcaggctggggaaggtctccctgcagcctgcgggtgaggcagccagctgtgtccccgtgataatgccggggccggaggcctgcagctgcgcccgccacttccctgacaggaaccatctggggccctgccctgcgcggccttccctcgggccattccggtttgaccttccaacaacttcctcctcccaggcagctctggtgacgtcccacccaccctgagccctacagcgtggccactgggcatgtgtttcctcggccccagggcaggtgtgcaggcctgagggcagctccatcctggcccagagcccttggcctgtcccgcccacccatcttccccccagggcttggcccttccttcagcctggggtatctgggggtgtcctccctctccgctagccctcagtcagccgagctttccccagcaccccttttagtttgcccccgctccaggggccaccctgcccgtgttcctgtgtctgctgactgtgcccttgagcaaggcggggcctctgaccagcctctcctcagcccctgctccggggttcttgggcacctgacctgtcctcaaagtacctcccgcctgctgggaaggaaaccctctctctctgcttggcctcgtgcacagggctcctggccctctgtggagacagcagggctcccccactctccgggggtgcctcagaaagaccctcaccccacgccccagcggccgcctccggtgagcagcctggagtttgcgggggtcgggggtaggtggcttctccagtctgggaaattccagaagccacctcagagcactcttgggactacttagaccctagggagagtcctaggacccctttctagcggccgttgggctgagagagtgaggcacatcccagatgctgggaaaaaaagccactttctaaagctccctgacaactgtcagagggcaggagcttcctgggaggggacagtgacccttcggccctgcagccctggttcggtggcttttctgatgccatggctggaggtttcccggcctcagacaggccagaggtgtggagcccgcagacccagggccggctcacgggcatctgtgctattttgatttgatttgatttgagttttaggtcacgtttgcacgcagttaataattcaagccgtgcaggagtaaaagccgactccttccccgcagggtctccaggtgtcccgggtctccctgtcccaatagtcgagtgtctttctcgagttggtgacaacaagctgcatgccagcgtgtgtgtccagcttacagtggggatgtgtttgttcctgctggggaacttcccagacgccaggcccacccggggcctcccctgccctgggtggtcggccgttctgcccccaggactgaggctggaggggacattcctgccagcccggggcccatcccctggtgccatcattcggtccccacgtcccctgctgttccctgtgctctggctcagggtgggattcacagtgagggtcctgggggccctgaccctcctggtttcctcatttgtgcagggtgcacgatcctaacggcgt

SEQ ID NO: 90 - DNA, 10070 bp, Homo sapiens
  source 1..10070: mol_type = genomic DNA
aatcggcaacaggtgggcacatagagcttgcctgctttaggtgtttatccattaaaataatttgatgaggattgcaaggcttatgggctttaaaaaacagatgttatttttcctttgcaaaaaggcaagagctttccctaagtgttcatcaagaagtgtccagggcgcgtgcacacgtacacacacacacgcgcgcctttacgcaccttcacaaacctcagaaataactcattggagagccccagatgtcagccgttaccccccgcccggtcttccccaacacaggggaccacagtctgggagccaggagggcaaggcccgcccgctcaccttgggcttgctgccgccgatggcaccaggacgtatggagccagtctcctggtacctgcacaggatcttggagacgcagccgtgggacacgcgcagctggcgcgagatgacgcagggccggatgccgtggtgggccatctccacgatcttgtggcggatgtggttgggcagcggcctgccgttgataaaaacaccgccgagctggttgacgcggccctggccgaggggagtggacactgtgggaaggtgaaaaagagaagcaagggaaaagtcactggaggaaaataaaaagcaaagaacagcagcacgtaatttcgcagtcttctgtcctatcctcatgttacagcaccgacgctgaaactgctcgacatcggactcccagacccagacctcctttcaatcacatttgttcaaattattcagcaatatagcgcatgtaatcttgtgtaaagacagcaaatggggcaaaataattctccccagagaaagcgtcttccccttcgggcccggggagtggcaacttaggagaccctgcagctggtagagagtctagcttgctctagaaacagcctcctggcgaagagaagttcacccaggagctggccttgatgaactctgctcccaccgatccctgtccaattgggatctctccctttctaagggacttgggccagctgatagcccttggggtttctagccaaaagtgcagcagccaagggtcaaagagggtccagaaaggaggcccaagcagcagtgcctgtgtcacctgttacatcttgggacagagaccacagcagcggcagggctgttcctgggcccccagcccccattcttgctctgggtgttacattctactctaggctgggtgtgaagggagtgggtggcgggggcgatgagcatctctgctggggcgccctaacctggaaaaccattgaaaacggctcaggcttgcaagacttcctgcctccccgggattcccagaatcttcaagtggacggaaaggcgattcctaaacaagttatagaaacttctagatgctatttgagatacatagaattctaatttatttaattattctaaaaattccaatcacaatggcgcggcgttagccaccacaactttgcagggcaaaaaaaaaaaaatacttcctgaactaacatatgtttcacaagtgtgggcgcagccgggacaatttcgagacaacttcgagacaatttcgaatggacaaattgcggagaagttgcttctgccgctcagaagccggttcacctccttctccaccgcggcatttccaaaacaacagggacaagtctccccggctcgccgcaggcctgaccgcccagctccgccaggatttgcagagagcagcgcgctccatttgcagaaaggaaatcgagtaggtcctcgcccccgactggtgcttcttggggtgtggggtgcccagggaatgggcttcctggaagcaccaaaggagcctgcggagcctggggatggggtgaggcagccggtcccaggccctgggatccaggcggcgcgctgaggccctcccttaccttccagcgggaacccgctacgcgggtagttctgccccgggcccggccgcatcatcctgggcacagcgccggccagcgtggtcatcctgggggcagcttcgctcggaaattatatccaggtgaaggcgaaacggaaaggcgagtgcggcgcggatgaccctcgggaactatccggagcgtggagagcccctccccaaaacggctggagagagagggagggacgcggggaggggggctgtcggttcctagtccagaggccggagctggaacccgggaaaggggaggacggggaggccccggagtccaggatcccgagcccagggcggaaaagtttggtacgagtctgggcaaatgttccagcgactggggtccctgaaaagggggctcagagagccacggcgagccggggagcctggtgaggctggagcgcggcctgcctgagtctcctcctgtggtgacaccgagtgcggggatccgggctcgggagcatttattagttcttttacccaaagcttggtcaggagccctgagctgcgattggccgacgggtagaccgtcccgggtggcggagacacgcgctgattgggcaacagcgaccactttctcttcccatctctggtggtgccgaggcctctgctggccccgagggggacccgcgctgcgccccttgcccaggagagaaggttggcccggtggaaactgagagagacagccccagggagatggcagttgctgagggcggagaagttcctgtctctctgtctctgtctctctgtctgtgtcactctgtgtgtgtgtgtgtgtgtgtgtgtgtgtgtgtgtgtgtgtgtgtgtgtgtctttctctgatcactctttccttgactttctatttccctctctgtctctttctgtgcctctgtgtgtgtgtctcgctcagcctctattcctcttgtgatttcctgtgtctctctctatgtctcattttttctacctgtaggtctcgctctcatttctcttggcttactgccactggagggggcacaattccaataagaaggcatctggggccccagacatatttagctttccttcctgtggtcagtgccccttggcctaggcttgttaaggggtcctcccgatggggctcctcctgggaggagtccagggtgcgctgatgttcttttgtcttctccgtccgcaagcggggctaatgtgaagcacaggcagccgtcgctaggcccaagcactcgttagttgaaggctgggggtatgggggagggtgcagaaaaaaacctggctcctcttcttggtgtaaaaaccgctctggcaagctgcggttctaaatctctacatatagatccccgatgcgtcgacagagatgtgtctgtatgttaaagttttgcccgggttcagcgtttgttctcaggaatttattatggcattcagactaaactgctggaaaaataaaaggaacgaagtcttggctaggagctgaagtgtccccagcaggatatgacgccaggagtgttgtaaagactgtctgtccttagagaaggtaccattgtgcatagccttttatttataacttggtaagtgccagcgaactcgcctcctttacacccccgagtgccagccccgcgctctgcactgcgctttattcgctcgagcctattcagggactgtcactccggggccgcgaggtattcagggccttaatcaatcaaaaggatgagaatcgggcaggtttttccctttgaaataaaggaaacaatgacttctgggcttcaagttcccccttttccttttatgatttttgaatttttcctgcccctggagggagttctccactcctctctctctgtccccctcccccacctcctttgacagttttgacgtgaactcgggcccccaaccctacttccccattccctaattaaggcaaactcagaaggcaagatgtaggggggtgtggggtatagccgctcagcagtccacaagttggccctttaaaaacccactcaccattggggaaaccaggcaagctttcagcctgcctgatgccagaaggcttggttgaccctcagagccacggagacaggtctcaggagactcccagaaatgtctggacccatgaaggaggcatgtgccttgtttaacctggttttacattaaatgattcaatttttcaaggggaaaattttctcattttctttttaaggcgttggggccaccaaagcctgtgtccgtacgttttaagccacttctcagcgatagcattttgagagctagactttttccaagttttcttcttcccaaaggttaagcagagtcgacagagcactttctggggtcagcggtaattgctgtgtgaaggaggtaccagaagtgtaatttcaagaaggcaaaagtaggctcaactctcagctaaaataaactcttggaccccgcgagcagttaaagaacatctagagctgagtctcatttgtttttgagccggaggcttggtctccaagccctcccagcgtccacccgtctctctcctgccgggagttttctctcctaagagccggcagatgctggagggaagcgcttgctgcaagattccttctcccggtcccgtagattgcagagtccgcgggaccgttgaacggaggtactgccggctgagctgggtcttaagtgcccatgggttcataaactagctgtcacttgctataaacatgtacaaatggaggccacaaggatgtgggggtgctggggacctaaagctccggaatcaggaggcgactcattttctctcctttccggcctctttcttttctgccgagcgctctgagattcatatgtacccagatgatcagcccggcccttctcaccggccagtggccagaggtccctggacacccggagaggggtgggagggcacccttaggctctggacagctgggccacatccaaagacttaatgaatctaaatttcttgtggcctgtgtccccgaagtccgacctgggatggccaggacagcaaagttggctgaggctgcctggcctagggcgcccgcacgccgccaaacctaacccggctcagagccgtgactccgcagaacagggcgcaacaggtctcaggaatgccgggtgattccagccactctttctctgtctccgagtcttgggcctcccctttatttctttctgaagtctctccggagcccaagccaccccacacccaaaccccgcagctggatgggagtccaggccacttccctatccgcagccggtgggccaaggagtcctggtgccaaatttggccgcggtacaggcgctaattggtaaagggatgacccagcggtggggcttggaaggcgagggcccgcgccctgcatccttgaaccctggtttgggaggcagtgacttttacctgggctaacaaattacccagaaagcatcagtgggactctccacaacggtgttgtgaacgagtgtagggtccactcacgctctgtgcacgttcgaaatgaaacgggagccttgaagacgatatttggataatttgacaaaaaaaaaaaaaaggtgggcgggggagatagcttctattgtcccctctgcgcctctgcccccagtttcagagacactacaggtgaaaataacagcgggctggctgtccaggcctgagtggagcgtgcccttgttagcttgaaagttctccctcgcagcccgtttggatgcgtgcgtctacagcccagtcgcactttggtgaccggcctgggctgtgaagcaccctttagcgaacagcctccgcacttggggacactggcacaagggtttcatggcccgtggacttctcagggcctctgagggttgacttcatactcagccagacacaggtcttaagaggaaattatgatctatgcaaaataatgtccctgacctagtggggagcgggggtggtgtctgccacccagacctttttcctcccgtctgaagggccgagctctggcaggctgacacggtcgagcagagaagttcctggccacccgcccggccccaggcgtgattctcaggatgcagtaaaagttgggcaaacgccgagaaaccctcaatcccacagaaaggctgccgggggctcacggggaggacatcaaaacgccaggttcgtgatcatgagcttccggtccggatgtgatgatacaggattggtgaatgcccgggttaaacccgtggtccttcgcagccgctgcctcagtgacagtcattaggccccccgcagttatttgtcaaaagcattggcgccgctcttctccccatcgaaaaatcagtcgggatgagttcggattaagggactagatgaggatgtggacatcccattgaaacatggtgtaggccagccgaagtgggtttgctccttcagctgggggagccccagggaacgtgtgagcgggtttacaataaggaacatatggtttgtgggaagataggaagagagaaggaaaataggaaaggaaaaagaaaagaggaaaagaagagagaggtacttttttttttaaaggcagtgagggagggagagaagaataaatctcacagcagctggtgtcctagttcatttgggtctgagaaaattatttttaggcaaacaaggaagacaggattccgccgcccgattctccagggcgggaagaataggatgtcttgtaaaaaataagtaagtcctgtctaatcttccaaaaaatgttctgctcaattaggtaaaagttcatggtggggtgggggtgatgtttagaagacagattcttcggtaactgctctttggtgtgtgtattcggggtgtgtgtattcggggtgtgtgtattcggggtgtgtgtatgtgtgtgtgtgaaagaatctggtgtgtgtgaaaggggtaagggttgaaggaccttatttagctgggggaccgtcttgtattgggagcgggcagcctaggccttggaaagaccagaaaatctgatctgtgcggaggcaggtgaaggctgtgagtgaggtgggggcgggaacagagctggaggaagtgaataaaagaaaccttggggtccgttggtttccttgactcgtggagcaaaaaagtaggcgagtgaccactccaggaactcctgcctccgggcgccggtacataaagagctggggctgtgtgtcctgctcttgggggaggagggtactgggaagggggaactaacaggtctttctttcgctcggatcaggactggactccttctgactccacgcggccccagctcctgaaccagcgcagtgagcctcagccgcttctcaaactgggtctcagaaaatttctcctcgagatggatttcagcggcaggaaagaggggccagtgacgcgaggagcaagaaaagagtaacatgggagatgaatgttcaaacccagatctcctcgctgagcctggaagctcgccaccgtgggatcacgggaaccagaggcaagaggctgcgaatgagtccaacacccgcgttcctcgagttttaaaagcacacctggggccagagactgcacagccaactaaacggagtaaacgcaacaggtggaggaggcagagttgtcaggggccaagcccggcgcgatctggccagttcttggggagcgcggacctgggactgcagagaggcgttttgaagagtgctgcgcgcacctgcctctcggagatatccaactccacccgggcgtctcctgagagcgcacagtccacagaccccgggagggctgcccgccctaggacacgtactctcccgacccctcactctttcaaaattggggaagaggcggaggagatgaaaaagaagaaagagagaaagagaagaaaagagagaaagaaggaaagaaattttaaaaaataataaaaggagggaagaatggaggtaaaacgcgggggagagaagaggggagaaactctcctcaccacaaccaaagcaggaggcctaagcttcctgaatttctacacatgacttgcattaagttccttcctagaacttaaactttttcatctcccgtcacccaagaaaacacccatttcctcttttaaataaagtttctttttctggagatgaacctttaaataagtcgtacgtttgggagcgagggacaggagaataattttgatccagaaccttggagattggagaagcaggtggaaaaattctaaaaagatgaaaactgaccatctccgacacagaaacccatcgaaaggggccaccgagacccgttgattagctggagggagcatgcggcagaagtgcagacccctcgctaacccgccaacctccaagagccctcttgcagaaagctgcccggctccccacggtggccctgcgcgcgcaccatcctcgcggtctcgcttcttcgccccggaaaactctatgaggggcaccccagcctcagccgggttaagacaagtagccccaagaggaaggagcctcagagagcctttcttcctgttcttcttcgtcttcttttttttctaaacgaaatctaatactatctggctgcaaaaatatattatcaccggctctcagcctaagagactaacatttggatatgtaggaaatgtaatctgcatggctaattgattctcagcgtatcagtttaaaggataaagatcgatatctacatgatggatattgtattaataggggcataaataaaggtcgaagagtcgttaccaaaacctttgaagccgcttttcggctctcgggccctccacgcggccagtgggtctctcccacctccccgcccccagctgctgctgggcagggagcatttgcttccccctccaacccgggaccagggtggaggagtctatggttaaagcgaaagtgtttcactgcggcaacgctggggaaaggaggttcttttttcctgggctgcagcaggtggacagtaaggcccgagaaaatgtaatattttaacaaaacgcaccactccccgaaacacacgtatacgacccacacagggacacaaacaaccacacatgtacacacacacacacacacacacactcacacacacacaatcacgcagggcggggagggttctcagcgttccctgagcgccctttggccttagagacagggaataaattcttctttccatccctcggccccctcccagagggcagcgacgaaagccctggccgagcacaaggatcggtgatctgggctcctggaggtaccctctagatggggtaaggacggggaaggatcaagaggttctgcgggaagtgtgcggggctggggggcgggggtgcccgccaatgtccgcagaaggcaaggaggcccactcgaggagggctggatggagacagacttgagtcgggccctgagccccagggagtgcggcccggtagatctcggggcgaggggaacaggatcgggtacacttgatccggaacaagaacgcctcggcctggcggttgcccgttagtcccggatcccagcggccgcttcaccactgagcccgagccgccgagggaattttccaaatgcaaatcaaacacccttggcgccccgcttcttcattaattaagaggaacgtttcgacaaaaccggcgtaatctttattaattacgcagcccttagcgcgccgttcgcatcaatcacgcccaaagcgaaagtgcagggggcgcctaatcccttcccagagcgcgtttggagaaggagccgcgtggccggcgtttccaccgtgacttccacctttctgggctcgcctggcactggctgctcagccggcgcgcagggaggcctttccggaaacaccggctggctgcgcgctagcaggaccgctctagatcccctgacaggccggaaaataacccccactcactatttgggcacgcgctcgtacgcagaaactcgcacagggactcgcgtggacactttatggcccatttcctccgtcccctcacccttaggctcagtggggaccacgcggttctcagtcctcctcttccctaggaccctctaaaaaggagcctggggcgaaatgacagagggaggcagaaaacctcctgttgccccaggacgccccgaaaaactgctctgggggatggggcggggaagaccttagaagttgtcagggcgaccaactcctcccaggtgaccaggttgccataggaccagcacactgctcaggagtgagttttggggagagagagggatcctccag
